United States Patent Application Publication US 2026/0258383 A1 - sequence listing, part 2

SEQ ID NO: 1082 - protein, 2094 aa, synthetic construct
MPAAKRVKLDGGDKKYSIGLDIGTNSVGWAVITDEYKVPSKKFKVLGNTDRHSIKKNLIGALLFDSGETAEATRLKRTARRRYTRRKNRICYLQEIFSNEMAKVDDSFFHRLEESFLVEEDKKHERHPIFGNIVDEVAYHEKYPTIYHLRKKLVDSTDKADLRLIYLALAHMIKFRGHFLIEGDLNPDNSDVDKLFIQLVQTYNQLFEENPINASGVDAKAILSARLSKSRRLENLIAQLPGEKKNGLFGNLIALSLGLTPNFKSNFDLAEDAKLQLSKDTYDDDLDNLLAQIGDQYADLFLAAKNLSDAILLSDILRVNTEITKAPLSASMIKRYDEHHQDLTLLKALVRQQLPEKYKEIFFDQSKNGYAGYIDGGASQEEFYKFIKPILEKMDGTEELLVKLNREDLLRKQRTFDNGSIPHQIHLGELHAILRRQEDFYPFLKDNREKIEKILTFRIPYYVGPLARGNSRFAWMTRKSEETITPWNFEEVVDKGASAQSFIERMTNFDKNLPNEKVLPKHSLLYEYFTVYNELTKVKYVTEGMRKPAFLSGEQKKAIVDLLFKTNRKVTVKQLKEDYFKKIECFDSVEISGVEDRFNASLGTYHDLLKIIKDKDFLDNEENEDILEDIVLTLTLFEDREMIEERLKTYAHLFDDKVMKQLKRRRYTGWGRLSRKLINGIRDKQSGKTILDFLKSDGFANRNFMQLIHDDSLTFKEDIQKAQVSGQGDSLHEHIANLAGSPAIKKGILQTVKVVDELVKVMGRHKPENIVIEMARENQTTQKGQKNSRERMKRIEEGIKELGSQILKEHPVENTQLQNEKLYLYYLQNGRDMYVDQELDINRLSDYDVDHIVPQSFLKDDSIDNKVLTRSDKARGKSDNVPSEEVVKKMKNYWRQLLNAKLITQRKFDNLTKAERGGLSELDKAGFIKRQLVETRQITKHVAQILDSRMNTKYDENDKLIREVKVITLKSKLVSDFRKDFQFYKVREINNYHHAHDAYLNAVVGTALIKKYPKLESEFVYGDYKVYDVRKMIAKSEQEIGKATAKYFFYSNIMNFFKTEITLANGEIRKRPLIETNGETGEIVWDKGRDFATVRKVLSMPQVNIVKKTEVQTGGFSKESILPKRNSDKLIARKKDWDPKKYGGFDSPTVAYSVLVVAKVEKGKSKKLKSVKELLGITIMERSSFEKNPIDFLEAKGYKEVKKDLIIKLPKYSLFELENGRKRMLASAGELQKGNELALPSKYVNFLYLASHYEKLKGSPEDNEQKQLFVEQHKHYLDEIIEQISEFSKRVILADANLDKVLSAYNKHRDKPIREQAENIIHLFTLTNLGAPAAFKYFDTTIDRKRYTSTKEVLDATLIHQSITGLYETRIDLSQLGGDGGGSSGGSGGGGGTLNIEDEYRLHETSKEPDVPLGSTWLSDFPQAWAETGGMGLAVRQAPLIIPLKATSTPVSIKQYPMSQEARLGIKPHIQRLLDQGILVPCQSPWNTPLLPVKKPGTNDYRPVQDLREVNKRVEDIHPTVPNPYNLLSGLPPSHQWYTVLDLKDAFFCLRLHPTSQPLFAFEWRDPEMGISGQLTWTRLPQGFKNSPTLFNEALHRDLADFRIQHPDLILLQYVDDLLLAATSEQDCQRGTRALLQTLGNLGYRASAKKAQICQKQVKYLGYLLKEGQRWLTEARKETVMGQPTPKTPRQLREFLGKAGFCRLFIPGFAEMAAPLYPLTKPGTLFNWGPDQQKAYQEIKQALLTAPALGLPDLTKPFELFVDEKQGYAKGVLTQKLGPWRRPVAYLSKKLDPVAAGWPPCLRMVAAIAVLTKDAGKLTMGQPLVILAPHAVEALVKQPPDRWLSNARMTHYQAMLLDTDRVQFGPVVALNPATLLPLPEKEAPHDCLEILAETHGTRPDLTDQPIPDADYTWYTDGSSFLQEGQRRAGAAVTTETEVIWARALPAGTSAQRAELIALTQALKMAEGKKLNVYTDSRYAFATAHVHGEIYRRRGWLTSEGREIKNKNEILALLKALFLPKRLSIIHCPGHQKGNSAEARGNRMADQAAREAAMKAVLETSTLLAGKRTADGSEFEKRTADGSEFESPKKKAKVE

SEQ ID NO: 1083 - protein, 2093 aa, synthetic construct
MPAAKRVKLDGGDKKYSIGLDIGTNSVGWAVITDEYKVPSKKFKVLGNTDRHSIKKNLIGALLFDSGETAEATRLKRTARRRYTRRKNRICYLQEIFSNEMAKVDDSFFHRLEESFLVEEDKKHERHPIFGNIVDEVAYHEKYPTIYHLRKKLVDSTDKADLRLIYLALAHMIKFRGHFLIEGDLNPDNSDVDKLFIQLVQTYNQLFEENPINASGVDAKAILSARLSKSRRLENLIAQLPGEKKNGLFGNLIALSLGLTPNFKSNFDLAEDAKLQLSKDTYDDDLDNLLAQIGDQYADLFLAAKNLSDAILLSDILRVNTEITKAPLSASMIKRYDEHHQDLTLLKALVRQQLPEKYKEIFFDQSKNGYAGYIDGGASQEEFYKFIKPILEKMDGTEELLVKLNREDLLRKQRTFDNGSIPHQIHLGELHAILRRQEDFYPFLKDNREKIEKILTFRIPYYVGPLARGNSRFAWMTRKSEETITPWNFEEVVDKGASAQSFIERMTNFDKNLPNEKVLPKHSLLYEYFTVYNELTKVKYVTEGMRKPAFLSGEQKKAIVDLLFKTNRKVTVKQLKEDYFKKIECFDSVEISGVEDRFNASLGTYHDLLKIIKDKDFLDNEENEDILEDIVLTLTLFEDREMIEERLKTYAHLFDDKVMKQLKRRRYTGWGRLSRKLINGIRDKQSGKTILDFLKSDGFANRNFMQLIHDDSLTFKEDIQKAQVSGQGDSLHEHIANLAGSPAIKKGILQTVKVVDELVKVMGRHKPENIVIEMARENQTTQKGQKNSRERMKRIEEGIKELGSQILKEHPVENTQLQNEKLYLYYLQNGRDMYVDQELDINRLSDYDVDHIVPQSFLKDDSIDNKVLTRSDKARGKSDNVPSEEVVKKMKNYWRQLLNAKLITQRKFDNLTKAERGGLSELDKAGFIKRQLVETRQITKHVAQILDSRMNTKYDENDKLIREVKVITLKSKLVSDFRKDFQFYKVREINNYHHAHDAYLNAVVGTALIKKYPKLESEFVYGDYKVYDVRKMIAKSEQEIGKATAKYFFYSNIMNFFKTEITLANGEIRKRPLIETNGETGEIVWDKGRDFATVRKVLSMPQVNIVKKTEVQTGGFSKESILPKRNSDKLIARKKDWDPKKYGGFDSPTVAYSVLVVAKVEKGKSKKLKSVKELLGITIMERSSFEKNPIDFLEAKGYKEVKKDLIIKLPKYSLFELENGRKRMLASAGELQKGNELALPSKYVNFLYLASHYEKLKGSPEDNEQKQLFVEQHKHYLDEIIEQISEFSKRVILADANLDKVLSAYNKHRDKPIREQAENIIHLFTLTNLGAPAAFKYFDTTIDRKRYTSTKEVLDATLIHQSITGLYETRIDLSQLGGDGGGGSEAAAKGGTLNIEDEYRLHETSKEPDVPLGSTWLSDFPQAWAETGGMGLAVRQAPLIIPLKATSTPVSIKQYPMSQEARLGIKPHIQRLLDQGILVPCQSPWNTPLLPVKKPGTNDYRPVQDLREVNKRVEDIHPTVPNPYNLLSGLPPSHQWYTVLDLKDAFFCLRLHPTSQPLFAFEWRDPEMGISGQLTWTRLPQGFKNSPTLFNEALHRDLADFRIQHPDLILLQYVDDLLLAATSEQDCQRGTRALLQTLGNLGYRASAKKAQICQKQVKYLGYLLKEGQRWLTEARKETVMGQPTPKTPRQLREFLGKAGFCRLFIPGFAEMAAPLYPLTKPGTLFNWGPDQQKAYQEIKQALLTAPALGLPDLTKPFELFVDEKQGYAKGVLTQKLGPWRRPVAYLSKKLDPVAAGWPPCLRMVAAIAVLTKDAGKLTMGQPLVILAPHAVEALVKQPPDRWLSNARMTHYQAMLLDTDRVQFGPVVALNPATLLPLPEKEAPHDCLEILAETHGTRPDLTDQPIPDADYTWYTDGSSFLQEGQRRAGAAVTTETEVIWARALPAGTSAQRAELIALTQALKMAEGKKLNVYTDSRYAFATAHVHGEIYRRRGWLTSEGREIKNKNEILALLKALFLPKRLSIIHCPGHQKGNSAEARGNRMADQAAREAAMKAVLETSTLLAGKRTADGSEFEKRTADGSEFESPKKKAKVE

SEQ ID NO: 1084 - protein, 2094 aa, synthetic construct
MPAAKRVKLDGGDKKYSIGLDIGTNSVGWAVITDEYKVPSKKFKVLGNTDRHSIKKNLIGALLFDSGETAEATRLKRTARRRYTRRKNRICYLQEIFSNEMAKVDDSFFHRLEESFLVEEDKKHERHPIFGNIVDEVAYHEKYPTIYHLRKKLVDSTDKADLRLIYLALAHMIKFRGHFLIEGDLNPDNSDVDKLFIQLVQTYNQLFEENPINASGVDAKAILSARLSKSRRLENLIAQLPGEKKNGLFGNLIALSLGLTPNFKSNFDLAEDAKLQLSKDTYDDDLDNLLAQIGDQYADLFLAAKNLSDAILLSDILRVNTEITKAPLSASMIKRYDEHHQDLTLLKALVRQQLPEKYKEIFFDQSKNGYAGYIDGGASQEEFYKFIKPILEKMDGTEELLVKLNREDLLRKQRTFDNGSIPHQIHLGELHAILRRQEDFYPFLKDNREKIEKILTFRIPYYVGPLARGNSRFAWMTRKSEETITPWNFEEVVDKGASAQSFIERMTNFDKNLPNEKVLPKHSLLYEYFTVYNELTKVKYVTEGMRKPAFLSGEQKKAIVDLLFKTNRKVTVKQLKEDYFKKIECFDSVEISGVEDRFNASLGTYHDLLKIIKDKDFLDNEENEDILEDIVLTLTLFEDREMIEERLKTYAHLFDDKVMKQLKRRRYTGWGRLSRKLINGIRDKQSGKTILDFLKSDGFANRNFMQLIHDDSLTFKEDIQKAQVSGQGDSLHEHIANLAGSPAIKKGILQTVKVVDELVKVMGRHKPENIVIEMARENQTTQKGQKNSRERMKRIEEGIKELGSQILKEHPVENTQLQNEKLYLYYLQNGRDMYVDQELDINRLSDYDVDHIVPQSFLKDDSIDNKVLTRSDKARGKSDNVPSEEVVKKMKNYWRQLLNAKLITQRKFDNLTKAERGGLSELDKAGFIKRQLVETRQITKHVAQILDSRMNTKYDENDKLIREVKVITLKSKLVSDFRKDFQFYKVREINNYHHAHDAYLNAVVGTALIKKYPKLESEFVYGDYKVYDVRKMIAKSEQEIGKATAKYFFYSNIMNFFKTEITLANGEIRKRPLIETNGETGEIVWDKGRDFATVRKVLSMPQVNIVKKTEVQTGGFSKESILPKRNSDKLIARKKDWDPKKYGGFDSPTVAYSVLVVAKVEKGKSKKLKSVKELLGITIMERSSFEKNPIDFLEAKGYKEVKKDLIIKLPKYSLFELENGRKRMLASAGELQKGNELALPSKYVNFLYLASHYEKLKGSPEDNEQKQLFVEQHKHYLDEIIEQISEFSKRVILADANLDKVLSAYNKHRDKPIREQAENIIHLFTLTNLGAPAAFKYFDTTIDRKRYTSTKEVLDATLIHQSITGLYETRIDLSQLGGDGGGSSGGGPAPGGTLNIEDEYRLHETSKEPDVPLGSTWLSDFPQAWAETGGMGLAVRQAPLIIPLKATSTPVSIKQYPMSQEARLGIKPHIQRLLDQGILVPCQSPWNTPLLPVKKPGTNDYRPVQDLREVNKRVEDIHPTVPNPYNLLSGLPPSHQWYTVLDLKDAFFCLRLHPTSQPLFAFEWRDPEMGISGQLTWTRLPQGFKNSPTLFNEALHRDLADFRIQHPDLILLQYVDDLLLAATSEQDCQRGTRALLQTLGNLGYRASAKKAQICQKQVKYLGYLLKEGQRWLTEARKETVMGQPTPKTPRQLREFLGKAGFCRLFIPGFAEMAAPLYPLTKPGTLFNWGPDQQKAYQEIKQALLTAPALGLPDLTKPFELFVDEKQGYAKGVLTQKLGPWRRPVAYLSKKLDPVAAGWPPCLRMVAAIAVLTKDAGKLTMGQPLVILAPHAVEALVKQPPDRWLSNARMTHYQAMLLDTDRVQFGPVVALNPATLLPLPEKEAPHDCLEILAETHGTRPDLTDQPIPDADYTWYTDGSSFLQEGQRRAGAAVTTETEVIWARALPAGTSAQRAELIALTQALKMAEGKKLNVYTDSRYAFATAHVHGEIYRRRGWLTSEGREIKNKNEILALLKALFLPKRLSIIHCPGHQKGNSAEARGNRMADQAAREAAMKAVLETSTLLAGKRTADGSEFEKRTADGSEFESPKKKAKVE

SEQ ID NO: 1085 - protein, 2094 aa, synthetic construct
MPAAKRVKLDGGDKKYSIGLDIGTNSVGWAVITDEYKVPSKKFKVLGNTDRHSIKKNLIGALLFDSGETAEATRLKRTARRRYTRRKNRICYLQEIFSNEMAKVDDSFFHRLEESFLVEEDKKHERHPIFGNIVDEVAYHEKYPTIYHLRKKLVDSTDKADLRLIYLALAHMIKFRGHFLIEGDLNPDNSDVDKLFIQLVQTYNQLFEENPINASGVDAKAILSARLSKSRRLENLIAQLPGEKKNGLFGNLIALSLGLTPNFKSNFDLAEDAKLQLSKDTYDDDLDNLLAQIGDQYADLFLAAKNLSDAILLSDILRVNTEITKAPLSASMIKRYDEHHQDLTLLKALVRQQLPEKYKEIFFDQSKNGYAGYIDGGASQEEFYKFIKPILEKMDGTEELLVKLNREDLLRKQRTFDNGSIPHQIHLGELHAILRRQEDFYPFLKDNREKIEKILTFRIPYYVGPLARGNSRFAWMTRKSEETITPWNFEEVVDKGASAQSFIERMTNFDKNLPNEKVLPKHSLLYEYFTVYNELTKVKYVTEGMRKPAFLSGEQKKAIVDLLFKTNRKVTVKQLKEDYFKKIECFDSVEISGVEDRFNASLGTYHDLLKIIKDKDFLDNEENEDILEDIVLTLTLFEDREMIEERLKTYAHLFDDKVMKQLKRRRYTGWGRLSRKLINGIRDKQSGKTILDFLKSDGFANRNFMQLIHDDSLTFKEDIQKAQVSGQGDSLHEHIANLAGSPAIKKGILQTVKVVDELVKVMGRHKPENIVIEMARENQTTQKGQKNSRERMKRIEEGIKELGSQILKEHPVENTQLQNEKLYLYYLQNGRDMYVDQELDINRLSDYDVDHIVPQSFLKDDSIDNKVLTRSDKARGKSDNVPSEEVVKKMKNYWRQLLNAKLITQRKFDNLTKAERGGLSELDKAGFIKRQLVETRQITKHVAQILDSRMNTKYDENDKLIREVKVITLKSKLVSDFRKDFQFYKVREINNYHHAHDAYLNAVVGTALIKKYPKLESEFVYGDYKVYDVRKMIAKSEQEIGKATAKYFFYSNIMNFFKTEITLANGEIRKRPLIETNGETGEIVWDKGRDFATVRKVLSMPQVNIVKKTEVQTGGFSKESILPKRNSDKLIARKKDWDPKKYGGFDSPTVAYSVLVVAKVEKGKSKKLKSVKELLGITIMERSSFEKNPIDFLEAKGYKEVKKDLIIKLPKYSLFELENGRKRMLASAGELQKGNELALPSKYVNFLYLASHYEKLKGSPEDNEQKQLFVEQHKHYLDEIIEQISEFSKRVILADANLDKVLSAYNKHRDKPIREQAENIIHLFTLTNLGAPAAFKYFDTTIDRKRYTSTKEVLDATLIHQSITGLYETRIDLSQLGGDGGGGSGGGPAPGGTLNIEDEYRLHETSKEPDVPLGSTWLSDFPQAWAETGGMGLAVRQAPLIIPLKATSTPVSIKQYPMSQEARLGIKPHIQRLLDQGILVPCQSPWNTPLLPVKKPGTNDYRPVQDLREVNKRVEDIHPTVPNPYNLLSGLPPSHQWYTVLDLKDAFFCLRLHPTSQPLFAFEWRDPEMGISGQLTWTRLPQGFKNSPTLFNEALHRDLADFRIQHPDLILLQYVDDLLLAATSEQDCQRGTRALLQTLGNLGYRASAKKAQICQKQVKYLGYLLKEGQRWLTEARKETVMGQPTPKTPRQLREFLGKAGFCRLFIPGFAEMAAPLYPLTKPGTLFNWGPDQQKAYQEIKQALLTAPALGLPDLTKPFELFVDEKQGYAKGVLTQKLGPWRRPVAYLSKKLDPVAAGWPPCLRMVAAIAVLTKDAGKLTMGQPLVILAPHAVEALVKQPPDRWLSNARMTHYQAMLLDTDRVQFGPVVALNPATLLPLPEKEAPHDCLEILAETHGTRPDLTDQPIPDADYTWYTDGSSFLQEGQRRAGAAVTTETEVIWARALPAGTSAQRAELIALTQALKMAEGKKLNVYTDSRYAFATAHVHGEIYRRRGWLTSEGREIKNKNEILALLKALFLPKRLSIIHCPGHQKGNSAEARGNRMADQAAREAAMKAVLETSTLLAGKRTADGSEFEKRTADGSEFESPKKKAKVE

SEQ ID NO: 1086 - protein, 2091 aa, synthetic construct
MPAAKRVKLDGGDKKYSIGLDIGTNSVGWAVITDEYKVPSKKFKVLGNTDRHSIKKNLIGALLFDSGETAEATRLKRTARRRYTRRKNRICYLQEIFSNEMAKVDDSFFHRLEESFLVEEDKKHERHPIFGNIVDEVAYHEKYPTIYHLRKKLVDSTDKADLRLIYLALAHMIKFRGHFLIEGDLNPDNSDVDKLFIQLVQTYNQLFEENPINASGVDAKAILSARLSKSRRLENLIAQLPGEKKNGLFGNLIALSLGLTPNFKSNFDLAEDAKLQLSKDTYDDDLDNLLAQIGDQYADLFLAAKNLSDAILLSDILRVNTEITKAPLSASMIKRYDEHHQDLTLLKALVRQQLPEKYKEIFFDQSKNGYAGYIDGGASQEEFYKFIKPILEKMDGTEELLVKLNREDLLRKQRTFDNGSIPHQIHLGELHAILRRQEDFYPFLKDNREKIEKILTFRIPYYVGPLARGNSRFAWMTRKSEETITPWNFEEVVDKGASAQSFIERMTNFDKNLPNEKVLPKHSLLYEYFTVYNELTKVKYVTEGMRKPAFLSGEQKKAIVDLLFKTNRKVTVKQLKEDYFKKIECFDSVEISGVEDRFNASLGTYHDLLKIIKDKDFLDNEENEDILEDIVLTLTLFEDREMIEERLKTYAHLFDDKVMKQLKRRRYTGWGRLSRKLINGIRDKQSGKTILDFLKSDGFANRNFMQLIHDDSLTFKEDIQKAQVSGQGDSLHEHIANLAGSPAIKKGILQTVKVVDELVKVMGRHKPENIVIEMARENQTTQKGQKNSRERMKRIEEGIKELGSQILKEHPVENTQLQNEKLYLYYLQNGRDMYVDQELDINRLSDYDVDHIVPQSFLKDDSIDNKVLTRSDKARGKSDNVPSEEVVKKMKNYWRQLLNAKLITQRKFDNLTKAERGGLSELDKAGFIKRQLVETRQITKHVAQILDSRMNTKYDENDKLIREVKVITLKSKLVSDFRKDFQFYKVREINNYHHAHDAYLNAVVGTALIKKYPKLESEFVYGDYKVYDVRKMIAKSEQEIGKATAKYFFYSNIMNFFKTEITLANGEIRKRPLIETNGETGEIVWDKGRDFATVRKVLSMPQVNIVKKTEVQTGGFSKESILPKRNSDKLIARKKDWDPKKYGGFDSPTVAYSVLVVAKVEKGKSKKLKSVKELLGITIMERSSFEKNPIDFLEAKGYKEVKKDLIIKLPKYSLFELENGRKRMLASAGELQKGNELALPSKYVNFLYLASHYEKLKGSPEDNEQKQLFVEQHKHYLDEIIEQISEFSKRVILADANLDKVLSAYNKHRDKPIREQAENIIHLFTLTNLGAPAAFKYFDTTIDRKRYTSTKEVLDATLIHQSITGLYETRIDLSQLGGDGGGSSPAPGGTLNIEDEYRLHETSKEPDVPLGSTWLSDFPQAWAETGGMGLAVRQAPLIIPLKATSTPVSIKQYPMSQEARLGIKPHIQRLLDQGILVPCQSPWNTPLLPVKKPGTNDYRPVQDLREVNKRVEDIHPTVPNPYNLLSGLPPSHQWYTVLDLKDAFFCLRLHPTSQPLFAFEWRDPEMGISGQLTWTRLPQGFKNSPTLFNEALHRDLADFRIQHPDLILLQYVDDLLLAATSEQDCQRGTRALLQTLGNLGYRASAKKAQICQKQVKYLGYLLKEGQRWLTEARKETVMGQPTPKTPRQLREFLGKAGFCRLFIPGFAEMAAPLYPLTKPGTLFNWGPDQQKAYQEIKQALLTAPALGLPDLTKPFELFVDEKQGYAKGVLTQKLGPWRRPVAYLSKKLDPVAAGWPPCLRMVAAIAVLTKDAGKLTMGQPLVILAPHAVEALVKQPPDRWLSNARMTHYQAMLLDTDRVQFGPVVALNPATLLPLPEKEAPHDCLEILAETHGTRPDLTDQPIPDADYTWYTDGSSFLQEGQRRAGAAVTTETEVIWARALPAGTSAQRAELIALTQALKMAEGKKLNVYTDSRYAFATAHVHGEIYRRRGWLTSEGREIKNKNEILALLKALFLPKRLSIIHCPGHQKGNSAEARGNRMADQAAREAAMKAVLETSTLLAGKRTADGSEFEKRTADGSEFESPKKKAKVE

SEQ ID NO: 1087 - protein, 2094 aa, synthetic construct
MPAAKRVKLDGGDKKYSIGLDIGTNSVGWAVITDEYKVPSKKFKVLGNTDRHSIKKNLIGALLFDSGETAEATRLKRTARRRYTRRKNRICYLQEIFSNEMAKVDDSFFHRLEESFLVEEDKKHERHPIFGNIVDEVAYHEKYPTIYHLRKKLVDSTDKADLRLIYLALAHMIKFRGHFLIEGDLNPDNSDVDKLFIQLVQTYNQLFEENPINASGVDAKAILSARLSKSRRLENLIAQLPGEKKNGLFGNLIALSLGLTPNFKSNFDLAEDAKLQLSKDTYDDDLDNLLAQIGDQYADLFLAAKNLSDAILLSDILRVNTEITKAPLSASMIKRYDEHHQDLTLLKALVRQQLPEKYKEIFFDQSKNGYAGYIDGGASQEEFYKFIKPILEKMDGTEELLVKLNREDLLRKQRTFDNGSIPHQIHLGELHAILRRQEDFYPFLKDNREKIEKILTFRIPYYVGPLARGNSRFAWMTRKSEETITPWNFEEVVDKGASAQSFIERMTNFDKNLPNEKVLPKHSLLYEYFTVYNELTKVKYVTEGMRKPAFLSGEQKKAIVDLLFKTNRKVTVKQLKEDYFKKIECFDSVEISGVEDRFNASLGTYHDLLKIIKDKDFLDNEENEDILEDIVLTLTLFEDREMIEERLKTYAHLFDDKVMKQLKRRRYTGWGRLSRKLINGIRDKQSGKTILDFLKSDGFANRNFMQLIHDDSLTFKEDIQKAQVSGQGDSLHEHIANLAGSPAIKKGILQTVKVVDELVKVMGRHKPENIVIEMARENQTTQKGQKNSRERMKRIEEGIKELGSQILKEHPVENTQLQNEKLYLYYLQNGRDMYVDQELDINRLSDYDVDHIVPQSFLKDDSIDNKVLTRSDKARGKSDNVPSEEVVKKMKNYWRQLLNAKLITQRKFDNLTKAERGGLSELDKAGFIKRQLVETRQITKHVAQILDSRMNTKYDENDKLIREVKVITLKSKLVSDFRKDFQFYKVREINNYHHAHDAYLNAVVGTALIKKYPKLESEFVYGDYKVYDVRKMIAKSEQEIGKATAKYFFYSNIMNFFKTEITLANGEIRKRPLIETNGETGEIVWDKGRDFATVRKVLSMPQVNIVKKTEVQTGGFSKESILPKRNSDKLIARKKDWDPKKYGGFDSPTVAYSVLVVAKVEKGKSKKLKSVKELLGITIMERSSFEKNPIDFLEAKGYKEVKKDLIIKLPKYSLFELENGRKRMLASAGELQKGNELALPSKYVNFLYLASHYEKLKGSPEDNEQKQLFVEQHKHYLDEIIEQISEFSKRVILADANLDKVLSAYNKHRDKPIREQAENIIHLFTLTNLGAPAAFKYFDTTIDRKRYTSTKEVLDATLIHQSITGLYETRIDLSQLGGDGGGGGGSSGGSGGTLNIEDEYRLHETSKEPDVPLGSTWLSDFPQAWAETGGMGLAVRQAPLIIPLKATSTPVSIKQYPMSQEARLGIKPHIQRLLDQGILVPCQSPWNTPLLPVKKPGTNDYRPVQDLREVNKRVEDIHPTVPNPYNLLSGLPPSHQWYTVLDLKDAFFCLRLHPTSQPLFAFEWRDPEMGISGQLTWTRLPQGFKNSPTLFNEALHRDLADFRIQHPDLILLQYVDDLLLAATSEQDCQRGTRALLQTLGNLGYRASAKKAQICQKQVKYLGYLLKEGQRWLTEARKETVMGQPTPKTPRQLREFLGKAGFCRLFIPGFAEMAAPLYPLTKPGTLFNWGPDQQKAYQEIKQALLTAPALGLPDLTKPFELFVDEKQGYAKGVLTQKLGPWRRPVAYLSKKLDPVAAGWPPCLRMVAAIAVLTKDAGKLTMGQPLVILAPHAVEALVKQPPDRWLSNARMTHYQAMLLDTDRVQFGPVVALNPATLLPLPEKEAPHDCLEILAETHGTRPDLTDQPIPDADYTWYTDGSSFLQEGQRRAGAAVTTETEVIWARALPAGTSAQRAELIALTQALKMAEGKKLNVYTDSRYAFATAHVHGEIYRRRGWLTSEGREIKNKNEILALLKALFLPKRLSIIHCPGHQKGNSAEARGNRMADQAAREAAMKAVLETSTLLAGKRTADGSEFEKRTADGSEFESPKKKAKVE

SEQ ID NO: 1088 - protein, 2096 aa, synthetic construct
MPAAKRVKLDGGDKKYSIGLDIGTNSVGWAVITDEYKVPSKKFKVLGNTDRHSIKKNLIGALLFDSGETAEATRLKRTARRRYTRRKNRICYLQEIFSNEMAKVDDSFFHRLEESFLVEEDKKHERHPIFGNIVDEVAYHEKYPTIYHLRKKLVDSTDKADLRLIYLALAHMIKFRGHFLIEGDLNPDNSDVDKLFIQLVQTYNQLFEENPINASGVDAKAILSARLSKSRRLENLIAQLPGEKKNGLFGNLIALSLGLTPNFKSNFDLAEDAKLQLSKDTYDDDLDNLLAQIGDQYADLFLAAKNLSDAILLSDILRVNTEITKAPLSASMIKRYDEHHQDLTLLKALVRQQLPEKYKEIFFDQSKNGYAGYIDGGASQEEFYKFIKPILEKMDGTEELLVKLNREDLLRKQRTFDNGSIPHQIHLGELHAILRRQEDFYPFLKDNREKIEKILTFRIPYYVGPLARGNSRFAWMTRKSEETITPWNFEEVVDKGASAQSFIERMTNFDKNLPNEKVLPKHSLLYEYFTVYNELTKVKYVTEGMRKPAFLSGEQKKAIVDLLFKTNRKVTVKQLKEDYFKKIECFDSVEISGVEDRFNASLGTYHDLLKIIKDKDFLDNEENEDILEDIVLTLTLFEDREMIEERLKTYAHLFDDKVMKQLKRRRYTGWGRLSRKLINGIRDKQSGKTILDFLKSDGFANRNFMQLIHDDSLTFKEDIQKAQVSGQGDSLHEHIANLAGSPAIKKGILQTVKVVDELVKVMGRHKPENIVIEMARENQTTQKGQKNSRERMKRIEEGIKELGSQILKEHPVENTQLQNEKLYLYYLQNGRDMYVDQELDINRLSDYDVDHIVPQSFLKDDSIDNKVLTRSDKARGKSDNVPSEEVVKKMKNYWRQLLNAKLITQRKFDNLTKAERGGLSELDKAGFIKRQLVETRQITKHVAQILDSRMNTKYDENDKLIREVKVITLKSKLVSDFRKDFQFYKVREINNYHHAHDAYLNAVVGTALIKKYPKLESEFVYGDYKVYDVRKMIAKSEQEIGKATAKYFFYSNIMNFFKTEITLANGEIRKRPLIETNGETGEIVWDKGRDFATVRKVLSMPQVNIVKKTEVQTGGFSKESILPKRNSDKLIARKKDWDPKKYGGFDSPTVAYSVLVVAKVEKGKSKKLKSVKELLGITIMERSSFEKNPIDFLEAKGYKEVKKDLIIKLPKYSLFELENGRKRMLASAGELQKGNELALPSKYVNFLYLASHYEKLKGSPEDNEQKQLFVEQHKHYLDEIIEQISEFSKRVILADANLDKVLSAYNKHRDKPIREQAENIIHLFTLTNLGAPAAFKYFDTTIDRKRYTSTKEVLDATLIHQSITGLYETRIDLSQLGGDGGGGGEAAAKGSSGGTLNIEDEYRLHETSKEPDVPLGSTWLSDFPQAWAETGGMGLAVRQAPLIIPLKATSTPVSIKQYPMSQEARLGIKPHIQRLLDQGILVPCQSPWNTPLLPVKKPGTNDYRPVQDLREVNKRVEDIHPTVPNPYNLLSGLPPSHQWYTVLDLKDAFFCLRLHPTSQPLFAFEWRDPEMGISGQLTWTRLPQGFKNSPTLFNEALHRDLADFRIQHPDLILLQYVDDLLLAATSEQDCQRGTRALLQTLGNLGYRASAKKAQICQKQVKYLGYLLKEGQRWLTEARKETVMGQPTPKTPRQLREFLGKAGFCRLFIPGFAEMAAPLYPLTKPGTLFNWGPDQQKAYQEIKQALLTAPALGLPDLTKPFELFVDEKQGYAKGVLTQKLGPWRRPVAYLSKKLDPVAAGWPPCLRMVAAIAVLTKDAGKLTMGQPLVILAPHAVEALVKQPPDRWLSNARMTHYQAMLLDTDRVQFGPVVALNPATLLPLPEKEAPHDCLEILAETHGTRPDLTDQPIPDADYTWYTDGSSFLQEGQRRAGAAVTTETEVIWARALPAGTSAQRAELIALTQALKMAEGKKLNVYTDSRYAFATAHVHGEIYRRRGWLTSEGREIKNKNEILALLKALFLPKRLSIIHCPGHQKGNSAEARGNRMADQAAREAAMKAVLETSTLLAGKRTADGSEFEKRTADGSEFESPKKKAKVE

SEQ ID NO: 1089 - protein, 2094 aa, synthetic construct
MPAAKRVKLDGGDKKYSIGLDIGTNSVGWAVITDEYKVPSKKFKVLGNTDRHSIKKNLIGALLFDSGETAEATRLKRTARRRYTRRKNRICYLQEIFSNEMAKVDDSFFHRLEESFLVEEDKKHERHPIFGNIVDEVAYHEKYPTIYHLRKKLVDSTDKADLRLIYLALAHMIKFRGHFLIEGDLNPDNSDVDKLFIQLVQTYNQLFEENPINASGVDAKAILSARLSKSRRLENLIAQLPGEKKNGLFGNLIALSLGLTPNFKSNFDLAEDAKLQLSKDTYDDDLDNLLAQIGDQYADLFLAAKNLSDAILLSDILRVNTEITKAPLSASMIKRYDEHHQDLTLLKALVRQQLPEKYKEIFFDQSKNGYAGYIDGGASQEEFYKFIKPILEKMDGTEELLVKLNREDLLRKQRTFDNGSIPHQIHLGELHAILRRQEDFYPFLKDNREKIEKILTFRIPYYVGPLARGNSRFAWMTRKSEETITPWNFEEVVDKGASAQSFIERMTNFDKNLPNEKVLPKHSLLYEYFTVYNELTKVKYVTEGMRKPAFLSGEQKKAIVDLLFKTNRKVTVKQLKEDYFKKIECFDSVEISGVEDRFNASLGTYHDLLKIIKDKDFLDNEENEDILEDIVLTLTLFEDREMIEERLKTYAHLFDDKVMKQLKRRRYTGWGRLSRKLINGIRDKQSGKTILDFLKSDGFANRNFMQLIHDDSLTFKEDIQKAQVSGQGDSLHEHIANLAGSPAIKKGILQTVKVVDELVKVMGRHKPENIVIEMARENQTTQKGQKNSRERMKRIEEGIKELGSQILKEHPVENTQLQNEKLYLYYLQNGRDMYVDQELDINRLSDYDVDHIVPQSFLKDDSIDNKVLTRSDKARGKSDNVPSEEVVKKMKNYWRQLLNAKLITQRKFDNLTKAERGGLSELDKAGFIKRQLVETRQITKHVAQILDSRMNTKYDENDKLIREVKVITLKSKLVSDFRKDFQFYKVREINNYHHAHDAYLNAVVGTALIKKYPKLESEFVYGDYKVYDVRKMIAKSEQEIGKATAKYFFYSNIMNFFKTEITLANGEIRKRPLIETNGETGEIVWDKGRDFATVRKVLSMPQVNIVKKTEVQTGGFSKESILPKRNSDKLIARKKDWDPKKYGGFDSPTVAYSVLVVAKVEKGKSKKLKSVKELLGITIMERSSFEKNPIDFLEAKGYKEVKKDLIIKLPKYSLFELENGRKRMLASAGELQKGNELALPSKYVNFLYLASHYEKLKGSPEDNEQKQLFVEQHKHYLDEIIEQISEFSKRVILADANLDKVLSAYNKHRDKPIREQAENIIHLFTLTNLGAPAAFKYFDTTIDRKRYTSTKEVLDATLIHQSITGLYETRIDLSQLGGDGGGSSGSSGSSGGTLNIEDEYRLHETSKEPDVPLGSTWLSDFPQAWAETGGMGLAVRQAPLIIPLKATSTPVSIKQYPMSQEARLGIKPHIQRLLDQGILVPCQSPWNTPLLPVKKPGTNDYRPVQDLREVNKRVEDIHPTVPNPYNLLSGLPPSHQWYTVLDLKDAFFCLRLHPTSQPLFAFEWRDPEMGISGQLTWTRLPQGFKNSPTLFNEALHRDLADFRIQHPDLILLQYVDDLLLAATSEQDCQRGTRALLQTLGNLGYRASAKKAQICQKQVKYLGYLLKEGQRWLTEARKETVMGQPTPKTPRQLREFLGKAGFCRLFIPGFAEMAAPLYPLTKPGTLFNWGPDQQKAYQEIKQALLTAPALGLPDLTKPFELFVDEKQGYAKGVLTQKLGPWRRPVAYLSKKLDPVAAGWPPCLRMVAAIAVLTKDAGKLTMGQPLVILAPHAVEALVKQPPDRWLSNARMTHYQAMLLDTDRVQFGPVVALNPATLLPLPEKEAPHDCLEILAETHGTRPDLTDQPIPDADYTWYTDGSSFLQEGQRRAGAAVTTETEVIWARALPAGTSAQRAELIALTQALKMAEGKKLNVYTDSRYAFATAHVHGEIYRRRGWLTSEGREIKNKNEILALLKALFLPKRLSIIHCPGHQKGNSAEARGNRMADQAAREAAMKAVLETSTLLAGKRTADGSEFEKRTADGSEFESPKKKAKVE

SEQ ID NO: 1090 - protein, 2096 aa, synthetic construct
MPAAKRVKLDGGDKKYSIGLDIGTNSVGWAVITDEYKVPSKKFKVLGNTDRHSIKKNLIGALLFDSGETAEATRLKRTARRRYTRRKNRICYLQEIFSNEMAKVDDSFFHRLEESFLVEEDKKHERHPIFGNIVDEVAYHEKYPTIYHLRKKLVDSTDKADLRLIYLALAHMIKFRGHFLIEGDLNPDNSDVDKLFIQLVQTYNQLFEENPINASGVDAKAILSARLSKSRRLENLIAQLPGEKKNGLFGNLIALSLGLTPNFKSNFDLAEDAKLQLSKDTYDDDLDNLLAQIGDQYADLFLAAKNLSDAILLSDILRVNTEITKAPLSASMIKRYDEHHQDLTLLKALVRQQLPEKYKEIFFDQSKNGYAGYIDGGASQEEFYKFIKPILEKMDGTEELLVKLNREDLLRKQRTFDNGSIPHQIHLGELHAILRRQEDFYPFLKDNREKIEKILTFRIPYYVGPLARGNSRFAWMTRKSEETITPWNFEEVVDKGASAQSFIERMTNFDKNLPNEKVLPKHSLLYEYFTVYNELTKVKYVTEGMRKPAFLSGEQKKAIVDLLFKTNRKVTVKQLKEDYFKKIECFDSVEISGVEDRFNASLGTYHDLLKIIKDKDFLDNEENEDILEDIVLTLTLFEDREMIEERLKTYAHLFDDKVMKQLKRRRYTGWGRLSRKLINGIRDKQSGKTILDFLKSDGFANRNFMQLIHDDSLTFKEDIQKAQVSGQGDSLHEHIANLAGSPAIKKGILQTVKVVDELVKVMGRHKPENIVIEMARENQTTQKGQKNSRERMKRIEEGIKELGSQILKEHPVENTQLQNEKLYLYYLQNGRDMYVDQELDINRLSDYDVDHIVPQSFLKDDSIDNKVLTRSDKARGKSDNVPSEEVVKKMKNYWRQLLNAKLITQRKFDNLTKAERGGLSELDKAGFIKRQLVETRQITKHVAQILDSRMNTKYDENDKLIREVKVITLKSKLVSDFRKDFQFYKVREINNYHHAHDAYLNAVVGTALIKKYPKLESEFVYGDYKVYDVRKMIAKSEQEIGKATAKYFFYSNIMNFFKTEITLANGEIRKRPLIETNGETGEIVWDKGRDFATVRKVLSMPQVNIVKKTEVQTGGFSKESILPKRNSDKLIARKKDWDPKKYGGFDSPTVAYSVLVVAKVEKGKSKKLKSVKELLGITIMERSSFEKNPIDFLEAKGYKEVKKDLIIKLPKYSLFELENGRKRMLASAGELQKGNELALPSKYVNFLYLASHYEKLKGSPEDNEQKQLFVEQHKHYLDEIIEQISEFSKRVILADANLDKVLSAYNKHRDKPIREQAENIIHLFTLTNLGAPAAFKYFDTTIDRKRYTSTKEVLDATLIHQSITGLYETRIDLSQLGGDGGGGSPAPEAAAKGGTLNIEDEYRLHETSKEPDVPLGSTWLSDFPQAWAETGGMGLAVRQAPLIIPLKATSTPVSIKQYPMSQEARLGIKPHIQRLLDQGILVPCQSPWNTPLLPVKKPGTNDYRPVQDLREVNKRVEDIHPTVPNPYNLLSGLPPSHQWYTVLDLKDAFFCLRLHPTSQPLFAFEWRDPEMGISGQLTWTRLPQGFKNSPTLFNEALHRDLADFRIQHPDLILLQYVDDLLLAATSEQDCQRGTRALLQTLGNLGYRASAKKAQICQKQVKYLGYLLKEGQRWLTEARKETVMGQPTPKTPRQLREFLGKAGFCRLFIPGFAEMAAPLYPLTKPGTLFNWGPDQQKAYQEIKQALLTAPALGLPDLTKPFELFVDEKQGYAKGVLTQKLGPWRRPVAYLSKKLDPVAAGWPPCLRMVAAIAVLTKDAGKLTMGQPLVILAPHAVEALVKQPPDRWLSNARMTHYQAMLLDTDRVQFGPVVALNPATLLPLPEKEAPHDCLEILAETHGTRPDLTDQPIPDADYTWYTDGSSFLQEGQRRAGAAVTTETEVIWARALPAGTSAQRAELIALTQALKMAEGKKLNVYTDSRYAFATAHVHGEIYRRRGWLTSEGREIKNKNEILALLKALFLPKRLSIIHCPGHQKGNSAEARGNRMADQAAREAAMKAVLETSTLLAGKRTADGSEFEKRTADGSEFESPKKKAKVE

SEQ ID NO: 1091 - protein, 2096 aa, synthetic construct
MPAAKRVKLDGGDKKYSIGLDIGTNSVGWAVITDEYKVPSKKFKVLGNTDRHSIKKNLIGALLFDSGETAEATRLKRTARRRYTRRKNRICYLQEIFSNEMAKVDDSFFHRLEESFLVEEDKKHERHPIFGNIVDEVAYHEKYPTIYHLRKKLVDSTDKADLRLIYLALAHMIKFRGHFLIEGDLNPDNSDVDKLFIQLVQTYNQLFEENPINASGVDAKAILSARLSKSRRLENLIAQLPGEKKNGLFGNLIALSLGLTPNFKSNFDLAEDAKLQLSKDTYDDDLDNLLAQIGDQYADLFLAAKNLSDAILLSDILRVNTEITKAPLSASMIKRYDEHHQDLTLLKALVRQQLPEKYKEIFFDQSKNGYAGYIDGGASQEEFYKFIKPILEKMDGTEELLVKLNREDLLRKQRTFDNGSIPHQIHLGELHAILRRQEDFYPFLKDNREKIEKILTFRIPYYVGPLARGNSRFAWMTRKSEETITPWNFEEVVDKGASAQSFIERMTNFDKNLPNEKVLPKHSLLYEYFTVYNELTKVKYVTEGMRKPAFLSGEQKKAIVDLLFKTNRKVTVKQLKEDYFKKIECFDSVEISGVEDRFNASLGTYHDLLKIIKDKDFLDNEENEDILEDIVLTLTLFEDREMIEERLKTYAHLFDDKVMKQLKRRRYTGWGRLSRKLINGIRDKQSGKTILDFLKSDGFANRNFMQLIHDDSLTFKEDIQKAQVSGQGDSLHEHIANLAGSPAIKKGILQTVKVVDELVKVMGRHKPENIVIEMARENQTTQKGQKNSRERMKRIEEGIKELGSQILKEHPVENTQLQNEKLYLYYLQNGRDMYVDQELDINRLSDYDVDHIVPQSFLKDDSIDNKVLTRSDKARGKSDNVPSEEVVKKMKNYWRQLLNAKLITQRKFDNLTKAERGGLSELDKAGFIKRQLVETRQITKHVAQILDSRMNTKYDENDKLIREVKVITLKSKLVSDFRKDFQFYKVREINNYHHAHDAYLNAVVGTALIKKYPKLESEFVYGDYKVYDVRKMIAKSEQEIGKATAKYFFYSNIMNFFKTEITLANGEIRKRPLIETNGETGEIVWDKGRDFATVRKVLSMPQVNIVKKTEVQTGGFSKESILPKRNSDKLIARKKDWDPKKYGGFDSPTVAYSVLVVAKVEKGKSKKLKSVKELLGITIMERSSFEKNPIDFLEAKGYKEVKKDLIIKLPKYSLFELENGRKRMLASAGELQKGNELALPSKYVNFLYLASHYEKLKGSPEDNEQKQLFVEQHKHYLDEIIEQISEFSKRVILADANLDKVLSAYNKHRDKPIREQAENIIHLFTLTNLGAPAAFKYFDTTIDRKRYTSTKEVLDATLIHQSITGLYETRIDLSQLGGDGGEAAAKGGGGGSGGTLNIEDEYRLHETSKEPDVPLGSTWLSDFPQAWAETGGMGLAVRQAPLIIPLKATSTPVSIKQYPMSQEARLGIKPHIQRLLDQGILVPCQSPWNTPLLPVKKPGTNDYRPVQDLREVNKRVEDIHPTVPNPYNLLSGLPPSHQWYTVLDLKDAFFCLRLHPTSQPLFAFEWRDPEMGISGQLTWTRLPQGFKNSPTLFNEALHRDLADFRIQHPDLILLQYVDDLLLAATSEQDCQRGTRALLQTLGNLGYRASAKKAQICQKQVKYLGYLLKEGQRWLTEARKETVMGQPTPKTPRQLREFLGKAGFCRLFIPGFAEMAAPLYPLTKPGTLFNWGPDQQKAYQEIKQALLTAPALGLPDLTKPFELFVDEKQGYAKGVLTQKLGPWRRPVAYLSKKLDPVAAGWPPCLRMVAAIAVLTKDAGKLTMGQPLVILAPHAVEALVKQPPDRWLSNARMTHYQAMLLDTDRVQFGPVVALNPATLLPLPEKEAPHDCLEILAETHGTRPDLTDQPIPDADYTWYTDGSSFLQEGQRRAGAAVTTETEVIWARALPAGTSAQRAELIALTQALKMAEGKKLNVYTDSRYAFATAHVHGEIYRRRGWLTSEGREIKNKNEILALLKALFLPKRLSIIHCPGHQKGNSAEARGNRMADQAAREAAMKAVLETSTLLAGKRTADGSEFEKRTADGSEFESPKKKAKVE

SEQ ID NO: 1092 - protein, 2109 aa, synthetic construct
MPAAKRVKLDGGDKKYSIGLDIGTNSVGWAVITDEYKVPSKKFKVLGNTDRHSIKKNLIGALLFDSGETAEATRLKRTARRRYTRRKNRICYLQEIFSNEMAKVDDSFFHRLEESFLVEEDKKHERHPIFGNIVDEVAYHEKYPTIYHLRKKLVDSTDKADLRLIYLALAHMIKFRGHFLIEGDLNPDNSDVDKLFIQLVQTYNQLFEENPINASGVDAKAILSARLSKSRRLENLIAQLPGEKKNGLFGNLIALSLGLTPNFKSNFDLAEDAKLQLSKDTYDDDLDNLLAQIGDQYADLFLAAKNLSDAILLSDILRVNTEITKAPLSASMIKRYDEHHQDLTLLKALVRQQLPEKYKEIFFDQSKNGYAGYIDGGASQEEFYKFIKPILEKMDGTEELLVKLNREDLLRKQRTFDNGSIPHQIHLGELHAILRRQEDFYPFLKDNREKIEKILTFRIPYYVGPLARGNSRFAWMTRKSEETITPWNFEEVVDKGASAQSFIERMTNFDKNLPNEKVLPKHSLLYEYFTVYNELTKVKYVTEGMRKPAFLSGEQKKAIVDLLFKTNRKVTVKQLKEDYFKKIECFDSVEISGVEDRFNASLGTYHDLLKIIKDKDFLDNEENEDILEDIVLTLTLFEDREMIEERLKTYAHLFDDKVMKQLKRRRYTGWGRLSRKLINGIRDKQSGKTILDFLKSDGFANRNFMQLIHDDSLTFKEDIQKAQVSGQGDSLHEHIANLAGSPAIKKGILQTVKVVDELVKVMGRHKPENIVIEMARENQTTQKGQKNSRERMKRIEEGIKELGSQILKEHPVENTQLQNEKLYLYYLQNGRDMYVDQELDINRLSDYDVDHIVPQSFLKDDSIDNKVLTRSDKARGKSDNVPSEEVVKKMKNYWRQLLNAKLITQRKFDNLTKAERGGLSELDKAGFIKRQLVETRQITKHVAQILDSRMNTKYDENDKLIREVKVITLKSKLVSDFRKDFQFYKVREINNYHHAHDAYLNAVVGTALIKKYPKLESEFVYGDYKVYDVRKMIAKSEQEIGKATAKYFFYSNIMNFFKTEITLANGEIRKRPLIETNGETGEIVWDKGRDFATVRKVLSMPQVNIVKKTEVQTGGFSKESILPKRNSDKLIARKKDWDPKKYGGFDSPTVAYSVLVVAKVEKGKSKKLKSVKELLGITIMERSSFEKNPIDFLEAKGYKEVKKDLIIKLPKYSLFELENGRKRMLASAGELQKGNELALPSKYVNFLYLASHYEKLKGSPEDNEQKQLFVEQHKHYLDEIIEQISEFSKRVILADANLDKVLSAYNKHRDKPIREQAENIIHLFTLTNLGAPAAFKYFDTTIDRKRYTSTKEVLDATLIHQSITGLYETRIDLSQLGGDGGSGGSSGGSSGSETPGTSESATPESSGGSSGGSSGGVPWILKKPLELTIKLDLEEQQGTLLNNSILSKKGKEELKQLFEKYSALWQSWENQVGHRRIRPHKIATGTVKPTPQKQYHINPKAKPDIQIVINDLLKQGVLIQKESTMNTPVYPVPKPNGRWRMVLDYRAVNKVTPLIAVQNQHSYGILGSLFKGRYKTTIDLSNGFWAHPIVPEDYWITAFTWQGKQYCWTVLPQGFLNSPGLFNGDVVDLLQGIPNVEVYVDDVYISHDSEKEHLEYLDILFNRLKEAGYIISLKKSNIANSIVDFLGFQITNEGRGLTDTFKEKLENITAPTTLKQLQSILGLLNFARNFIPDFTELIAPLYALIPKSPKNYVPWQIEHSTTLETLITKLNGAEYLQGRKGDKTLIMKVNASYTTGYIRYYNEGEKKPISYVSIVFSKTELKFTELEKLLTTVHKGLLKALDLSMGQNIHVYSPIVSMQNIQKTPQTAKKALASRWLSWLSYLEDPRIRFFYDPQMPALKDLPAVDTGKDNKKHPSNFQHIFYTDGSAITSPTKEGHLNAGMGIVYFINKDGNLQKQQEWSISLGNHTAQFAEIAAFEFALKKCLPLGGNILVVTDSNYVAKAYNEELDVWASNGFVNNRKKPLKHISKWKSVADLKRLRPDVVVTHEPGHQKLDSSPHAYGNNLADQLATQASFKVHAGKRTADGSEFEKRTADGSEFESPKKKAKVE

SEQ ID NO: 1093 - protein, 2122 aa, synthetic construct
MPAAKRVKLDGGDKKYSIGLDIGTNSVGWAVITDEYKVPSKKFKVLGNTDRHSIKKNLIGALLFDSGETAEATRLKRTARRRYTRRKNRICYLQEIFSNEMAKVDDSFFHRLEESFLVEEDKKHERHPIFGNIVDEVAYHEKYPTIYHLRKKLVDSTDKADLRLIYLALAHMIKFRGHFLIEGDLNPDNSDVDKLFIQLVQTYNQLFEENPINASGVDAKAILSARLSKSRRLENLIAQLPGEKKNGLFGNLIALSLGLTPNFKSNFDLAEDAKLQLSKDTYDDDLDNLLAQIGDQYADLFLAAKNLSDAILLSDILRVNTEITKAPLSASMIKRYDEHHQDLTLLKALVRQQLPEKYKEIFFDQSKNGYAGYIDGGASQEEFYKFIKPILEKMDGTEELLVKLNREDLLRKQRTFDNGSIPHQIHLGELHAILRRQEDFYPFLKDNREKIEKILTFRIPYYVGPLARGNSRFAWMTRKSEETITPWNFEEVVDKGASAQSFIERMTNFDKNLPNEKVLPKHSLLYEYFTVYNELTKVKYVTEGMRKPAFLSGEQKKAIVDLLFKTNRKVTVKQLKEDYFKKIECFDSVEISGVEDRFNASLGTYHDLLKIIKDKDFLDNEENEDILEDIVLTLTLFEDREMIEERLKTYAHLFDDKVMKQLKRRRYTGWGRLSRKLINGIRDKQSGKTILDFLKSDGFANRNFMQLIHDDSLTFKEDIQKAQVSGQGDSLHEHIANLAGSPAIKKGILQTVKVVDELVKVMGRHKPENIVIEMARENQTTQKGQKNSRERMKRIEEGIKELGSQILKEHPVENTQLQNEKLYLYYLQNGRDMYVDQELDINRLSDYDVDHIVPQSFLKDDSIDNKVLTRSDKARGKSDNVPSEEVVKKMKNYWRQLLNAKLITQRKFDNLTKAERGGLSELDKAGFIKRQLVETRQITKHVAQILDSRMNTKYDENDKLIREVKVITLKSKLVSDFRKDFQFYKVREINNYHHAHDAYLNAVVGTALIKKYPKLESEFVYGDYKVYDVRKMIAKSEQEIGKATAKYFFYSNIMNFFKTEITLANGEIRKRPLIETNGETGEIVWDKGRDFATVRKVLSMPQVNIVKKTEVQTGGFSKESILPKRNSDKLIARKKDWDPKKYGGFDSPTVAYSVLVVAKVEKGKSKKLKSVKELLGITIMERSSFEKNPIDFLEAKGYKEVKKDLIIKLPKYSLFELENGRKRMLASAGELQKGNELALPSKYVNFLYLASHYEKLKGSPEDNEQKQLFVEQHKHYLDEIIEQISEFSKRVILADANLDKVLSAYNKHRDKPIREQAENIIHLFTLTNLGAPAAFKYFDTTIDRKRYTSTKEVLDATLIHQSITGLYETRIDLSQLGGDGGAEAAAKEAAAKEAAAKEAAAKALEAEAAAKEAAAKEAAAKEAAAKAGGVPWILKKPLELTIKLDLEEQQGTLLNNSILSKKGKEELKQLFEKYSALWQSWENQVGHRRIRPHKIATGTVKPTPQKQYHINPKAKPDIQIVINDLLKQGVLIQKESTMNTPVYPVPKPNGRWRMVLDYRAVNKVTPLIAVQNQHSYGILGSLFKGRYKTTIDLSNGFWAHPIVPEDYWITAFTWQGKQYCWTVLPQGFLNSPGLFNGDVVDLLQGIPNVEVYVDDVYISHDSEKEHLEYLDILFNRLKEAGYIISLKKSNIANSIVDFLGFQITNEGRGLTDTFKEKLENITAPTTLKQLQSILGLLNFARNFIPDFTELIAPLYALIPKSPKNYVPWQIEHSTTLETLITKLNGAEYLQGRKGDKTLIMKVNASYTTGYIRYYNEGEKKPISYVSIVFSKTELKFTELEKLLTTVHKGLLKALDLSMGQNIHVYSPIVSMQNIQKTPQTAKKALASRWLSWLSYLEDPRIRFFYDPQMPALKDLPAVDTGKDNKKHPSNFQHIFYTDGSAITSPTKEGHLNAGMGIVYFINKDGNLQKQQEWSISLGNHTAQFAEIAAFEFALKKCLPLGGNILVVTDSNYVAKAYNEELDVWASNGFVNNRKKPLKHISKWKSVADLKRLRPDVVVTHEPGHQKLDSSPHAYGNNLADQLATQASFKVHAGKRTADGSEFEKRTADGSEFESPKKKAKVE

SEQ ID NO: 1094 - protein, 2106 aa, synthetic construct
MPAAKRVKLDGGDKKYSIGLDIGTNSVGWAVITDEYKVPSKKFKVLGNTDRHSIKKNLIGALLFDSGETAEATRLKRTARRRYTRRKNRICYLQEIFSNEMAKVDDSFFHRLEESFLVEEDKKHERHPIFGNIVDEVAYHEKYPTIYHLRKKLVDSTDKADLRLIYLALAHMIKFRGHFLIEGDLNPDNSDVDKLFIQLVQTYNQLFEENPINASGVDAKAILSARLSKSRRLENLIAQLPGEKKNGLFGNLIALSLGLTPNFKSNFDLAEDAKLQLSKDTYDDDLDNLLAQIGDQYADLFLAAKNLSDAILLSDILRVNTEITKAPLSASMIKRYDEHHQDLTLLKALVRQQLPEKYKEIFFDQSKNGYAGYIDGGASQEEFYKFIKPILEKMDGTEELLVKLNREDLLRKQRTFDNGSIPHQIHLGELHAILRRQEDFYPFLKDNREKIEKILTFRIPYYVGPLARGNSRFAWMTRKSEETITPWNFEEVVDKGASAQSFIERMTNFDKNLPNEKVLPKHSLLYEYFTVYNELTKVKYVTEGMRKPAFLSGEQKKAIVDLLFKTNRKVTVKQLKEDYFKKIECFDSVEISGVEDRFNASLGTYHDLLKIIKDKDFLDNEENEDILEDIVLTLTLFEDREMIEERLKTYAHLFDDKVMKQLKRRRYTGWGRLSRKLINGIRDKQSGKTILDFLKSDGFANRNFMQLIHDDSLTFKEDIQKAQVSGQGDSLHEHIANLAGSPAIKKGILQTVKVVDELVKVMGRHKPENIVIEMARENQTTQKGQKNSRERMKRIEEGIKELGSQILKEHPVENTQLQNEKLYLYYLQNGRDMYVDQELDINRLSDYDVDHIVPQSFLKDDSIDNKVLTRSDKARGKSDNVPSEEVVKKMKNYWRQLLNAKLITQRKFDNLTKAERGGLSELDKAGFIKRQLVETRQITKHVAQILDSRMNTKYDENDKLIREVKVITLKSKLVSDFRKDFQFYKVREINNYHHAHDAYLNAVVGTALIKKYPKLESEFVYGDYKVYDVRKMIAKSEQEIGKATAKYFFYSNIMNFFKTEITLANGEIRKRPLIETNGETGEIVWDKGRDFATVRKVLSMPQVNIVKKTEVQTGGFSKESILPKRNSDKLIARKKDWDPKKYGGFDSPTVAYSVLVVAKVEKGKSKKLKSVKELLGITIMERSSFEKNPIDFLEAKGYKEVKKDLIIKLPKYSLFELENGRKRMLASAGELQKGNELALPSKYVNFLYLASHYEKLKGSPEDNEQKQLFVEQHKHYLDEIIEQISEFSKRVILADANLDKVLSAYNKHRDKPIREQAENIIHLFTLTNLGAPAAFKYFDTTIDRKRYTSTKEVLDATLIHQSITGLYETRIDLSQLGGDGGEAAAKEAAAKEAAAKEAAAKEAAAKEAAAKGGVPWILKKPLELTIKLDLEEQQGTLLNNSILSKKGKEELKQLFEKYSALWQSWENQVGHRRIRPHKIATGTVKPTPQKQYHINPKAKPDIQIVINDLLKQGVLIQKESTMNTPVYPVPKPNGRWRMVLDYRAVNKVTPLIAVQNQHSYGILGSLFKGRYKTTIDLSNGFWAHPIVPEDYWITAFTWQGKQYCWTVLPQGFLNSPGLFNGDVVDLLQGIPNVEVYVDDVYISHDSEKEHLEYLDILFNRLKEAGYIISLKKSNIANSIVDFLGFQITNEGRGLTDTFKEKLENITAPTTLKQLQSILGLLNFARNFIPDFTELIAPLYALIPKSPKNYVPWQIEHSTTLETLITKLNGAEYLQGRKGDKTLIMKVNASYTTGYIRYYNEGEKKPISYVSIVFSKTELKFTELEKLLTTVHKGLLKALDLSMGQNIHVYSPIVSMQNIQKTPQTAKKALASRWLSWLSYLEDPRIRFFYDPQMPALKDLPAVDTGKDNKKHPSNFQHIFYTDGSAITSPTKEGHLNAGMGIVYFINKDGNLQKQQEWSISLGNHTAQFAEIAAFEFALKKCLPLGGNILVVTDSNYVAKAYNEELDVWASNGFVNNRKKPLKHISKWKSVADLKRLRPDVVVTHEPGHQKLDSSPHAYGNNLADQLATQASFKVHAGKRTADGSEFEKRTADGSEFESPKKKAKVE

SEQ ID NO: 1095 - protein, 2094 aa, synthetic construct
MPAAKRVKLDGGDKKYSIGLDIGTNSVGWAVITDEYKVPSKKFKVLGNTDRHSIKKNLIGALLFDSGETAEATRLKRTARRRYTRRKNRICYLQEIFSNEMAKVDDSFFHRLEESFLVEEDKKHERHPIFGNIVDEVAYHEKYPTIYHLRKKLVDSTDKADLRLIYLALAHMIKFRGHFLIEGDLNPDNSDVDKLFIQLVQTYNQLFEENPINASGVDAKAILSARLSKSRRLENLIAQLPGEKKNGLFGNLIALSLGLTPNFKSNFDLAEDAKLQLSKDTYDDDLDNLLAQIGDQYADLFLAAKNLSDAILLSDILRVNTEITKAPLSASMIKRYDEHHQDLTLLKALVRQQLPEKYKEIFFDQSKNGYAGYIDGGASQEEFYKFIKPILEKMDGTEELLVKLNREDLLRKQRTFDNGSIPHQIHLGELHAILRRQEDFYPFLKDNREKIEKILTFRIPYYVGPLARGNSRFAWMTRKSEETITPWNFEEVVDKGASAQSFIERMTNFDKNLPNEKVLPKHSLLYEYFTVYNELTKVKYVTEGMRKPAFLSGEQKKAIVDLLFKTNRKVTVKQLKEDYFKKIECFDSVEISGVEDRFNASLGTYHDLLKIIKDKDFLDNEENEDILEDIVLTLTLFEDREMIEERLKTYAHLFDDKVMKQLKRRRYTGWGRLSRKLINGIRDKQSGKTILDFLKSDGFANRNFMQLIHDDSLTFKEDIQKAQVSGQGDSLHEHIANLAGSPAIKKGILQTVKVVDELVKVMGRHKPENIVIEMARENQTTQKGQKNSRERMKRIEEGIKELGSQILKEHPVENTQLQNEKLYLYYLQNGRDMYVDQELDINRLSDYDVDHIVPQSFLKDDSIDNKVLTRSDKARGKSDNVPSEEVVKKMKNYWRQLLNAKLITQRKFDNLTKAERGGLSELDKAGFIKRQLVETRQITKHVAQILDSRMNTKYDENDKLIREVKVITLKSKLVSDFRKDFQFYKVREINNYHHAHDAYLNAVVGTALIKKYPKLESEFVYGDYKVYDVRKMIAKSEQEIGKATAKYFFYSNIMNFFKTEITLANGEIRKRPLIETNGETGEIVWDKGRDFATVRKVLSMPQVNIVKKTEVQTGGFSKESILPKRNSDKLIARKKDWDPKKYGGFDSPTVAYSVLVVAKVEKGKSKKLKSVKELLGITIMERSSFEKNPIDFLEAKGYKEVKKDLIIKLPKYSLFELENGRKRMLASAGELQKGNELALPSKYVNFLYLASHYEKLKGSPEDNEQKQLFVEQHKHYLDEIIEQISEFSKRVILADANLDKVLSAYNKHRDKPIREQAENIIHLFTLTNLGAPAAFKYFDTTIDRKRYTSTKEVLDATLIHQSITGLYETRIDLSQLGGDGGGSSGSSGSSGSSGSSGSSGGVPWILKKPLELTIKLDLEEQQGTLLNNSILSKKGKEELKQLFEKYSALWQSWENQVGHRRIRPHKIATGTVKPTPQKQYHINPKAKPDIQIVINDLLKQGVLIQKESTMNTPVYPVPKPNGRWRMVLDYRAVNKVTPLIAVQNQHSYGILGSLFKGRYKTTIDLSNGFWAHPIVPEDYWITAFTWQGKQYCWTVLPQGFLNSPGLFNGDVVDLLQGIPNVEVYVDDVYISHDSEKEHLEYLDILFNRLKEAGYIISLKKSNIANSIVDFLGFQITNEGRGLTDTFKEKLENITAPTTLKQLQSILGLLNFARNFIPDFTELIAPLYALIPKSPKNYVPWQIEHSTTLETLITKLNGAEYLQGRKGDKTLIMKVNASYTTGYIRYYNEGEKKPISYVSIVFSKTELKFTELEKLLTTVHKGLLKALDLSMGQNIHVYSPIVSMQNIQKTPQTAKKALASRWLSWLSYLEDPRIRFFYDPQMPALKDLPAVDTGKDNKKHPSNFQHIFYTDGSAITSPTKEGHLNAGMGIVYFINKDGNLQKQQEWSISLGNHTAQFAEIAAFEFALKKCLPLGGNILVVTDSNYVAKAYNEELDVWASNGFVNNRKKPLKHISKWKSVADLKRLRPDVVVTHEPGHQKLDSSPHAYGNNLADQLATQASFKVHAGKRTADGSEFEKRTADGSEFESPKKKAKVE

SEQ ID NO: 1096 - protein, 2087 aa, synthetic construct
MPAAKRVKLDGGDKKYSIGLDIGTNSVGWAVITDEYKVPSKKFKVLGNTDRHSIKKNLIGALLFDSGETAEATRLKRTARRRYTRRKNRICYLQEIFSNEMAKVDDSFFHRLEESFLVEEDKKHERHPIFGNIVDEVAYHEKYPTIYHLRKKLVDSTDKADLRLIYLALAHMIKFRGHFLIEGDLNPDNSDVDKLFIQLVQTYNQLFEENPINASGVDAKAILSARLSKSRRLENLIAQLPGEKKNGLFGNLIALSLGLTPNFKSNFDLAEDAKLQLSKDTYDDDLDNLLAQIGDQYADLFLAAKNLSDAILLSDILRVNTEITKAPLSASMIKRYDEHHQDLTLLKALVRQQLPEKYKEIFFDQSKNGYAGYIDGGASQEEFYKFIKPILEKMDGTEELLVKLNREDLLRKQRTFDNGSIPHQIHLGELHAILRRQEDFYPFLKDNREKIEKILTFRIPYYVGPLARGNSRFAWMTRKSEETITPWNFEEVVDKGASAQSFIERMTNFDKNLPNEKVLPKHSLLYEYFTVYNELTKVKYVTEGMRKPAFLSGEQKKAIVDLLFKTNRKVTVKQLKEDYFKKIECFDSVEISGVEDRFNASLGTYHDLLKIIKDKDFLDNEENEDILEDIVLTLTLFEDREMIEERLKTYAHLFDDKVMKQLKRRRYTGWGRLSRKLINGIRDKQSGKTILDFLKSDGFANRNFMQLIHDDSLTFKEDIQKAQVSGQGDSLHEHIANLAGSPAIKKGILQTVKVVDELVKVMGRHKPENIVIEMARENQTTQKGQKNSRERMKRIEEGIKELGSQILKEHPVENTQLQNEKLYLYYLQNGRDMYVDQELDINRLSDYDVDHIVPQSFLKDDSIDNKVLTRSDKARGKSDNVPSEEVVKKMKNYWRQLLNAKLITQRKFDNLTKAERGGLSELDKAGFIKRQLVETRQITKHVAQILDSRMNTKYDENDKLIREVKVITLKSKLVSDFRKDFQFYKVREINNYHHAHDAYLNAVVGTALIKKYPKLESEFVYGDYKVYDVRKMIAKSEQEIGKATAKYFFYSNIMNFFKTEITLANGEIRKRPLIETNGETGEIVWDKGRDFATVRKVLSMPQVNIVKKTEVQTGGFSKESILPKRNSDKLIARKKDWDPKKYGGFDSPTVAYSVLVVAKVEKGKSKKLKSVKELLGITIMERSSFEKNPIDFLEAKGYKEVKKDLIIKLPKYSLFELENGRKRMLASAGELQKGNELALPSKYVNFLYLASHYEKLKGSPEDNEQKQLFVEQHKHYLDEIIEQISEFSKRVILADANLDKVLSAYNKHRDKPIREQAENIIHLFTLTNLGAPAAFKYFDTTIDRKRYTSTKEVLDATLIHQSITGLYETRIDLSQLGGDGGPAPGGGEAAAKGGVPWILKKPLELTIKLDLEEQQGTLLNNSILSKKGKEELKQLFEKYSALWQSWENQVGHRRIRPHKIATGTVKPTPQKQYHINPKAKPDIQIVINDLLKQGVLIQKESTMNTPVYPVPKPNGRWRMVLDYRAVNKVTPLIAVQNQHSYGILGSLFKGRYKTTIDLSNGFWAHPIVPEDYWITAFTWQGKQYCWTVLPQGFLNSPGLFNGDVVDLLQGIPNVEVYVDDVYISHDSEKEHLEYLDILFNRLKEAGYIISLKKSNIANSIVDFLGFQITNEGRGLTDTFKEKLENITAPTTLKQLQSILGLLNFARNFIPDFTELIAPLYALIPKSPKNYVPWQIEHSTTLETLITKLNGAEYLQGRKGDKTLIMKVNASYTTGYIRYYNEGEKKPISYVSIVFSKTELKFTELEKLLTTVHKGLLKALDLSMGQNIHVYSPIVSMQNIQKTPQTAKKALASRWLSWLSYLEDPRIRFFYDPQMPALKDLPAVDTGKDNKKHPSNFQHIFYTDGSAITSPTKEGHLNAGMGIVYFINKDGNLQKQQEWSISLGNHTAQFAEIAAFEFALKKCLPLGGNILVVTDSNYVAKAYNEELDVWASNGFVNNRKKPLKHISKWKSVADLKRLRPDVVVTHEPGHQKLDSSPHAYGNNLADQLATQASFKVHAGKRTADGSEFEKRTADGSEFESPKKKAKVE

SEQ ID NO: 1097 - protein, 2087 aa, synthetic construct
MPAAKRVKLDGGDKKYSIGLDIGTNSVGWAVITDEYKVPSKKFKVLGNTDRHSIKKNLIGALLFDSGETAEATRLKRTARRRYTRRKNRICYLQEIFSNEMAKVDDSFFHRLEESFLVEEDKKHERHPIFGNIVDEVAYHEKYPTIYHLRKKLVDSTDKADLRLIYLALAHMIKFRGHFLIEGDLNPDNSDVDKLFIQLVQTYNQLFEENPINASGVDAKAILSARLSKSRRLENLIAQLPGEKKNGLFGNLIALSLGLTPNFKSNFDLAEDAKLQLSKDTYDDDLDNLLAQIGDQYADLFLAAKNLSDAILLSDILRVNTEITKAPLSASMIKRYDEHHQDLTLLKALVRQQLPEKYKEIFFDQSKNGYAGYIDGGASQEEFYKFIKPILEKMDGTEELLVKLNREDLLRKQRTFDNGSIPHQIHLGELHAILRRQEDFYPFLKDNREKIEKILTFRIPYYVGPLARGNSRFAWMTRKSEETITPWNFEEVVDKGASAQSFIERMTNFDKNLPNEKVLPKHSLLYEYFTVYNELTKVKYVTEGMRKPAFLSGEQKKAIVDLLFKTNRKVTVKQLKEDYFKKIECFDSVEISGVEDRFNASLGTYHDLLKIIKDKDFLDNEENEDILEDIVLTLTLFEDREMIEERLKTYAHLFDDKVMKQLKRRRYTGWGRLSRKLINGIRDKQSGKTILDFLKSDGFANRNFMQLIHDDSLTFKEDIQKAQVSGQGDSLHEHIANLAGSPAIKKGILQTVKVVDELVKVMGRHKPENIVIEMARENQTTQKGQKNSRERMKRIEEGIKELGSQILKEHPVENTQLQNEKLYLYYLQNGRDMYVDQELDINRLSDYDVDHIVPQSFLKDDSIDNKVLTRSDKARGKSDNVPSEEVVKKMKNYWRQLLNAKLITQRKFDNLTKAERGGLSELDKAGFIKRQLVETRQITKHVAQILDSRMNTKYDENDKLIREVKVITLKSKLVSDFRKDFQFYKVREINNYHHAHDAYLNAVVGTALIKKYPKLESEFVYGDYKVYDVRKMIAKSEQEIGKATAKYFFYSNIMNFFKTEITLANGEIRKRPLIETNGETGEIVWDKGRDFATVRKVLSMPQVNIVKKTEVQTGGFSKESILPKRNSDKLIARKKDWDPKKYGGFDSPTVAYSVLVVAKVEKGKSKKLKSVKELLGITIMERSSFEKNPIDFLEAKGYKEVKKDLIIKLPKYSLFELENGRKRMLASAGELQKGNELALPSKYVNFLYLASHYEKLKGSPEDNEQKQLFVEQHKHYLDEIIEQISEFSKRVILADANLDKVLSAYNKHRDKPIREQAENIIHLFTLTNLGAPAAFKYFDTTIDRKRYTSTKEVLDATLIHQSITGLYETRIDLSQLGGDGGGGSEAAAKPAPGGVPWILKKPLELTIKLDLEEQQGTLLNNSILSKKGKEELKQLFEKYSALWQSWENQVGHRRIRPHKIATGTVKPTPQKQYHINPKAKPDIQIVINDLLKQGVLIQKESTMNTPVYPVPKPNGRWRMVLDYRAVNKVTPLIAVQNQHSYGILGSLFKGRYKTTIDLSNGFWAHPIVPEDYWITAFTWQGKQYCWTVLPQGFLNSPGLFNGDVVDLLQGIPNVEVYVDDVYISHDSEKEHLEYLDILFNRLKEAGYIISLKKSNIANSIVDFLGFQITNEGRGLTDTFKEKLENITAPTTLKQLQSILGLLNFARNFIPDFTELIAPLYALIPKSPKNYVPWQIEHSTTLETLITKLNGAEYLQGRKGDKTLIMKVNASYTTGYIRYYNEGEKKPISYVSIVFSKTELKFTELEKLLTTVHKGLLKALDLSMGQNIHVYSPIVSMQNIQKTPQTAKKALASRWLSWLSYLEDPRIRFFYDPQMPALKDLPAVDTGKDNKKHPSNFQHIFYTDGSAITSPTKEGHLNAGMGIVYFINKDGNLQKQQEWSISLGNHTAQFAEIAAFEFALKKCLPLGGNILVVTDSNYVAKAYNEELDVWASNGFVNNRKKPLKHISKWKSVADLKRLRPDVVVTHEPGHQKLDSSPHAYGNNLADQLATQASFKVHAGKRTADGSEFEKRTADGSEFESPKKKAKVE

SEQ ID NO: 1098 - protein, 2085 aa, synthetic construct
MPAAKRVKLDGGDKKYSIGLDIGTNSVGWAVITDEYKVPSKKFKVLGNTDRHSIKKNLIGALLFDSGETAEATRLKRTARRRYTRRKNRICYLQEIFSNEMAKVDDSFFHRLEESFLVEEDKKHERHPIFGNIVDEVAYHEKYPTIYHLRKKLVDSTDKADLRLIYLALAHMIKFRGHFLIEGDLNPDNSDVDKLFIQLVQTYNQLFEENPINASGVDAKAILSARLSKSRRLENLIAQLPGEKKNGLFGNLIALSLGLTPNFKSNFDLAEDAKLQLSKDTYDDDLDNLLAQIGDQYADLFLAAKNLSDAILLSDILRVNTEITKAPLSASMIKRYDEHHQDLTLLKALVRQQLPEKYKEIFFDQSKNGYAGYIDGGASQEEFYKFIKPILEKMDGTEELLVKLNREDLLRKQRTFDNGSIPHQIHLGELHAILRRQEDFYPFLKDNREKIEKILTFRIPYYVGPLARGNSRFAWMTRKSEETITPWNFEEVVDKGASAQSFIERMTNFDKNLPNEKVLPKHSLLYEYFTVYNELTKVKYVTEGMRKPAFLSGEQKKAIVDLLFKTNRKVTVKQLKEDYFKKIECFDSVEISGVEDRFNASLGTYHDLLKIIKDKDFLDNEENEDILEDIVLTLTLFEDREMIEERLKTYAHLFDDKVMKQLKRRRYTGWGRLSRKLINGIRDKQSGKTILDFLKSDGFANRNFMQLIHDDSLTFKEDIQKAQVSGQGDSLHEHIANLAGSPAIKKGILQTVKVVDELVKVMGRHKPENIVIEMARENQTTQKGQKNSRERMKRIEEGIKELGSQILKEHPVENTQLQNEKLYLYYLQNGRDMYVDQELDINRLSDYDVDHIVPQSFLKDDSIDNKVLTRSDKARGKSDNVPSEEVVKKMKNYWRQLLNAKLITQRKFDNLTKAERGGLSELDKAGFIKRQLVETRQITKHVAQILDSRMNTKYDENDKLIREVKVITLKSKLVSDFRKDFQFYKVREINNYHHAHDAYLNAVVGTALIKKYPKLESEFVYGDYKVYDVRKMIAKSEQEIGKATAKYFFYSNIMNFFKTEITLANGEIRKRPLIETNGETGEIVWDKGRDFATVRKVLSMPQVNIVKKTEVQTGGFSKESILPKRNSDKLIARKKDWDPKKYGGFDSPTVAYSVLVVAKVEKGKSKKLKSVKELLGITIMERSSFEKNPIDFLEAKGYKEVKKDLIIKLPKYSLFELENGRKRMLASAGELQKGNELALPSKYVNFLYLASHYEKLKGSPEDNEQKQLFVEQHKHYLDEIIEQISEFSKRVILADANLDKVLSAYNKHRDKPIREQAENIIHLFTLTNLGAPAAFKYFDTTIDRKRYTSTKEVLDATLIHQSITGLYETRIDLSQLGGDGGPAPGGSGGGGGVPWILKKPLELTIKLDLEEQQGTLLNNSILSKKGKEELKQLFEKYSALWQSWENQVGHRRIRPHKIATGTVKPTPQKQYHINPKAKPDIQIVINDLLKQGVLIQKESTMNTPVYPVPKPNGRWRMVLDYRAVNKVTPLIAVQNQHSYGILGSLFKGRYKTTIDLSNGFWAHPIVPEDYWITAFTWQGKQYCWTVLPQGFLNSPGLFNGDVVDLLQGIPNVEVYVDDVYISHDSEKEHLEYLDILFNRLKEAGYIISLKKSNIANSIVDFLGFQITNEGRGLTDTFKEKLENITAPTTLKQLQSILGLLNFARNFIPDFTELIAPLYALIPKSPKNYVPWQIEHSTTLETLITKLNGAEYLQGRKGDKTLIMKVNASYTTGYIRYYNEGEKKPISYVSIVFSKTELKFTELEKLLTTVHKGLLKALDLSMGQNIHVYSPIVSMQNIQKTPQTAKKALASRWLSWLSYLEDPRIRFFYDPQMPALKDLPAVDTGKDNKKHPSNFQHIFYTDGSAITSPTKEGHLNAGMGIVYFINKDGNLQKQQEWSISLGNHTAQFAEIAAFEFALKKCLPLGGNILVVTDSNYVAKAYNEELDVWASNGFVNNRKKPLKHISKWKSVADLKRLRPDVVVTHEPGHQKLDSSPHAYGNNLADQLATQASFKVHAGKRTADGSEFEKRTADGSEFESPKKKAKVE

SEQ ID NO: 1099 - protein, 2087 aa, synthetic construct
MPAAKRVKLDGGDKKYSIGLDIGTNSVGWAVITDEYKVPSKKFKVLGNTDRHSIKKNLIGALLFDSGETAEATRLKRTARRRYTRRKNRICYLQEIFSNEMAKVDDSFFHRLEESFLVEEDKKHERHPIFGNIVDEVAYHEKYPTIYHLRKKLVDSTDKADLRLIYLALAHMIKFRGHFLIEGDLNPDNSDVDKLFIQLVQTYNQLFEENPINASGVDAKAILSARLSKSRRLENLIAQLPGEKKNGLFGNLIALSLGLTPNFKSNFDLAEDAKLQLSKDTYDDDLDNLLAQIGDQYADLFLAAKNLSDAILLSDILRVNTEITKAPLSASMIKRYDEHHQDLTLLKALVRQQLPEKYKEIFFDQSKNGYAGYIDGGASQEEFYKFIKPILEKMDGTEELLVKLNREDLLRKQRTFDNGSIPHQIHLGELHAILRRQEDFYPFLKDNREKIEKILTFRIPYYVGPLARGNSRFAWMTRKSEETITPWNFEEVVDKGASAQSFIERMTNFDKNLPNEKVLPKHSLLYEYFTVYNELTKVKYVTEGMRKPAFLSGEQKKAIVDLLFKTNRKVTVKQLKEDYFKKIECFDSVEISGVEDRFNASLGTYHDLLKIIKDKDFLDNEENEDILEDIVLTLTLFEDREMIEERLKTYAHLFDDKVMKQLKRRRYTGWGRLSRKLINGIRDKQSGKTILDFLKSDGFANRNFMQLIHDDSLTFKEDIQKAQVSGQGDSLHEHIANLAGSPAIKKGILQTVKVVDELVKVMGRHKPENIVIEMARENQTTQKGQKNSRERMKRIEEGIKELGSQILKEHPVENTQLQNEKLYLYYLQNGRDMYVDQELDINRLSDYDVDHIVPQSFLKDDSIDNKVLTRSDKARGKSDNVPSEEVVKKMKNYWRQLLNAKLITQRKFDNLTKAERGGLSELDKAGFIKRQLVETRQITKHVAQILDSRMNTKYDENDKLIREVKVITLKSKLVSDFRKDFQFYKVREINNYHHAHDAYLNAVVGTALIKKYPKLESEFVYGDYKVYDVRKMIAKSEQEIGKATAKYFFYSNIMNFFKTEITLANGEIRKRPLIETNGETGEIVWDKGRDFATVRKVLSMPQVNIVKKTEVQTGGFSKESILPKRNSDKLIARKKDWDPKKYGGFDSPTVAYSVLVVAKVEKGKSKKLKSVKELLGITIMERSSFEKNPIDFLEAKGYKEVKKDLIIKLPKYSLFELENGRKRMLASAGELQKGNELALPSKYVNFLYLASHYEKLKGSPEDNEQKQLFVEQHKHYLDEIIEQISEFSKRVILADANLDKVLSAYNKHRDKPIREQAENIIHLFTLTNLGAPAAFKYFDTTIDRKRYTSTKEVLDATLIHQSITGLYETRIDLSQLGGDGGGGSPAPEAAAKGGVPWILKKPLELTIKLDLEEQQGTLLNNSILSKKGKEELKQLFEKYSALWQSWENQVGHRRIRPHKIATGTVKPTPQKQYHINPKAKPDIQIVINDLLKQGVLIQKESTMNTPVYPVPKPNGRWRMVLDYRAVNKVTPLIAVQNQHSYGILGSLFKGRYKTTIDLSNGFWAHPIVPEDYWITAFTWQGKQYCWTVLPQGFLNSPGLFNGDVVDLLQGIPNVEVYVDDVYISHDSEKEHLEYLDILFNRLKEAGYIISLKKSNIANSIVDFLGFQITNEGRGLTDTFKEKLENITAPTTLKQLQSILGLLNFARNFIPDFTELIAPLYALIPKSPKNYVPWQIEHSTTLETLITKLNGAEYLQGRKGDKTLIMKVNASYTTGYIRYYNEGEKKPISYVSIVFSKTELKFTELEKLLTTVHKGLLKALDLSMGQNIHVYSPIVSMQNIQKTPQTAKKALASRWLSWLSYLEDPRIRFFYDPQMPALKDLPAVDTGKDNKKHPSNFQHIFYTDGSAITSPTKEGHLNAGMGIVYFINKDGNLQKQQEWSISLGNHTAQFAEIAAFEFALKKCLPLGGNILVVTDSNYVAKAYNEELDVWASNGFVNNRKKPLKHISKWKSVADLKRLRPDVVVTHEPGHQKLDSSPHAYGNNLADQLATQASFKVHAGKRTADGSEFEKRTADGSEFESPKKKAKVE

SEQ ID NO: 1100 - protein, 2087 aa, synthetic construct
MPAAKRVKLDGGDKKYSIGLDIGTNSVGWAVITDEYKVPSKKFKVLGNTDRHSIKKNLIGALLFDSGETAEATRLKRTARRRYTRRKNRICYLQEIFSNEMAKVDDSFFHRLEESFLVEEDKKHERHPIFGNIVDEVAYHEKYPTIYHLRKKLVDSTDKADLRLIYLALAHMIKFRGHFLIEGDLNPDNSDVDKLFIQLVQTYNQLFEENPINASGVDAKAILSARLSKSRRLENLIAQLPGEKKNGLFGNLIALSLGLTPNFKSNFDLAEDAKLQLSKDTYDDDLDNLLAQIGDQYADLFLAAKNLSDAILLSDILRVNTEITKAPLSASMIKRYDEHHQDLTLLKALVRQQLPEKYKEIFFDQSKNGYAGYIDGGASQEEFYKFIKPILEKMDGTEELLVKLNREDLLRKQRTFDNGSIPHQIHLGELHAILRRQEDFYPFLKDNREKIEKILTFRIPYYVGPLARGNSRFAWMTRKSEETITPWNFEEVVDKGASAQSFIERMTNFDKNLPNEKVLPKHSLLYEYFTVYNELTKVKYVTEGMRKPAFLSGEQKKAIVDLLFKTNRKVTVKQLKEDYFKKIECFDSVEISGVEDRFNASLGTYHDLLKIIKDKDFLDNEENEDILEDIVLTLTLFEDREMIEERLKTYAHLFDDKVMKQLKRRRYTGWGRLSRKLINGIRDKQSGKTILDFLKSDGFANRNFMQLIHDDSLTFKEDIQKAQVSGQGDSLHEHIANLAGSPAIKKGILQTVKVVDELVKVMGRHKPENIVIEMARENQTTQKGQKNSRERMKRIEEGIKELGSQILKEHPVENTQLQNEKLYLYYLQNGRDMYVDQELDINRLSDYDVDHIVPQSFLKDDSIDNKVLTRSDKARGKSDNVPSEEVVKKMKNYWRQLLNAKLITQRKFDNLTKAERGGLSELDKAGFIKRQLVETRQITKHVAQILDSRMNTKYDENDKLIREVKVITLKSKLVSDFRKDFQFYKVREINNYHHAHDAYLNAVVGTALIKKYPKLESEFVYGDYKVYDVRKMIAKSEQEIGKATAKYFFYSNIMNFFKTEITLANGEIRKRPLIETNGETGEIVWDKGRDFATVRKVLSMPQVNIVKKTEVQTGGFSKESILPKRNSDKLIARKKDWDPKKYGGFDSPTVAYSVLVVAKVEKGKSKKLKSVKELLGITIMERSSFEKNPIDFLEAKGYKEVKKDLIIKLPKYSLFELENGRKRMLASAGELQKGNELALPSKYVNFLYLASHYEKLKGSPEDNEQKQLFVEQHKHYLDEIIEQISEFSKRVILADANLDKVLSAYNKHRDKPIREQAENIIHLFTLTNLGAPAAFKYFDTTIDRKRYTSTKEVLDATLIHQSITGLYETRIDLSQLGGDGGGSSEAAAKGGGGGVPWILKKPLELTIKLDLEEQQGTLLNNSILSKKGKEELKQLFEKYSALWQSWENQVGHRRIRPHKIATGTVKPTPQKQYHINPKAKPDIQIVINDLLKQGVLIQKESTMNTPVYPVPKPNGRWRMVLDYRAVNKVTPLIAVQNQHSYGILGSLFKGRYKTTIDLSNGFWAHPIVPEDYWITAFTWQGKQYCWTVLPQGFLNSPGLFNGDVVDLLQGIPNVEVYVDDVYISHDSEKEHLEYLDILFNRLKEAGYIISLKKSNIANSIVDFLGFQITNEGRGLTDTFKEKLENITAPTTLKQLQSILGLLNFARNFIPDFTELIAPLYALIPKSPKNYVPWQIEHSTTLETLITKLNGAEYLQGRKGDKTLIMKVNASYTTGYIRYYNEGEKKPISYVSIVFSKTELKFTELEKLLTTVHKGLLKALDLSMGQNIHVYSPIVSMQNIQKTPQTAKKALASRWLSWLSYLEDPRIRFFYDPQMPALKDLPAVDTGKDNKKHPSNFQHIFYTDGSAITSPTKEGHLNAGMGIVYFINKDGNLQKQQEWSISLGNHTAQFAEIAAFEFALKKCLPLGGNILVVTDSNYVAKAYNEELDVWASNGFVNNRKKPLKHISKWKSVADLKRLRPDVVVTHEPGHQKLDSSPHAYGNNLADQLATQASFKVHAGKRTADGSEFEKRTADGSEFESPKKKAKVE

SEQ ID NO: 1101 - protein, 2091 aa, synthetic construct
MPAAKRVKLDGGDKKYSIGLDIGTNSVGWAVITDEYKVPSKKFKVLGNTDRHSIKKNLIGALLFDSGETAEATRLKRTARRRYTRRKNRICYLQEIFSNEMAKVDDSFFHRLEESFLVEEDKKHERHPIFGNIVDEVAYHEKYPTIYHLRKKLVDSTDKADLRLIYLALAHMIKFRGHFLIEGDLNPDNSDVDKLFIQLVQTYNQLFEENPINASGVDAKAILSARLSKSRRLENLIAQLPGEKKNGLFGNLIALSLGLTPNFKSNFDLAEDAKLQLSKDTYDDDLDNLLAQIGDQYADLFLAAKNLSDAILLSDILRVNTEITKAPLSASMIKRYDEHHQDLTLLKALVRQQLPEKYKEIFFDQSKNGYAGYIDGGASQEEFYKFIKPILEKMDGTEELLVKLNREDLLRKQRTFDNGSIPHQIHLGELHAILRRQEDFYPFLKDNREKIEKILTFRIPYYVGPLARGNSRFAWMTRKSEETITPWNFEEVVDKGASAQSFIERMTNFDKNLPNEKVLPKHSLLYEYFTVYNELTKVKYVTEGMRKPAFLSGEQKKAIVDLLFKTNRKVTVKQLKEDYFKKIECFDSVEISGVEDRFNASLGTYHDLLKIIKDKDFLDNEENEDILEDIVLTLTLFEDREMIEERLKTYAHLFDDKVMKQLKRRRYTGWGRLSRKLINGIRDKQSGKTILDFLKSDGFANRNFMQLIHDDSLTFKEDIQKAQVSGQGDSLHEHIANLAGSPAIKKGILQTVKVVDELVKVMGRHKPENIVIEMARENQTTQKGQKNSRERMKRIEEGIKELGSQILKEHPVENTQLQNEKLYLYYLQNGRDMYVDQELDINRLSDYDVDHIVPQSFLKDDSIDNKVLTRSDKARGKSDNVPSEEVVKKMKNYWRQLLNAKLITQRKFDNLTKAERGGLSELDKAGFIKRQLVETRQITKHVAQILDSRMNTKYDENDKLIREVKVITLKSKLVSDFRKDFQFYKVREINNYHHAHDAYLNAVVGTALIKKYPKLESEFVYGDYKVYDVRKMIAKSEQEIGKATAKYFFYSNIMNFFKTEITLANGEIRKRPLIETNGETGEIVWDKGRDFATVRKVLSMPQVNIVKKTEVQTGGFSKESILPKRNSDKLIARKKDWDPKKYGGFDSPTVAYSVLVVAKVEKGKSKKLKSVKELLGITIMERSSFEKNPIDFLEAKGYKEVKKDLIIKLPKYSLFELENGRKRMLASAGELQKGNELALPSKYVNFLYLASHYEKLKGSPEDNEQKQLFVEQHKHYLDEIIEQISEFSKRVILADANLDKVLSAYNKHRDKPIREQAENIIHLFTLTNLGAPAAFKYFDTTIDRKRYTSTKEVLDATLIHQSITGLYETRIDLSQLGGDGGGSSGSSGSSGSSGSSGGVPWILKKPLELTIKLDLEEQQGTLLNNSILSKKGKEELKQLFEKYSALWQSWENQVGHRRIRPHKIATGTVKPTPQKQYHINPKAKPDIQIVINDLLKQGVLIQKESTMNTPVYPVPKPNGRWRMVLDYRAVNKVTPLIAVQNQHSYGILGSLFKGRYKTTIDLSNGFWAHPIVPEDYWITAFTWQGKQYCWTVLPQGFLNSPGLFNGDVVDLLQGIPNVEVYVDDVYISHDSEKEHLEYLDILFNRLKEAGYIISLKKSNIANSIVDFLGFQITNEGRGLTDTFKEKLENITAPTTLKQLQSILGLLNFARNFIPDFTELIAPLYALIPKSPKNYVPWQIEHSTTLETLITKLNGAEYLQGRKGDKTLIMKVNASYTTGYIRYYNEGEKKPISYVSIVFSKTELKFTELEKLLTTVHKGLLKALDLSMGQNIHVYSPIVSMQNIQKTPQTAKKALASRWLSWLSYLEDPRIRFFYDPQMPALKDLPAVDTGKDNKKHPSNFQHIFYTDGSAITSPTKEGHLNAGMGIVYFINKDGNLQKQQEWSISLGNHTAQFAEIAAFEFALKKCLPLGGNILVVTDSNYVAKAYNEELDVWASNGFVNNRKKPLKHISKWKSVADLKRLRPDVVVTHEPGHQKLDSSPHAYGNNLADQLATQASFKVHAGKRTADGSEFEKRTADGSEFESPKKKAKVE

SEQ ID NO: 1102 - protein, 2081 aa, synthetic construct
MPAAKRVKLDGGDKKYSIGLDIGTNSVGWAVITDEYKVPSKKFKVLGNTDRHSIKKNLIGALLFDSGETAEATRLKRTARRRYTRRKNRICYLQEIFSNEMAKVDDSFFHRLEESFLVEEDKKHERHPIFGNIVDEVAYHEKYPTIYHLRKKLVDSTDKADLRLIYLALAHMIKFRGHFLIEGDLNPDNSDVDKLFIQLVQTYNQLFEENPINASGVDAKAILSARLSKSRRLENLIAQLPGEKKNGLFGNLIALSLGLTPNFKSNFDLAEDAKLQLSKDTYDDDLDNLLAQIGDQYADLFLAAKNLSDAILLSDILRVNTEITKAPLSASMIKRYDEHHQDLTLLKALVRQQLPEKYKEIFFDQSKNGYAGYIDGGASQEEFYKFIKPILEKMDGTEELLVKLNREDLLRKQRTFDNGSIPHQIHLGELHAILRRQEDFYPFLKDNREKIEKILTFRIPYYVGPLARGNSRFAWMTRKSEETITPWNFEEVVDKGASAQSFIERMTNFDKNLPNEKVLPKHSLLYEYFTVYNELTKVKYVTEGMRKPAFLSGEQKKAIVDLLFKTNRKVTVKQLKEDYFKKIECFDSVEISGVEDRFNASLGTYHDLLKIIKDKDFLDNEENEDILEDIVLTLTLFEDREMIEERLKTYAHLFDDKVMKQLKRRRYTGWGRLSRKLINGIRDKQSGKTILDFLKSDGFANRNFMQLIHDDSLTFKEDIQKAQVSGQGDSLHEHIANLAGSPAIKKGILQTVKVVDELVKVMGRHKPENIVIEMARENQTTQKGQKNSRERMKRIEEGIKELGSQILKEHPVENTQLQNEKLYLYYLQNGRDMYVDQELDINRLSDYDVDHIVPQSFLKDDSIDNKVLTRSDKARGKSDNVPSEEVVKKMKNYWRQLLNAKLITQRKFDNLTKAERGGLSELDKAGFIKRQLVETRQITKHVAQILDSRMNTKYDENDKLIREVKVITLKSKLVSDFRKDFQFYKVREINNYHHAHDAYLNAVVGTALIKKYPKLESEFVYGDYKVYDVRKMIAKSEQEIGKATAKYFFYSNIMNFFKTEITLANGEIRKRPLIETNGETGEIVWDKGRDFATVRKVLSMPQVNIVKKTEVQTGGFSKESILPKRNSDKLIARKKDWDPKKYGGFDSPTVAYSVLVVAKVEKGKSKKLKSVKELLGITIMERSSFEKNPIDFLEAKGYKEVKKDLIIKLPKYSLFELENGRKRMLASAGELQKGNELALPSKYVNFLYLASHYEKLKGSPEDNEQKQLFVEQHKHYLDEIIEQISEFSKRVILADANLDKVLSAYNKHRDKPIREQAENIIHLFTLTNLGAPAAFKYFDTTIDRKRYTSTKEVLDATLIHQSITGLYETRIDLSQLGGDGGPAPAPGGVPWILKKPLELTIKLDLEEQQGTLLNNSILSKKGKEELKQLFEKYSALWQSWENQVGHRRIRPHKIATGTVKPTPQKQYHINPKAKPDIQIVINDLLKQGVLIQKESTMNTPVYPVPKPNGRWRMVLDYRAVNKVTPLIAVQNQHSYGILGSLFKGRYKTTIDLSNGFWAHPIVPEDYWITAFTWQGKQYCWTVLPQGFLNSPGLFNGDVVDLLQGIPNVEVYVDDVYISHDSEKEHLEYLDILFNRLKEAGYIISLKKSNIANSIVDFLGFQITNEGRGLTDTFKEKLENITAPTTLKQLQSILGLLNFARNFIPDFTELIAPLYALIPKSPKNYVPWQIEHSTTLETLITKLNGAEYLQGRKGDKTLIMKVNASYTTGYIRYYNEGEKKPISYVSIVFSKTELKFTELEKLLTTVHKGLLKALDLSMGQNIHVYSPIVSMQNIQKTPQTAKKALASRWLSWLSYLEDPRIRFFYDPQMPALKDLPAVDTGKDNKKHPSNFQHIFYTDGSAITSPTKEGHLNAGMGIVYFINKDGNLQKQQEWSISLGNHTAQFAEIAAFEFALKKCLPLGGNILVVTDSNYVAKAYNEELDVWASNGFVNNRKKPLKHISKWKSVADLKRLRPDVVVTHEPGHQKLDSSPHAYGNNLADQLATQASFKVHAGKRTADGSEFEKRTADGSEFESPKKKAKVE

SEQ ID NO: 1103 - protein, 2085 aa, synthetic construct
MPAAKRVKLDGGDKKYSIGLDIGTNSVGWAVITDEYKVPSKKFKVLGNTDRHSIKKNLIGALLFDSGETAEATRLKRTARRRYTRRKNRICYLQEIFSNEMAKVDDSFFHRLEESFLVEEDKKHERHPIFGNIVDEVAYHEKYPTIYHLRKKLVDSTDKADLRLIYLALAHMIKFRGHFLIEGDLNPDNSDVDKLFIQLVQTYNQLFEENPINASGVDAKAILSARLSKSRRLENLIAQLPGEKKNGLFGNLIALSLGLTPNFKSNFDLAEDAKLQLSKDTYDDDLDNLLAQIGDQYADLFLAAKNLSDAILLSDILRVNTEITKAPLSASMIKRYDEHHQDLTLLKALVRQQLPEKYKEIFFDQSKNGYAGYIDGGASQEEFYKFIKPILEKMDGTEELLVKLNREDLLRKQRTFDNGSIPHQIHLGELHAILRRQEDFYPFLKDNREKIEKILTFRIPYYVGPLARGNSRFAWMTRKSEETITPWNFEEVVDKGASAQSFIERMTNFDKNLPNEKVLPKHSLLYEYFTVYNELTKVKYVTEGMRKPAFLSGEQKKAIVDLLFKTNRKVTVKQLKEDYFKKIECFDSVEISGVEDRFNASLGTYHDLLKIIKDKDFLDNEENEDILEDIVLTLTLFEDREMIEERLKTYAHLFDDKVMKQLKRRRYTGWGRLSRKLINGIRDKQSGKTILDFLKSDGFANRNFMQLIHDDSLTFKEDIQKAQVSGQGDSLHEHIANLAGSPAIKKGILQTVKVVDELVKVMGRHKPENIVIEMARENQTTQKGQKNSRERMKRIEEGIKELGSQILKEHPVENTQLQNEKLYLYYLQNGRDMYVDQELDINRLSDYDVDHIVPQSFLKDDSIDNKVLTRSDKARGKSDNVPSEEVVKKMKNYWRQLLNAKLITQRKFDNLTKAERGGLSELDKAGFIKRQLVETRQITKHVAQILDSRMNTKYDENDKLIREVKVITLKSKLVSDFRKDFQFYKVREINNYHHAHDAYLNAVVGTALIKKYPKLESEFVYGDYKVYDVRKMIAKSEQEIGKATAKYFFYSNIMNFFKTEITLANGEIRKRPLIETNGETGEIVWDKGRDFATVRKVLSMPQVNIVKKTEVQTGGFSKESILPKRNSDKLIARKKDWDPKKYGGFDSPTVAYSVLVVAKVEKGKSKKLKSVKELLGITIMERSSFEKNPIDFLEAKGYKEVKKDLIIKLPKYSLFELENGRKRMLASAGELQKGNELALPSKYVNFLYLASHYEKLKGSPEDNEQKQLFVEQHKHYLDEIIEQISEFSKRVILADANLDKVLSAYNKHRDKPIREQAENIIHLFTLTNLGAPAAFKYFDTTIDRKRYTSTKEVLDATLIHQSITGLYETRIDLSQLGGDGGGSSGSSGSSGGVPWILKKPLELTIKLDLEEQQGTLLNNSILSKKGKEELKQLFEKYSALWQSWENQVGHRRIRPHKIATGTVKPTPQKQYHINPKAKPDIQIVINDLLKQGVLIQKESTMNTPVYPVPKPNGRWRMVLDYRAVNKVTPLIAVQNQHSYGILGSLFKGRYKTTIDLSNGFWAHPIVPEDYWITAFTWQGKQYCWTVLPQGFLNSPGLFNGDVVDLLQGIPNVEVYVDDVYISHDSEKEHLEYLDILFNRLKEAGYIISLKKSNIANSIVDFLGFQITNEGRGLTDTFKEKLENITAPTTLKQLQSILGLLNFARNFIPDFTELIAPLYALIPKSPKNYVPWQIEHSTTLETLITKLNGAEYLQGRKGDKTLIMKVNASYTTGYIRYYNEGEKKPISYVSIVFSKTELKFTELEKLLTTVHKGLLKALDLSMGQNIHVYSPIVSMQNIQKTPQTAKKALASRWLSWLSYLEDPRIRFFYDPQMPALKDLPAVDTGKDNKKHPSNFQHIFYTDGSAITSPTKEGHLNAGMGIVYFINKDGNLQKQQEWSISLGNHTAQFAEIAAFEFALKKCLPLGGNILVVTDSNYVAKAYNEELDVWASNGFVNNRKKPLKHISKWKSVADLKRLRPDVVVTHEPGHQKLDSSPHAYGNNLADQLATQASFKVHAGKRTADGSEFEKRTADGSEFESPKKKAKVE

SEQ ID NO: 1104 - protein, 2087 aa, synthetic construct
MPAAKRVKLDGGDKKYSIGLDIGTNSVGWAVITDEYKVPSKKFKVLGNTDRHSIKKNLIGALLFDSGETAEATRLKRTARRRYTRRKNRICYLQEIFSNEMAKVDDSFFHRLEESFLVEEDKKHERHPIFGNIVDEVAYHEKYPTIYHLRKKLVDSTDKADLRLIYLALAHMIKFRGHFLIEGDLNPDNSDVDKLFIQLVQTYNQLFEENPINASGVDAKAILSARLSKSRRLENLIAQLPGEKKNGLFGNLIALSLGLTPNFKSNFDLAEDAKLQLSKDTYDDDLDNLLAQIGDQYADLFLAAKNLSDAILLSDILRVNTEITKAPLSASMIKRYDEHHQDLTLLKALVRQQLPEKYKEIFFDQSKNGYAGYIDGGASQEEFYKFIKPILEKMDGTEELLVKLNREDLLRKQRTFDNGSIPHQIHLGELHAILRRQEDFYPFLKDNREKIEKILTFRIPYYVGPLARGNSRFAWMTRKSEETITPWNFEEVVDKGASAQSFIERMTNFDKNLPNEKVLPKHSLLYEYFTVYNELTKVKYVTEGMRKPAFLSGEQKKAIVDLLFKTNRKVTVKQLKEDYFKKIECFDSVEISGVEDRFNASLGTYHDLLKIIKDKDFLDNEENEDILEDIVLTLTLFEDREMIEERLKTYAHLFDDKVMKQLKRRRYTGWGRLSRKLINGIRDKQSGKTILDFLKSDGFANRNFMQLIHDDSLTFKEDIQKAQVSGQGDSLHEHIANLAGSPAIKKGILQTVKVVDELVKVMGRHKPENIVIEMARENQTTQKGQKNSRERMKRIEEGIKELGSQILKEHPVENTQLQNEKLYLYYLQNGRDMYVDQELDINRLSDYDVDHIVPQSFLKDDSIDNKVLTRSDKARGKSDNVPSEEVVKKMKNYWRQLLNAKLITQRKFDNLTKAERGGLSELDKAGFIKRQLVETRQITKHVAQILDSRMNTKYDENDKLIREVKVITLKSKLVSDFRKDFQFYKVREINNYHHAHDAYLNAVVGTALIKKYPKLESEFVYGDYKVYDVRKMIAKSEQEIGKATAKYFFYSNIMNFFKTEITLANGEIRKRPLIETNGETGEIVWDKGRDFATVRKVLSMPQVNIVKKTEVQTGGFSKESILPKRNSDKLIARKKDWDPKKYGGFDSPTVAYSVLVVAKVEKGKSKKLKSVKELLGITIMERSSFEKNPIDFLEAKGYKEVKKDLIIKLPKYSLFELENGRKRMLASAGELQKGNELALPSKYVNFLYLASHYEKLKGSPEDNEQKQLFVEQHKHYLDEIIEQISEFSKRVILADANLDKVLSAYNKHRDKPIREQAENIIHLFTLTNLGAPAAFKYFDTTIDRKRYTSTKEVLDATLIHQSITGLYETRIDLSQLGGDGGPAPGSSEAAAKGGVPWILKKPLELTIKLDLEEQQGTLLNNSILSKKGKEELKQLFEKYSALWQSWENQVGHRRIRPHKIATGTVKPTPQKQYHINPKAKPDIQIVINDLLKQGVLIQKESTMNTPVYPVPKPNGRWRMVLDYRAVNKVTPLIAVQNQHSYGILGSLFKGRYKTTIDLSNGFWAHPIVPEDYWITAFTWQGKQYCWTVLPQGFLNSPGLFNGDVVDLLQGIPNVEVYVDDVYISHDSEKEHLEYLDILFNRLKEAGYIISLKKSNIANSIVDFLGFQITNEGRGLTDTFKEKLENITAPTTLKQLQSILGLLNFARNFIPDFTELIAPLYALIPKSPKNYVPWQIEHSTTLETLITKLNGAEYLQGRKGDKTLIMKVNASYTTGYIRYYNEGEKKPISYVSIVFSKTELKFTELEKLLTTVHKGLLKALDLSMGQNIHVYSPIVSMQNIQKTPQTAKKALASRWLSWLSYLEDPRIRFFYDPQMPALKDLPAVDTGKDNKKHPSNFQHIFYTDGSAITSPTKEGHLNAGMGIVYFINKDGNLQKQQEWSISLGNHTAQFAEIAAFEFALKKCLPLGGNILVVTDSNYVAKAYNEELDVWASNGFVNNRKKPLKHISKWKSVADLKRLRPDVVVTHEPGHQKLDSSPHAYGNNLADQLATQASFKVHAGKRTADGSEFEKRTADGSEFESPKKKAKVE

SEQ ID NO: 1105 - protein, 2087 aa, synthetic construct
MPAAKRVKLDGGDKKYSIGLDIGTNSVGWAVITDEYKVPSKKFKVLGNTDRHSIKKNLIGALLFDSGETAEATRLKRTARRRYTRRKNRICYLQEIFSNEMAKVDDSFFHRLEESFLVEEDKKHERHPIFGNIVDEVAYHEKYPTIYHLRKKLVDSTDKADLRLIYLALAHMIKFRGHFLIEGDLNPDNSDVDKLFIQLVQTYNQLFEENPINASGVDAKAILSARLSKSRRLENLIAQLPGEKKNGLFGNLIALSLGLTPNFKSNFDLAEDAKLQLSKDTYDDDLDNLLAQIGDQYADLFLAAKNLSDAILLSDILRVNTEITKAPLSASMIKRYDEHHQDLTLLKALVRQQLPEKYKEIFFDQSKNGYAGYIDGGASQEEFYKFIKPILEKMDGTEELLVKLNREDLLRKQRTFDNGSIPHQIHLGELHAILRRQEDFYPFLKDNREKIEKILTFRIPYYVGPLARGNSRFAWMTRKSEETITPWNFEEVVDKGASAQSFIERMTNFDKNLPNEKVLPKHSLLYEYFTVYNELTKVKYVTEGMRKPAFLSGEQKKAIVDLLFKTNRKVTVKQLKEDYFKKIECFDSVEISGVEDRFNASLGTYHDLLKIIKDKDFLDNEENEDILEDIVLTLTLFEDREMIEERLKTYAHLFDDKVMKQLKRRRYTGWGRLSRKLINGIRDKQSGKTILDFLKSDGFANRNFMQLIHDDSLTFKEDIQKAQVSGQGDSLHEHIANLAGSPAIKKGILQTVKVVDELVKVMGRHKPENIVIEMARENQTTQKGQKNSRERMKRIEEGIKELGSQILKEHPVENTQLQNEKLYLYYLQNGRDMYVDQELDINRLSDYDVDHIVPQSFLKDDSIDNKVLTRSDKARGKSDNVPSEEVVKKMKNYWRQLLNAKLITQRKFDNLTKAERGGLSELDKAGFIKRQLVETRQITKHVAQILDSRMNTKYDENDKLIREVKVITLKSKLVSDFRKDFQFYKVREINNYHHAHDAYLNAVVGTALIKKYPKLESEFVYGDYKVYDVRKMIAKSEQEIGKATAKYFFYSNIMNFFKTEITLANGEIRKRPLIETNGETGEIVWDKGRDFATVRKVLSMPQVNIVKKTEVQTGGFSKESILPKRNSDKLIARKKDWDPKKYGGFDSPTVAYSVLVVAKVEKGKSKKLKSVKELLGITIMERSSFEKNPIDFLEAKGYKEVKKDLIIKLPKYSLFELENGRKRMLASAGELQKGNELALPSKYVNFLYLASHYEKLKGSPEDNEQKQLFVEQHKHYLDEIIEQISEFSKRVILADANLDKVLSAYNKHRDKPIREQAENIIHLFTLTNLGAPAAFKYFDTTIDRKRYTSTKEVLDATLIHQSITGLYETRIDLSQLGGDGGEAAAKPAPGGGGGVPWILKKPLELTIKLDLEEQQGTLLNNSILSKKGKEELKQLFEKYSALWQSWENQVGHRRIRPHKIATGTVKPTPQKQYHINPKAKPDIQIVINDLLKQGVLIQKESTMNTPVYPVPKPNGRWRMVLDYRAVNKVTPLIAVQNQHSYGILGSLFKGRYKTTIDLSNGFWAHPIVPEDYWITAFTWQGKQYCWTVLPQGFLNSPGLFNGDVVDLLQGIPNVEVYVDDVYISHDSEKEHLEYLDILFNRLKEAGYIISLKKSNIANSIVDFLGFQITNEGRGLTDTFKEKLENITAPTTLKQLQSILGLLNFARNFIPDFTELIAPLYALIPKSPKNYVPWQIEHSTTLETLITKLNGAEYLQGRKGDKTLIMKVNASYTTGYIRYYNEGEKKPISYVSIVFSKTELKFTELEKLLTTVHKGLLKALDLSMGQNIHVYSPIVSMQNIQKTPQTAKKALASRWLSWLSYLEDPRIRFFYDPQMPALKDLPAVDTGKDNKKHPSNFQHIFYTDGSAITSPTKEGHLNAGMGIVYFINKDGNLQKQQEWSISLGNHTAQFAEIAAFEFALKKCLPLGGNILVVTDSNYVAKAYNEELDVWASNGFVNNRKKPLKHISKWKSVADLKRLRPDVVVTHEPGHQKLDSSPHAYGNNLADQLATQASFKVHAGKRTADGSEFEKRTADGSEFESPKKKAKVE

SEQ ID NO: 1106 - protein, 2087 aa, synthetic construct
MPAAKRVKLDGGDKKYSIGLDIGTNSVGWAVITDEYKVPSKKFKVLGNTDRHSIKKNLIGALLFDSGETAEATRLKRTARRRYTRRKNRICYLQEIFSNEMAKVDDSFFHRLEESFLVEEDKKHERHPIFGNIVDEVAYHEKYPTIYHLRKKLVDSTDKADLRLIYLALAHMIKFRGHFLIEGDLNPDNSDVDKLFIQLVQTYNQLFEENPINASGVDAKAILSARLSKSRRLENLIAQLPGEKKNGLFGNLIALSLGLTPNFKSNFDLAEDAKLQLSKDTYDDDLDNLLAQIGDQYADLFLAAKNLSDAILLSDILRVNTEITKAPLSASMIKRYDEHHQDLTLLKALVRQQLPEKYKEIFFDQSKNGYAGYIDGGASQEEFYKFIKPILEKMDGTEELLVKLNREDLLRKQRTFDNGSIPHQIHLGELHAILRRQEDFYPFLKDNREKIEKILTFRIPYYVGPLARGNSRFAWMTRKSEETITPWNFEEVVDKGASAQSFIERMTNFDKNLPNEKVLPKHSLLYEYFTVYNELTKVKYVTEGMRKPAFLSGEQKKAIVDLLFKTNRKVTVKQLKEDYFKKIECFDSVEISGVEDRFNASLGTYHDLLKIIKDKDFLDNEENEDILEDIVLTLTLFEDREMIEERLKTYAHLFDDKVMKQLKRRRYTGWGRLSRKLINGIRDKQSGKTILDFLKSDGFANRNFMQLIHDDSLTFKEDIQKAQVSGQGDSLHEHIANLAGSPAIKKGILQTVKVVDELVKVMGRHKPENIVIEMARENQTTQKGQKNSRERMKRIEEGIKELGSQILKEHPVENTQLQNEKLYLYYLQNGRDMYVDQELDINRLSDYDVDHIVPQSFLKDDSIDNKVLTRSDKARGKSDNVPSEEVVKKMKNYWRQLLNAKLITQRKFDNLTKAERGGLSELDKAGFIKRQLVETRQITKHVAQILDSRMNTKYDENDKLIREVKVITLKSKLVSDFRKDFQFYKVREINNYHHAHDAYLNAVVGTALIKKYPKLESEFVYGDYKVYDVRKMIAKSEQEIGKATAKYFFYSNIMNFFKTEITLANGEIRKRPLIETNGETGEIVWDKGRDFATVRKVLSMPQVNIVKKTEVQTGGFSKESILPKRNSDKLIARKKDWDPKKYGGFDSPTVAYSVLVVAKVEKGKSKKLKSVKELLGITIMERSSFEKNPIDFLEAKGYKEVKKDLIIKLPKYSLFELENGRKRMLASAGELQKGNELALPSKYVNFLYLASHYEKLKGSPEDNEQKQLFVEQHKHYLDEIIEQISEFSKRVILADANLDKVLSAYNKHRDKPIREQAENIIHLFTLTNLGAPAAFKYFDTTIDRKRYTSTKEVLDATLIHQSITGLYETRIDLSQLGGDGGGGSGGGEAAAKGGVPWILKKPLELTIKLDLEEQQGTLLNNSILSKKGKEELKQLFEKYSALWQSWENQVGHRRIRPHKIATGTVKPTPQKQYHINPKAKPDIQIVINDLLKQGVLIQKESTMNTPVYPVPKPNGRWRMVLDYRAVNKVTPLIAVQNQHSYGILGSLFKGRYKTTIDLSNGFWAHPIVPEDYWITAFTWQGKQYCWTVLPQGFLNSPGLFNGDVVDLLQGIPNVEVYVDDVYISHDSEKEHLEYLDILFNRLKEAGYIISLKKSNIANSIVDFLGFQITNEGRGLTDTFKEKLENITAPTTLKQLQSILGLLNFARNFIPDFTELIAPLYALIPKSPKNYVPWQIEHSTTLETLITKLNGAEYLQGRKGDKTLIMKVNASYTTGYIRYYNEGEKKPISYVSIVFSKTELKFTELEKLLTTVHKGLLKALDLSMGQNIHVYSPIVSMQNIQKTPQTAKKALASRWLSWLSYLEDPRIRFFYDPQMPALKDLPAVDTGKDNKKHPSNFQHIFYTDGSAITSPTKEGHLNAGMGIVYFINKDGNLQKQQEWSISLGNHTAQFAEIAAFEFALKKCLPLGGNILVVTDSNYVAKAYNEELDVWASNGFVNNRKKPLKHISKWKSVADLKRLRPDVVVTHEPGHQKLDSSPHAYGNNLADQLATQASFKVHAGKRTADGSEFEKRTADGSEFESPKKKAKVE

SEQ ID NO: 1107 - protein, 2082 aa, synthetic construct
MPAAKRVKLDGGDKKYSIGLDIGTNSVGWAVITDEYKVPSKKFKVLGNTDRHSIKKNLIGALLFDSGETAEATRLKRTARRRYTRRKNRICYLQEIFSNEMAKVDDSFFHRLEESFLVEEDKKHERHPIFGNIVDEVAYHEKYPTIYHLRKKLVDSTDKADLRLIYLALAHMIKFRGHFLIEGDLNPDNSDVDKLFIQLVQTYNQLFEENPINASGVDAKAILSARLSKSRRLENLIAQLPGEKKNGLFGNLIALSLGLTPNFKSNFDLAEDAKLQLSKDTYDDDLDNLLAQIGDQYADLFLAAKNLSDAILLSDILRVNTEITKAPLSASMIKRYDEHHQDLTLLKALVRQQLPEKYKEIFFDQSKNGYAGYIDGGASQEEFYKFIKPILEKMDGTEELLVKLNREDLLRKQRTFDNGSIPHQIHLGELHAILRRQEDFYPFLKDNREKIEKILTFRIPYYVGPLARGNSRFAWMTRKSEETITPWNFEEVVDKGASAQSFIERMTNFDKNLPNEKVLPKHSLLYEYFTVYNELTKVKYVTEGMRKPAFLSGEQKKAIVDLLFKTNRKVTVKQLKEDYFKKIECFDSVEISGVEDRFNASLGTYHDLLKIIKDKDFLDNEENEDILEDIVLTLTLFEDREMIEERLKTYAHLFDDKVMKQLKRRRYTGWGRLSRKLINGIRDKQSGKTILDFLKSDGFANRNFMQLIHDDSLTFKEDIQKAQVSGQGDSLHEHIANLAGSPAIKKGILQTVKVVDELVKVMGRHKPENIVIEMARENQTTQKGQKNSRERMKRIEEGIKELGSQILKEHPVENTQLQNEKLYLYYLQNGRDMYVDQELDINRLSDYDVDHIVPQSFLKDDSIDNKVLTRSDKARGKSDNVPSEEVVKKMKNYWRQLLNAKLITQRKFDNLTKAERGGLSELDKAGFIKRQLVETRQITKHVAQILDSRMNTKYDENDKLIREVKVITLKSKLVSDFRKDFQFYKVREINNYHHAHDAYLNAVVGTALIKKYPKLESEFVYGDYKVYDVRKMIAKSEQEIGKATAKYFFYSNIMNFFKTEITLANGEIRKRPLIETNGETGEIVWDKGRDFATVRKVLSMPQVNIVKKTEVQTGGFSKESILPKRNSDKLIARKKDWDPKKYGGFDSPTVAYSVLVVAKVEKGKSKKLKSVKELLGITIMERSSFEKNPIDFLEAKGYKEVKKDLIIKLPKYSLFELENGRKRMLASAGELQKGNELALPSKYVNFLYLASHYEKLKGSPEDNEQKQLFVEQHKHYLDEIIEQISEFSKRVILADANLDKVLSAYNKHRDKPIREQAENIIHLFTLTNLGAPAAFKYFDTTIDRKRYTSTKEVLDATLIHQSITGLYETRIDLSQLGGDGGPAPGGSGGVPWILKKPLELTIKLDLEEQQGTLLNNSILSKKGKEELKQLFEKYSALWQSWENQVGHRRIRPHKIATGTVKPTPQKQYHINPKAKPDIQIVINDLLKQGVLIQKESTMNTPVYPVPKPNGRWRMVLDYRAVNKVTPLIAVQNQHSYGILGSLFKGRYKTTIDLSNGFWAHPIVPEDYWITAFTWQGKQYCWTVLPQGFLNSPGLFNGDVVDLLQGIPNVEVYVDDVYISHDSEKEHLEYLDILFNRLKEAGYIISLKKSNIANSIVDFLGFQITNEGRGLTDTFKEKLENITAPTTLKQLQSILGLLNFARNFIPDFTELIAPLYALIPKSPKNYVPWQIEHSTTLETLITKLNGAEYLQGRKGDKTLIMKVNASYTTGYIRYYNEGEKKPISYVSIVFSKTELKFTELEKLLTTVHKGLLKALDLSMGQNIHVYSPIVSMQNIQKTPQTAKKALASRWLSWLSYLEDPRIRFFYDPQMPALKDLPAVDTGKDNKKHPSNFQHIFYTDGSAITSPTKEGHLNAGMGIVYFINKDGNLQKQQEWSISLGNHTAQFAEIAAFEFALKKCLPLGGNILVVTDSNYVAKAYNEELDVWASNGFVNNRKKPLKHISKWKSVADLKRLRPDVVVTHEPGHQKLDSSPHAYGNNLADQLATQASFKVHAGKRTADGSEFEKRTADGSEFESPKKKAKVE

SEQ ID NO: 1108 - protein, 2084 aa, synthetic construct
MPAAKRVKLDGGDKKYSIGLDIGTNSVGWAVITDEYKVPSKKFKVLGNTDRHSIKKNLIGALLFDSGETAEATRLKRTARRRYTRRKNRICYLQEIFSNEMAKVDDSFFHRLEESFLVEEDKKHERHPIFGNIVDEVAYHEKYPTIYHLRKKLVDSTDKADLRLIYLALAHMIKFRGHFLIEGDLNPDNSDVDKLFIQLVQTYNQLFEENPINASGVDAKAILSARLSKSRRLENLIAQLPGEKKNGLFGNLIALSLGLTPNFKSNFDLAEDAKLQLSKDTYDDDLDNLLAQIGDQYADLFLAAKNLSDAILLSDILRVNTEITKAPLSASMIKRYDEHHQDLTLLKALVRQQLPEKYKEIFFDQSKNGYAGYIDGGASQEEFYKFIKPILEKMDGTEELLVKLNREDLLRKQRTFDNGSIPHQIHLGELHAILRRQEDFYPFLKDNREKIEKILTFRIPYYVGPLARGNSRFAWMTRKSEETITPWNFEEVVDKGASAQSFIERMTNFDKNLPNEKVLPKHSLLYEYFTVYNELTKVKYVTEGMRKPAFLSGEQKKAIVDLLFKTNRKVTVKQLKEDYFKKIECFDSVEISGVEDRFNASLGTYHDLLKIIKDKDFLDNEENEDILEDIVLTLTLFEDREMIEERLKTYAHLFDDKVMKQLKRRRYTGWGRLSRKLINGIRDKQSGKTILDFLKSDGFANRNFMQLIHDDSLTFKEDIQKAQVSGQGDSLHEHIANLAGSPAIKKGILQTVKVVDELVKVMGRHKPENIVIEMARENQTTQKGQKNSRERMKRIEEGIKELGSQILKEHPVENTQLQNEKLYLYYLQNGRDMYVDQELDINRLSDYDVDHIVPQSFLKDDSIDNKVLTRSDKARGKSDNVPSEEVVKKMKNYWRQLLNAKLITQRKFDNLTKAERGGLSELDKAGFIKRQLVETRQITKHVAQILDSRMNTKYDENDKLIREVKVITLKSKLVSDFRKDFQFYKVREINNYHHAHDAYLNAVVGTALIKKYPKLESEFVYGDYKVYDVRKMIAKSEQEIGKATAKYFFYSNIMNFFKTEITLANGEIRKRPLIETNGETGEIVWDKGRDFATVRKVLSMPQVNIVKKTEVQTGGFSKESILPKRNSDKLIARKKDWDPKKYGGFDSPTVAYSVLVVAKVEKGKSKKLKSVKELLGITIMERSSFEKNPIDFLEAKGYKEVKKDLIIKLPKYSLFELENGRKRMLASAGELQKGNELALPSKYVNFLYLASHYEKLKGSPEDNEQKQLFVEQHKHYLDEIIEQISEFSKRVILADANLDKVLSAYNKHRDKPIREQAENIIHLFTLTNLGAPAAFKYFDTTIDRKRYTSTKEVLDATLIHQSITGLYETRIDLSQLGGDGGGGGEAAAKGGVPWILKKPLELTIKLDLEEQQGTLLNNSILSKKGKEELKQLFEKYSALWQSWENQVGHRRIRPHKIATGTVKPTPQKQYHINPKAKPDIQIVINDLLKQGVLIQKESTMNTPVYPVPKPNGRWRMVLDYRAVNKVTPLIAVQNQHSYGILGSLFKGRYKTTIDLSNGFWAHPIVPEDYWITAFTWQGKQYCWTVLPQGFLNSPGLFNGDVVDLLQGIPNVEVYVDDVYISHDSEKEHLEYLDILFNRLKEAGYIISLKKSNIANSIVDFLGFQITNEGRGLTDTFKEKLENITAPTTLKQLQSILGLLNFARNFIPDFTELIAPLYALIPKSPKNYVPWQIEHSTTLETLITKLNGAEYLQGRKGDKTLIMKVNASYTTGYIRYYNEGEKKPISYVSIVFSKTELKFTELEKLLTTVHKGLLKALDLSMGQNIHVYSPIVSMQNIQKTPQTAKKALASRWLSWLSYLEDPRIRFFYDPQMPALKDLPAVDTGKDNKKHPSNFQHIFYTDGSAITSPTKEGHLNAGMGIVYFINKDGNLQKQQEWSISLGNHTAQFAEIAAFEFALKKCLPLGGNILVVTDSNYVAKAYNEELDVWASNGFVNNRKKPLKHISKWKSVADLKRLRPDVVVTHEPGHQKLDSSPHAYGNNLADQLATQASFKVHAGKRTADGSEFEKRTADGSEFESPKKKAKVE

SEQ ID NO: 1109 - protein, 2085 aa, synthetic construct
MPAAKRVKLDGGDKKYSIGLDIGTNSVGWAVITDEYKVPSKKFKVLGNTDRHSIKKNLIGALLFDSGETAEATRLKRTARRRYTRRKNRICYLQEIFSNEMAKVDDSFFHRLEESFLVEEDKKHERHPIFGNIVDEVAYHEKYPTIYHLRKKLVDSTDKADLRLIYLALAHMIKFRGHFLIEGDLNPDNSDVDKLFIQLVQTYNQLFEENPINASGVDAKAILSARLSKSRRLENLIAQLPGEKKNGLFGNLIALSLGLTPNFKSNFDLAEDAKLQLSKDTYDDDLDNLLAQIGDQYADLFLAAKNLSDAILLSDILRVNTEITKAPLSASMIKRYDEHHQDLTLLKALVRQQLPEKYKEIFFDQSKNGYAGYIDGGASQEEFYKFIKPILEKMDGTEELLVKLNREDLLRKQRTFDNGSIPHQIHLGELHAILRRQEDFYPFLKDNREKIEKILTFRIPYYVGPLARGNSRFAWMTRKSEETITPWNFEEVVDKGASAQSFIERMTNFDKNLPNEKVLPKHSLLYEYFTVYNELTKVKYVTEGMRKPAFLSGEQKKAIVDLLFKTNRKVTVKQLKEDYFKKIECFDSVEISGVEDRFNASLGTYHDLLKIIKDKDFLDNEENEDILEDIVLTLTLFEDREMIEERLKTYAHLFDDKVMKQLKRRRYTGWGRLSRKLINGIRDKQSGKTILDFLKSDGFANRNFMQLIHDDSLTFKEDIQKAQVSGQGDSLHEHIANLAGSPAIKKGILQTVKVVDELVKVMGRHKPENIVIEMARENQTTQKGQKNSRERMKRIEEGIKELGSQILKEHPVENTQLQNEKLYLYYLQNGRDMYVDQELDINRLSDYDVDHIVPQSFLKDDSIDNKVLTRSDKARGKSDNVPSEEVVKKMKNYWRQLLNAKLITQRKFDNLTKAERGGLSELDKAGFIKRQLVETRQITKHVAQILDSRMNTKYDENDKLIREVKVITLKSKLVSDFRKDFQFYKVREINNYHHAHDAYLNAVVGTALIKKYPKLESEFVYGDYKVYDVRKMIAKSEQEIGKATAKYFFYSNIMNFFKTEITLANGEIRKRPLIETNGETGEIVWDKGRDFATVRKVLSMPQVNIVKKTEVQTGGFSKESILPKRNSDKLIARKKDWDPKKYGGFDSPTVAYSVLVVAKVEKGKSKKLKSVKELLGITIMERSSFEKNPIDFLEAKGYKEVKKDLIIKLPKYSLFELENGRKRMLASAGELQKGNELALPSKYVNFLYLASHYEKLKGSPEDNEQKQLFVEQHKHYLDEIIEQISEFSKRVILADANLDKVLSAYNKHRDKPIREQAENIIHLFTLTNLGAPAAFKYFDTTIDRKRYTSTKEVLDATLIHQSITGLYETRIDLSQLGGDGGGGGGSSPAPGGVPWILKKPLELTIKLDLEEQQGTLLNNSILSKKGKEELKQLFEKYSALWQSWENQVGHRRIRPHKIATGTVKPTPQKQYHINPKAKPDIQIVINDLLKQGVLIQKESTMNTPVYPVPKPNGRWRMVLDYRAVNKVTPLIAVQNQHSYGILGSLFKGRYKTTIDLSNGFWAHPIVPEDYWITAFTWQGKQYCWTVLPQGFLNSPGLFNGDVVDLLQGIPNVEVYVDDVYISHDSEKEHLEYLDILFNRLKEAGYIISLKKSNIANSIVDFLGFQITNEGRGLTDTFKEKLENITAPTTLKQLQSILGLLNFARNFIPDFTELIAPLYALIPKSPKNYVPWQIEHSTTLETLITKLNGAEYLQGRKGDKTLIMKVNASYTTGYIRYYNEGEKKPISYVSIVFSKTELKFTELEKLLTTVHKGLLKALDLSMGQNIHVYSPIVSMQNIQKTPQTAKKALASRWLSWLSYLEDPRIRFFYDPQMPALKDLPAVDTGKDNKKHPSNFQHIFYTDGSAITSPTKEGHLNAGMGIVYFINKDGNLQKQQEWSISLGNHTAQFAEIAAFEFALKKCLPLGGNILVVTDSNYVAKAYNEELDVWASNGFVNNRKKPLKHISKWKSVADLKRLRPDVVVTHEPGHQKLDSSPHAYGNNLADQLATQASFKVHAGKRTADGSEFEKRTADGSEFESPKKKAKVE

SEQ ID NO: 1110 - protein, 2085 aa, synthetic construct
MPAAKRVKLDGGDKKYSIGLDIGTNSVGWAVITDEYKVPSKKFKVLGNTDRHSIKKNLIGALLFDSGETAEATRLKRTARRRYTRRKNRICYLQEIFSNEMAKVDDSFFHRLEESFLVEEDKKHERHPIFGNIVDEVAYHEKYPTIYHLRKKLVDSTDKADLRLIYLALAHMIKFRGHFLIEGDLNPDNSDVDKLFIQLVQTYNQLFEENPINASGVDAKAILSARLSKSRRLENLIAQLPGEKKNGLFGNLIALSLGLTPNFKSNFDLAEDAKLQLSKDTYDDDLDNLLAQIGDQYADLFLAAKNLSDAILLSDILRVNTEITKAPLSASMIKRYDEHHQDLTLLKALVRQQLPEKYKEIFFDQSKNGYAGYIDGGASQEEFYKFIKPILEKMDGTEELLVKLNREDLLRKQRTFDNGSIPHQIHLGELHAILRRQEDFYPFLKDNREKIEKILTFRIPYYVGPLARGNSRFAWMTRKSEETITPWNFEEVVDKGASAQSFIERMTNFDKNLPNEKVLPKHSLLYEYFTVYNELTKVKYVTEGMRKPAFLSGEQKKAIVDLLFKTNRKVTVKQLKEDYFKKIECFDSVEISGVEDRFNASLGTYHDLLKIIKDKDFLDNEENEDILEDIVLTLTLFEDREMIEERLKTYAHLFDDKVMKQLKRRRYTGWGRLSRKLINGIRDKQSGKTILDFLKSDGFANRNFMQLIHDDSLTFKEDIQKAQVSGQGDSLHEHIANLAGSPAIKKGILQTVKVVDELVKVMGRHKPENIVIEMARENQTTQKGQKNSRERMKRIEEGIKELGSQILKEHPVENTQLQNEKLYLYYLQNGRDMYVDQELDINRLSDYDVDHIVPQSFLKDDSIDNKVLTRSDKARGKSDNVPSEEVVKKMKNYWRQLLNAKLITQRKFDNLTKAERGGLSELDKAGFIKRQLVETRQITKHVAQILDSRMNTKYDENDKLIREVKVITLKSKLVSDFRKDFQFYKVREINNYHHAHDAYLNAVVGTALIKKYPKLESEFVYGDYKVYDVRKMIAKSEQEIGKATAKYFFYSNIMNFFKTEITLANGEIRKRPLIETNGETGEIVWDKGRDFATVRKVLSMPQVNIVKKTEVQTGGFSKESILPKRNSDKLIARKKDWDPKKYGGFDSPTVAYSVLVVAKVEKGKSKKLKSVKELLGITIMERSSFEKNPIDFLEAKGYKEVKKDLIIKLPKYSLFELENGRKRMLASAGELQKGNELALPSKYVNFLYLASHYEKLKGSPEDNEQKQLFVEQHKHYLDEIIEQISEFSKRVILADANLDKVLSAYNKHRDKPIREQAENIIHLFTLTNLGAPAAFKYFDTTIDRKRYTSTKEVLDATLIHQSITGLYETRIDLSQLGGDGGPAPGGSGSSGGVPWILKKPLELTIKLDLEEQQGTLLNNSILSKKGKEELKQLFEKYSALWQSWENQVGHRRIRPHKIATGTVKPTPQKQYHINPKAKPDIQIVINDLLKQGVLIQKESTMNTPVYPVPKPNGRWRMVLDYRAVNKVTPLIAVQNQHSYGILGSLFKGRYKTTIDLSNGFWAHPIVPEDYWITAFTWQGKQYCWTVLPQGFLNSPGLFNGDVVDLLQGIPNVEVYVDDVYISHDSEKEHLEYLDILFNRLKEAGYIISLKKSNIANSIVDFLGFQITNEGRGLTDTFKEKLENITAPTTLKQLQSILGKLNFARNFIPDFTELIAPLYALIPKSPKNYVPWQIEHSTTLETLITKLNGAEYLQGRKGDKTLIMKVNASYTTGYIRYYNEGEKKPISYVSIVFSKTELKFTELEKLLTTVHKGLLKALDLSMGQNIHVYSPIVSMQNIQKTPQTAKKALASRWLSWLSYLEDPRIRFFYDPQMPALKDLPAVDTGKDNKKHPSNFQHIFYTDGSAITSPTKEGHLNAGMGIVYFINKDGNLQKQQEWSISLGNHTAQFAEIAAFEFALKKCLPLGGNILVVTDSNYVAKAYNEELDVWASNGFVNNRKKPLKHISKWKSVADLKRLRPDVVVTHEPGHQKLDSSPHAYGNNLADQLATQASFKVHAGKRTADGSEFEKRTADGSEFESPKKKAKVE

SEQ ID NO: 1111 - protein, 2087 aa, synthetic construct
MPAAKRVKLDGGDKKYSIGLDIGTNSVGWAVITDEYKVPSKKFKVLGNTDRHSIKKNLIGALLFDSGETAEATRLKRTARRRYTRRKNRICYLQEIFSNEMAKVDDSFFHRLEESFLVEEDKKHERHPIFGNIVDEVAYHEKYPTIYHLRKKLVDSTDKADLRLIYLALAHMIKFRGHFLIEGDLNPDNSDVDKLFIQLVQTYNQLFEENPINASGVDAKAILSARLSKSRRLENLIAQLPGEKKNGLFGNLIALSLGLTPNFKSNFDLAEDAKLQLSKDTYDDDLDNLLAQIGDQYADLFLAAKNLSDAILLSDILRVNTEITKAPLSASMIKRYDEHHQDLTLLKALVRQQLPEKYKEIFFDQSKNGYAGYIDGGASQEEFYKFIKPILEKMDGTEELLVKLNREDLLRKQRTFDNGSIPHQIHLGELHAILRRQEDFYPFLKDNREKIEKILTFRIPYYVGPLARGNSRFAWMTRKSEETITPWNFEEVVDKGASAQSFIERMTNFDKNLPNEKVLPKHSLLYEYFTVYNELTKVKYVTEGMRKPAFLSGEQKKAIVDLLFKTNRKVTVKQLKEDYFKKIECFDSVEISGVEDRFNASLGTYHDLLKIIKDKDFLDNEENEDILEDIVLTLTLFEDREMIEERLKTYAHLFDDKVMKQLKRRRYTGWGRLSRKLINGIRDKQSGKTILDFLKSDGFANRNFMQLIHDDSLTFKEDIQKAQVSGQGDSLHEHIANLAGSPAIKKGILQTVKVVDELVKVMGRHKPENIVIEMARENQTTQKGQKNSRERMKRIEEGIKELGSQILKEHPVENTQLQNEKLYLYYLQNGRDMYVDQELDINRLSDYDVDHIVPQSFLKDDSIDNKVLTRSDKARGKSDNVPSEEVVKKMKNYWRQLLNAKLITQRKFDNLTKAERGGLSELDKAGFIKRQLVETRQITKHVAQILDSRMNTKYDENDKLIREVKVITLKSKLVSDFRKDFQFYKVREINNYHHAHDAYLNAVVGTALIKKYPKLESEFVYGDYKVYDVRKMIAKSEQEIGKATAKYFFYSNIMNFFKTEITLANGEIRKRPLIETNGETGEIVWDKGRDFATVRKVLSMPQVNIVKKTEVQTGGFSKESILPKRNSDKLIARKKDWDPKKYGGFDSPTVAYSVLVVAKVEKGKSKKLKSVKELLGITIMERSSFEKNPIDFLEAKGYKEVKKDLIIKLPKYSLFELENGRKRMLASAGELQKGNELALPSKYVNFLYLASHYEKLKGSPEDNEQKQLFVEQHKHYLDEIIEQISEFSKRVILADANLDKVLSAYNKHRDKPIREQAENIIHLFTLTNLGAPAAFKYFDTTIDRKRYTSTKEVLDATLIHQSITGLYETRIDLSQLGGDGGGSSEAAAKGGGGGVPWILKKPLELTIKLDLEEQQGTLLNNSILSKKGKEELKQLFEKYSALWQSWENQVGHRRIRPHKIATGTVKPTPQKQYHINPKAKPDIQIVINDLLKQGVLIQKESTMNTPVYPVPKPNGRWRMVLDYRAVNKVTPLIAVQNQHSYGILGSLFKGRYKTTIDLSNGFWAHPIVPEDYWITAFTWQGKQYCWTVLPQGFLNSPGLFNGDVVDLLQGIPNVEVYVDDVYISHDSEKEHLEYLDILFNRLKEAGYIISLKKSNIANSIVDFLGFQITNEGRGLTDTFKEKLENITAPTTLKQLQSILGKLNFARNFIPDFTELIAPLYALIPKSPKNYVPWQIEHSTTLETLITKLNGAEYLQGRKGDKTLIMKVNASYTTGYIRYYNEGEKKPISYVSIVFSKTELKFTELEKLLTTVHKGLLKALDLSMGQNIHVYSPIVSMQNIQKTPQTAKKALASRWLSWLSYLEDPRIRFFYDPQMPALKDLPAVDTGKDNKKHPSNFQHIFYTDGSAITSPTKEGHLNAGMGIVYFINKDGNLQKQQEWSISLGNHTAQFAEIAAFEFALKKCLPLGGNILVVTDSNYVAKAYNEELDVWASNGFVNNRKKPLKHISKWKSVADLKRLRPDVVVTHEPGHQKLDSSPHAYGNNLADQLATQASFKVHAGKRTADGSEFEKRTADGSEFESPKKKAKVE

SEQ ID NO: 1112 - protein, 2091 aa, synthetic construct
MPAAKRVKLDGGDKKYSIGLDIGTNSVGWAVITDEYKVPSKKFKVLGNTDRHSIKKNLIGALLFDSGETAEATRLKRTARRRYTRRKNRICYLQEIFSNEMAKVDDSFFHRLEESFLVEEDKKHERHPIFGNIVDEVAYHEKYPTIYHLRKKLVDSTDKADLRLIYLALAHMIKFRGHFLIEGDLNPDNSDVDKLFIQLVQTYNQLFEENPINASGVDAKAILSARLSKSRRLENLIAQLPGEKKNGLFGNLIALSLGLTPNFKSNFDLAEDAKLQLSKDTYDDDLDNLLAQIGDQYADLFLAAKNLSDAILLSDILRVNTEITKAPLSASMIKRYDEHHQDLTLLKALVRQQLPEKYKEIFFDQSKNGYAGYIDGGASQEEFYKFIKPILEKMDGTEELLVKLNREDLLRKQRTFDNGSIPHQIHLGELHAILRRQEDFYPFLKDNREKIEKILTFRIPYYVGPLARGNSRFAWMTRKSEETITPWNFEEVVDKGASAQSFIERMTNFDKNLPNEKVLPKHSLLYEYFTVYNELTKVKYVTEGMRKPAFLSGEQKKAIVDLLFKTNRKVTVKQLKEDYFKKIECFDSVEISGVEDRFNASLGTYHDLLKIIKDKDFLDNEENEDILEDIVLTLTLFEDREMIEERLKTYAHLFDDKVMKQLKRRRYTGWGRLSRKLINGIRDKQSGKTILDFLKSDGFANRNFMQLIHDDSLTFKEDIQKAQVSGQGDSLHEHIANLAGSPAIKKGILQTVKVVDELVKVMGRHKPENIVIEMARENQTTQKGQKNSRERMKRIEEGIKELGSQILKEHPVENTQLQNEKLYLYYLQNGRDMYVDQELDINRLSDYDVDHIVPQSFLKDDSIDNKVLTRSDKARGKSDNVPSEEVVKKMKNYWRQLLNAKLITQRKFDNLTKAERGGLSELDKAGFIKRQLVETRQITKHVAQILDSRMNTKYDENDKLIREVKVITLKSKLVSDFRKDFQFYKVREINNYHHAHDAYLNAVVGTALIKKYPKLESEFVYGDYKVYDVRKMIAKSEQEIGKATAKYFFYSNIMNFFKTEITLANGEIRKRPLIETNGETGEIVWDKGRDFATVRKVLSMPQVNIVKKTEVQTGGFSKESILPKRNSDKLIARKKDWDPKKYGGFDSPTVAYSVLVVAKVEKGKSKKLKSVKELLGITIMERSSFEKNPIDFLEAKGYKEVKKDLIIKLPKYSLFELENGRKRMLASAGELQKGNELALPSKYVNFLYLASHYEKLKGSPEDNEQKQLFVEQHKHYLDEIIEQISEFSKRVILADANLDKVLSAYNKHRDKPIREQAENIIHLFTLTNLGAPAAFKYFDTTIDRKRYTSTKEVLDATLIHQSITGLYETRIDLSQLGGDGGGSSGSSGSSGSSGSSGGVPWILKKPLELTIKLDLEEQQGTLLNNSILSKKGKEELKQLFEKYSALWQSWENQVGHRRIRPHKIATGTVKPTPQKQYHINPKAKPDIQIVINDLLKQGVLIQKESTMNTPVYPVPKPNGRWRMVLDYRAVNKVTPLIAVQNQHSYGILGSLFKGRYKTTIDLSNGFWAHPIVPEDYWITAFTWQGKQYCWTVLPQGFLNSPGLFNGDVVDLLQGIPNVEVYVDDVYISHDSEKEHLEYLDILFNRLKEAGYIISLKKSNIANSIVDFLGFQITNEGRGLTDTFKEKLENITAPTTLKQLQSILGKLNFARNFIPDFTELIAPLYALIPKSPKNYVPWQIEHSTTLETLITKLNGAEYLQGRKGDKTLIMKVNASYTTGYIRYYNEGEKKPISYVSIVFSKTELKFTELEKLLTTVHKGLLKALDLSMGQNIHVYSPIVSMQNIQKTPQTAKKALASRWLSWLSYLEDPRIRFFYDPQMPALKDLPAVDTGKDNKKHPSNFQHIFYTDGSAITSPTKEGHLNAGMGIVYFINKDGNLQKQQEWSISLGNHTAQFAEIAAFEFALKKCLPLGGNILVVTDSNYVAKAYNEELDVWASNGFVNNRKKPLKHISKWKSVADLKRLRPDVVVTHEPGHQKLDSSPHAYGNNLADQLATQASFKVHAGKRTADGSEFEKRTADGSEFESPKKKAKVE

SEQ ID NO: 1113 - protein, 2087 aa, synthetic construct
MPAAKRVKLDGGDKKYSIGLDIGTNSVGWAVITDEYKVPSKKFKVLGNTDRHSIKKNLIGALLFDSGETAEATRLKRTARRRYTRRKNRICYLQEIFSNEMAKVDDSFFHRLEESFLVEEDKKHERHPIFGNIVDEVAYHEKYPTIYHLRKKLVDSTDKADLRLIYLALAHMIKFRGHFLIEGDLNPDNSDVDKLFIQLVQTYNQLFEENPINASGVDAKAILSARLSKSRRLENLIAQLPGEKKNGLFGNLIALSLGLTPNFKSNFDLAEDAKLQLSKDTYDDDLDNLLAQIGDQYADLFLAAKNLSDAILLSDILRVNTEITKAPLSASMIKRYDEHHQDLTLLKALVRQQLPEKYKEIFFDQSKNGYAGYIDGGASQEEFYKFIKPILEKMDGTEELLVKLNREDLLRKQRTFDNGSIPHQIHLGELHAILRRQEDFYPFLKDNREKIEKILTFRIPYYVGPLARGNSRFAWMTRKSEETITPWNFEEVVDKGASAQSFIERMTNFDKNLPNEKVLPKHSLLYEYFTVYNELTKVKYVTEGMRKPAFLSGEQKKAIVDLLFKTNRKVTVKQLKEDYFKKIECFDSVEISGVEDRFNASLGTYHDLLKIIKDKDFLDNEENEDILEDIVLTLTLFEDREMIEERLKTYAHLFDDKVMKQLKRRRYTGWGRLSRKLINGIRDKQSGKTILDFLKSDGFANRNFMQLIHDDSLTFKEDIQKAQVSGQGDSLHEHIANLAGSPAIKKGILQTVKVVDELVKVMGRHKPENIVIEMARENQTTQKGQKNSRERMKRIEEGIKELGSQILKEHPVENTQLQNEKLYLYYLQNGRDMYVDQELDINRLSDYDVDHIVPQSFLKDDSIDNKVLTRSDKARGKSDNVPSEEVVKKMKNYWRQLLNAKLITQRKFDNLTKAERGGLSELDKAGFIKRQLVETRQITKHVAQILDSRMNTKYDENDKLIREVKVITLKSKLVSDFRKDFQFYKVREINNYHHAHDAYLNAVVGTALIKKYPKLESEFVYGDYKVYDVRKMIAKSEQEIGKATAKYFFYSNIMNFFKTEITLANGEIRKRPLIETNGETGEIVWDKGRDFATVRKVLSMPQVNIVKKTEVQTGGFSKESILPKRNSDKLIARKKDWDPKKYGGFDSPTVAYSVLVVAKVEKGKSKKLKSVKELLGITIMERSSFEKNPIDFLEAKGYKEVKKDLIIKLPKYSLFELENGRKRMLASAGELQKGNELALPSKYVNFLYLASHYEKLKGSPEDNEQKQLFVEQHKHYLDEIIEQISEFSKRVILADANLDKVLSAYNKHRDKPIREQAENIIHLFTLTNLGAPAAFKYFDTTIDRKRYTSTKEVLDATLIHQSITGLYETRIDLSQLGGDGGGGSEAAAKGGGGGVPWILKKPLELTIKLDLEEQQGTLLNNSILSKKGKEELKQLFEKYSALWQSWENQVGHRRIRPHKIATGTVKPTPQKQYHINPKAKPDIQIVINDLLKQGVLIQKESTMNTPVYPVPKPNGRWRMVLDYRAVNKVTPLIAVQNQHSYGILGSLFKGRYKTTIDLSNGFWAHPIVPEDYWITAFTWQGKQYCWTVLPQGFLNSPGLFNGDVVDLLQGIPNVEVYVDDVYISHDSEKEHLEYLDILFNRLKEAGYIISLKKSNIANSIVDFLGFQITNEGRGLTDTFKEKLENITAPTTLKQLQSILGKLNFARNFIPDFTELIAPLYALIPKSPKNYVPWQIEHSTTLETLITKLNGAEYLQGRKGDKTLIMKVNASYTTGYIRYYNEGEKKPISYVSIVFSKTELKFTELEKLLTTVHKGLLKALDLSMGQNIHVYSPIVSMQNIQKTPQTAKKALASRWLSWLSYLEDPRIRFFYDPQMPALKDLPAVDTGKDNKKHPSNFQHIFYTDGSAITSPTKEGHLNAGMGIVYFINKDGNLQKQQEWSISLGNHTAQFAEIAAFEFALKKCLPLGGNILVVTDSNYVAKAYNEELDVWASNGFVNNRKKPLKHISKWKSVADLKRLRPDVVVTHEPGHQKLDSSPHAYGNNLADQLATQASFKVHAGKRTADGSEFEKRTADGSEFESPKKKAKVE

SEQ ID NO: 1114 - protein, 2087 aa, synthetic construct
MPAAKRVKLDGGDKKYSIGLDIGTNSVGWAVITDEYKVPSKKFKVLGNTDRHSIKKNLIGALLFDSGETAEATRLKRTARRRYTRRKNRICYLQEIFSNEMAKVDDSFFHRLEESFLVEEDKKHERHPIFGNIVDEVAYHEKYPTIYHLRKKLVDSTDKADLRLIYLALAHMIKFRGHFLIEGDLNPDNSDVDKLFIQLVQTYNQLFEENPINASGVDAKAILSARLSKSRRLENLIAQLPGEKKNGLFGNLIALSLGLTPNFKSNFDLAEDAKLQLSKDTYDDDLDNLLAQIGDQYADLFLAAKNLSDAILLSDILRVNTEITKAPLSASMIKRYDEHHQDLTLLKALVRQQLPEKYKEIFFDQSKNGYAGYIDGGASQEEFYKFIKPILEKMDGTEELLVKLNREDLLRKQRTFDNGSIPHQIHLGELHAILRRQEDFYPFLKDNREKIEKILTFRIPYYVGPLARGNSRFAWMTRKSEETITPWNFEEVVDKGASAQSFIERMTNFDKNLPNEKVLPKHSLLYEYFTVYNELTKVKYVTEGMRKPAFLSGEQKKAIVDLLFKTNRKVTVKQLKEDYFKKIECFDSVEISGVEDRFNASLGTYHDLLKIIKDKDFLDNEENEDILEDIVLTLTLFEDREMIEERLKTYAHLFDDKVMKQLKRRRYTGWGRLSRKLINGIRDKQSGKTILDFLKSDGFANRNFMQLIHDDSLTFKEDIQKAQVSGQGDSLHEHIANLAGSPAIKKGILQTVKVVDELVKVMGRHKPENIVIEMARENQTTQKGQKNSRERMKRIEEGIKELGSQILKEHPVENTQLQNEKLYLYYLQNGRDMYVDQELDINRLSDYDVDHIVPQSFLKDDSIDNKVLTRSDKARGKSDNVPSEEVVKKMKNYWRQLLNAKLITQRKFDNLTKAERGGLSELDKAGFIKRQLVETRQITKHVAQILDSRMNTKYDENDKLIREVKVITLKSKLVSDFRKDFQFYKVREINNYHHAHDAYLNAVVGTALIKKYPKLESEFVYGDYKVYDVRKMIAKSEQEIGKATAKYFFYSNIMNFFKTEITLANGEIRKRPLIETNGETGEIVWDKGRDFATVRKVLSMPQVNIVKKTEVQTGGFSKESILPKRNSDKLIARKKDWDPKKYGGFDSPTVAYSVLVVAKVEKGKSKKLKSVKELLGITIMERSSFEKNPIDFLEAKGYKEVKKDLIIKLPKYSLFELENGRKRMLASAGELQKGNELALPSKYVNFLYLASHYEKLKGSPEDNEQKQLFVEQHKHYLDEIIEQISEFSKRVILADANLDKVLSAYNKHRDKPIREQAENIIHLFTLTNLGAPAAFKYFDTTIDRKRYTSTKEVLDATLIHQSITGLYETRIDLSQLGGDGGGGGEAAAKGGSGGVPWILKKPLELTIKLDLEEQQGTLLNNSILSKKGKEELKQLFEKYSALWQSWENQVGHRRIRPHKIATGTVKPTPQKQYHINPKAKPDIQIVINDLLKQGVLIQKESTMNTPVYPVPKPNGRWRMVLDYRAVNKVTPLIAVQNQHSYGILGSLFKGRYKTTIDLSNGFWAHPIVPEDYWITAFTWQGKQYCWTVLPQGFLNSPGLFNGDVVDLLQGIPNVEVYVDDVYISHDSEKEHLEYLDILFNRLKEAGYIISLKKSNIANSIVDFLGFQITNEGRGLTDTFKEKLENITAPTTLKQLQSILGKLNFARNFIPDFTELIAPLYALIPKSPKNYVPWQIEHSTTLETLITKLNGAEYLQGRKGDKTLIMKVNASYTTGYIRYYNEGEKKPISYVSIVFSKTELKFTELEKLLTTVHKGLLKALDLSMGQNIHVYSPIVSMQNIQKTPQTAKKALASRWLSWLSYLEDPRIRFFYDPQMPALKDLPAVDTGKDNKKHPSNFQHIFYTDGSAITSPTKEGHLNAGMGIVYFINKDGNLQKQQEWSISLGNHTAQFAEIAAFEFALKKCLPLGGNILVVTDSNYVAKAYNEELDVWASNGFVNNRKKPLKHISKWKSVADLKRLRPDVVVTHEPGHQKLDSSPHAYGNNLADQLATQASFKVHAGKRTADGSEFEKRTADGSEFESPKKKAKVE

SEQ ID NO: 1115 - protein, 2208 aa, synthetic construct
MPAAKRVKLDGGDKKYSIGLDIGTNSVGWAVITDEYKVPSKKFKVLGNTDRHSIKKNLIGALLFDSGETAEATRLKRTARRRYTRRKNRICYLQEIFSNEMAKVDDSFFHRLEESFLVEEDKKHERHPIFGNIVDEVAYHEKYPTIYHLRKKLVDSTDKADLRLIYLALAHMIKFRGHFLIEGDLNPDNSDVDKLFIQLVQTYNQLFEENPINASGVDAKAILSARLSKSRRLENLIAQLPGEKKNGLFGNLIALSLGLTPNFKSNFDLAEDAKLQLSKDTYDDDLDNLLAQIGDQYADLFLAAKNLSDAILLSDILRVNTEITKAPLSASMIKRYDEHHQDLTLLKALVRQQLPEKYKEIFFDQSKNGYAGYIDGGASQEEFYKFIKPILEKMDGTEELLVKLNREDLLRKQRTFDNGSIPHQIHLGELHAILRRQEDFYPFLKDNREKIEKILTFRIPYYVGPLARGNSRFAWMTRKSEETITPWNFEEVVDKGASAQSFIERMTNFDKNLPNEKVLPKHSLLYEYFTVYNELTKVKYVTEGMRKPAFLSGEQKKAIVDLLFKTNRKVTVKQLKEDYFKKIECFDSVEISGVEDRFNASLGTYHDLLKIIKDKDFLDNEENEDILEDIVLTLTLFEDREMIEERLKTYAHLFDDKVMKQLKRRRYTGWGRLSRKLINGIRDKQSGKTILDFLKSDGFANRNFMQLIHDDSLTFKEDIQKAQVSGQGDSLHEHIANLAGSPAIKKGILQTVKVVDELVKVMGRHKPENIVIEMARENQTTQKGQKNSRERMKRIEEGIKELGSQILKEHPVENTQLQNEKLYLYYLQNGRDMYVDQELDINRLSDYDVDHIVPQSFLKDDSIDNKVLTRSDKARGKSDNVPSEEVVKKMKNYWRQLLNAKLITQRKFDNLTKAERGGLSELDKAGFIKRQLVETRQITKHVAQILDSRMNTKYDENDKLIREVKVITLKSKLVSDFRKDFQFYKVREINNYHHAHDAYLNAVVGTALIKKYPKLESEFVYGDYKVYDVRKMIAKSEQEIGKATAKYFFYSNIMNFFKTEITLANGEIRKRPLIETNGETGEIVWDKGRDFATVRKVLSMPQVNIVKKTEVQTGGFSKESILPKRNSDKLIARKKDWDPKKYGGFDSPTVAYSVLVVAKVEKGKSKKLKSVKELLGITIMERSSFEKNPIDFLEAKGYKEVKKDLIIKLPKYSLFELENGRKRMLASAGELQKGNELALPSKYVNFLYLASHYEKLKGSPEDNEQKQLFVEQHKHYLDEIIEQISEFSKRVILADANLDKVLSAYNKHRDKPIREQAENIIHLFTLTNLGAPAAFKYFDTTIDRKRYTSTKEVLDATLIHQSITGLYETRIDLSQLGGDGGAEAAAKEAAAKEAAAKEAAAKALEAEAAAKEAAAKEAAAKEAAAKAGGMDLLKPLTVERKGVKIKGYWNSQADITCVPKDLLQGEEPVRQQNVTTIHGTQEGDVYYVNLKIDGRRINTEVIGTTLDYAIITPGDVPWILKKPLELTIKLDLEEQQGTLLNNSILSKKGKEELKQLFEKYSALWQSWENQVGHRRIRPHKIATGTVKPTPQKQYHINPKAKPDIQIVINDLLKQGVLIQKESTMNTPVYPVPKPNGRWRMVLDYRAVNKVTPLIAVQNQHSYGILGSLFKGRYKTTIDLSNGFWAHPIVPEDYWITAFTWQGKQYCWTVLPQGFLNSPGLFNGDVVDLLQGIPNVEVYVDDVYISHDSEKEHLEYLDILFNRLKEAGYIISLKKSNIANSIVDFLGFQITNEGRGLTDTFKEKLENITAPTTLKQLQSILGLLNFARNFIPDFTELIAPLYALIPKSPKNYVPWQIEHSTTLETLITKLNGAEYLQGRKGDKTLIMKVNASYTTGYIRYYNEGEKKPISYVSIVFSKTELKFTELEKLLTTVHKGLLKALDLSMGQNIHVYSPIVSMQNIQKTPQTAKKALASRWLSWLSYLEDPRIRFFYDPQMPALKDLPAVDTGKDNKKHPSNFQHIFYTDGSAITSPTKEGHLNAGMGIVYFINKDGNLQKQQEWSISLGNHTAQFAEIAAFEFALKKCLPLGGNILVVTDSNYVAKAYNEELDVWASNGFVNNRKKPLKHISKWKSVADLKRLRPDVVVTHEPGHQKLDSSPHAYGNNLADQLATQASFKVHAGKRTADGSEFEKRTADGSEFESPKKKAKVE

SEQ ID NO: 1116 - protein, 2182 aa, synthetic construct
MPAAKRVKLDGGDKKYSIGLDIGTNSVGWAVITDEYKVPSKKFKVLGNTDRHSIKKNLIGALLFDSGETAEATRLKRTARRRYTRRKNRICYLQEIFSNEMAKVDDSFFHRLEESFLVEEDKKHERHPIFGNIVDEVAYHEKYPTIYHLRKKLVDSTDKADLRLIYLALAHMIKFRGHFLIEGDLNPDNSDVDKLFIQLVQTYNQLFEENPINASGVDAKAILSARLSKSRRLENLIAQLPGEKKNGLFGNLIALSLGLTPNFKSNFDLAEDAKLQLSKDTYDDDLDNLLAQIGDQYADLFLAAKNLSDAILLSDILRVNTEITKAPLSASMIKRYDEHHQDLTLLKALVRQQLPEKYKEIFFDQSKNGYAGYIDGGASQEEFYKFIKPILEKMDGTEELLVKLNREDLLRKQRTFDNGSIPHQIHLGELHAILRRQEDFYPFLKDNREKIEKILTFRIPYYVGPLARGNSRFAWMTRKSEETITPWNFEEVVDKGASAQSFIERMTNFDKNLPNEKVLPKHSLLYEYFTVYNELTKVKYVTEGMRKPAFLSGEQKKAIVDLLFKTNRKVTVKQLKEDYFKKIECFDSVEISGVEDRFNASLGTYHDLLKIIKDKDFLDNEENEDILEDIVLTLTLFEDREMIEERLKTYAHLFDDKVMKQLKRRRYTGWGRLSRKLINGIRDKQSGKTILDFLKSDGFANRNFMQLIHDDSLTFKEDIQKAQVSGQGDSLHEHIANLAGSPAIKKGILQTVKVVDELVKVMGRHKPENIVIEMARENQTTQKGQKNSRERMKRIEEGIKELGSQILKEHPVENTQLQNEKLYLYYLQNGRDMYVDQELDINRLSDYDVDHIVPQSFLKDDSIDNKVLTRSDKARGKSDNVPSEEVVKKMKNYWRQLLNAKLITQRKFDNLTKAERGGLSELDKAGFIKRQLVETRQITKHVAQILDSRMNTKYDENDKLIREVKVITLKSKLVSDFRKDFQFYKVREINNYHHAHDAYLNAVVGTALIKKYPKLESEFVYGDYKVYDVRKMIAKSEQEIGKATAKYFFYSNIMNFFKTEITLANGEIRKRPLIETNGETGEIVWDKGRDFATVRKVLSMPQVNIVKKTEVQTGGFSKESILPKRNSDKLIARKKDWDPKKYGGFDSPTVAYSVLVVAKVEKGKSKKLKSVKELLGITIMERSSFEKNPIDFLEAKGYKEVKKDLIIKLPKYSLFELENGRKRMLASAGELQKGNELALPSKYVNFLYLASHYEKLKGSPEDNEQKQLFVEQHKHYLDEIIEQISEFSKRVILADANLDKVLSAYNKHRDKPIREQAENIIHLFTLTNLGAPAAFKYFDTTIDRKRYTSTKEVLDATLIHQSITGLYETRIDLSQLGGDGGEAAAKEAAAKEAAAKEAAAKGGMDLLKPLTVERKGVKIKGYWNSQADITCVPKDLLQGEEPVRQQNVTTIHGTQEGDVYYVNLKIDGRRINTEVIGTTLDYAIITPGDVPWILKKPLELTIKLDLEEQQGTLLNNSILSKKGKEELKQLFEKYSALWQSWENQVGHRRIRPHKIATGTVKPTPQKQYHINPKAKPDIQIVINDLLKQGVLIQKESTMNTPVYPVPKPNGRWRMVLDYRAVNKVTPLIAVQNQHSYGILGSLFKGRYKTTIDLSNGFWAHPIVPEDYWITAFTWQGKQYCWTVLPQGFLNSPGLFNGDVVDLLQGIPNVEVYVDDVYISHDSEKEHLEYLDILFNRLKEAGYIISLKKSNIANSIVDFLGFQITNEGRGLTDTFKEKLENITAPTTLKQLQSILGLLNFARNFIPDFTELIAPLYALIPKSPKNYVPWQIEHSTTLETLITKLNGAEYLQGRKGDKTLIMKVNASYTTGYIRYYNEGEKKPISYVSIVFSKTELKFTELEKLLTTVHKGLLKALDLSMGQNIHVYSPIVSMQNIQKTPQTAKKALASRWLSWLSYLEDPRIRFFYDPQMPALKDLPAVDTGKDNKKHPSNFQHIFYTDGSAITSPTKEGHLNAGMGIVYFINKDGNLQKQQEWSISLGNHTAQFAEIAAFEFALKKCLPLGGNILVVTDSNYVAKAYNEELDVWASNGFVNNRKKPLKHISKWKSVADLKRLRPDVVVTHEPGHQKLDSSPHAYGNNLADQLATQASFKVHAGKRTADGSEFEKRTADGSEFESPKKKAKVE

SEQ ID NO: 1117 - protein, 2171 aa, synthetic construct
MPAAKRVKLDGGDKKYSIGLDIGTNSVGWAVITDEYKVPSKKFKVLGNTDRHSIKKNLIGALLFDSGETAEATRLKRTARRRYTRRKNRICYLQEIFSNEMAKVDDSFFHRLEESFLVEEDKKHERHPIFGNIVDEVAYHEKYPTIYHLRKKLVDSTDKADLRLIYLALAHMIKFRGHFLIEGDLNPDNSDVDKLFIQLVQTYNQLFEENPINASGVDAKAILSARLSKSRRLENLIAQLPGEKKNGLFGNLIALSLGLTPNFKSNFDLAEDAKLQLSKDTYDDDLDNLLAQIGDQYADLFLAAKNLSDAILLSDILRVNTEITKAPLSASMIKRYDEHHQDLTLLKALVRQQLPEKYKEIFFDQSKNGYAGYIDGGASQEEFYKFIKPILEKMDGTEELLVKLNREDLLRKQRTFDNGSIPHQIHLGELHAILRRQEDFYPFLKDNREKIEKILTFRIPYYVGPLARGNSRFAWMTRKSEETITPWNFEEVVDKGASAQSFIERMTNFDKNLPNEKVLPKHSLLYEYFTVYNELTKVKYVTEGMRKPAFLSGEQKKAIVDLLFKTNRKVTVKQLKEDYFKKIECFDSVEISGVEDRFNASLGTYHDLLKIIKDKDFLDNEENEDILEDIVLTLTLFEDREMIEERLKTYAHLFDDKVMKQLKRRRYTGWGRLSRKLINGIRDKQSGKTILDFLKSDGFANRNFMQLIHDDSLTFKEDIQKAQVSGQGDSLHEHIANLAGSPAIKKGILQTVKVVDELVKVMGRHKPENIVIEMARENQTTQKGQKNSRERMKRIEEGIKELGSQILKEHPVENTQLQNEKLYLYYLQNGRDMYVDQELDINRLSDYDVDHIVPQSFLKDDSIDNKVLTRSDKARGKSDNVPSEEVVKKMKNYWRQLLNAKLITQRKFDNLTKAERGGLSELDKAGFIKRQLVETRQITKHVAQILDSRMNTKYDENDKLIREVKVITLKSKLVSDFRKDFQFYKVREINNYHHAHDAYLNAVVGTALIKKYPKLESEFVYGDYKVYDVRKMIAKSEQEIGKATAKYFFYSNIMNFFKTEITLANGEIRKRPLIETNGETGEIVWDKGRDFATVRKVLSMPQVNIVKKTEVQTGGFSKESILPKRNSDKLIARKKDWDPKKYGGFDSPTVAYSVLVVAKVEKGKSKKLKSVKELLGITIMERSSFEKNPIDFLEAKGYKEVKKDLIIKLPKYSLFELENGRKRMLASAGELQKGNELALPSKYVNFLYLASHYEKLKGSPEDNEQKQLFVEQHKHYLDEIIEQISEFSKRVILADANLDKVLSAYNKHRDKPIREQAENIIHLFTLTNLGAPAAFKYFDTTIDRKRYTSTKEVLDATLIHQSITGLYETRIDLSQLGGDGGGSSPAPGGGGGMDLLKPLTVERKGVKIKGYWNSQADITCVPKDLLQGEEPVRQQNVTTIHGTQEGDVYYVNLKIDGRRINTEVIGTTLDYAIITPGDVPWILKKPLELTIKLDLEEQQGTLLNNSILSKKGKEELKQLFEKYSALWQSWENQVGHRRIRPHKIATGTVKPTPQKQYHINPKAKPDIQIVINDLLKQGVLIQKESTMNTPVYPVPKPNGRWRMVLDYRAVNKVTPLIAVQNQHSYGILGSLFKGRYKTTIDLSNGFWAHPIVPEDYWITAFTWQGKQYCWTVLPQGFLNSPGLFNGDVVDLLQGIPNVEVYVDDVYISHDSEKEHLEYLDILFNRLKEAGYIISLKKSNIANSIVDFLGFQITNEGRGLTDTFKEKLENITAPTTLKQLQSILGLLNFARNFIPDFTELIAPLYALIPKSPKNYVPWQIEHSTTLETLITKLNGAEYLQGRKGDKTLIMKVNASYTTGYIRYYNEGEKKPISYVSIVFSKTELKFTELEKLLTTVHKGLLKALDLSMGQNIHVYSPIVSMQNIQKTPQTAKKALASRWLSWLSYLEDPRIRFFYDPQMPALKDLPAVDTGKDNKKHPSNFQHIFYTDGSAITSPTKEGHLNAGMGIVYFINKDGNLQKQQEWSISLGNHTAQFAEIAAFEFALKKCLPLGGNILVVTDSNYVAKAYNEELDVWASNGFVNNRKKPLKHISKWKSVADLKRLRPDVVVTHEPGHQKLDSSPHAYGNNLADQLATQASFKVHAGKRTADGSEFEKRTADGSEFESPKKKAKVE

SEQ ID NO: 1118 - protein, 2173 aa, synthetic construct
MPAAKRVKLDGGDKKYSIGLDIGTNSVGWAVITDEYKVPSKKFKVLGNTDRHSIKKNLIGALLFDSGETAEATRLKRTARRRYTRRKNRICYLQEIFSNEMAKVDDSFFHRLEESFLVEEDKKHERHPIFGNIVDEVAYHEKYPTIYHLRKKLVDSTDKADLRLIYLALAHMIKFRGHFLIEGDLNPDNSDVDKLFIQLVQTYNQLFEENPINASGVDAKAILSARLSKSRRLENLIAQLPGEKKNGLFGNLIALSLGLTPNFKSNFDLAEDAKLQLSKDTYDDDLDNLLAQIGDQYADLFLAAKNLSDAILLSDILRVNTEITKAPLSASMIKRYDEHHQDLTLLKALVRQQLPEKYKEIFFDQSKNGYAGYIDGGASQEEFYKFIKPILEKMDGTEELLVKLNREDLLRKQRTFDNGSIPHQIHLGELHAILRRQEDFYPFLKDNREKIEKILTFRIPYYVGPLARGNSRFAWMTRKSEETITPWNFEEVVDKGASAQSFIERMTNFDKNLPNEKVLPKHSLLYEYFTVYNELTKVKYVTEGMRKPAFLSGEQKKAIVDLLFKTNRKVTVKQLKEDYFKKIECFDSVEISGVEDRFNASLGTYHDLLKIIKDKDFLDNEENEDILEDIVLTLTLFEDREMIEERLKTYAHLFDDKVMKQLKRRRYTGWGRLSRKLINGIRDKQSGKTILDFLKSDGFANRNFMQLIHDDSLTFKEDIQKAQVSGQGDSLHEHIANLAGSPAIKKGILQTVKVVDELVKVMGRHKPENIVIEMARENQTTQKGQKNSRERMKRIEEGIKELGSQILKEHPVENTQLQNEKLYLYYLQNGRDMYVDQELDINRLSDYDVDHIVPQSFLKDDSIDNKVLTRSDKARGKSDNVPSEEVVKKMKNYWRQLLNAKLITQRKFDNLTKAERGGLSELDKAGFIKRQLVETRQITKHVAQILDSRMNTKYDENDKLIREVKVITLKSKLVSDFRKDFQFYKVREINNYHHAHDAYLNAVVGTALIKKYPKLESEFVYGDYKVYDVRKMIAKSEQEIGKATAKYFFYSNIMNFFKTEITLANGEIRKRPLIETNGETGEIVWDKGRDFATVRKVLSMPQVNIVKKTEVQTGGFSKESILPKRNSDKLIARKKDWDPKKYGGFDSPTVAYSVLVVAKVEKGKSKKLKSVKELLGITIMERSSFEKNPIDFLEAKGYKEVKKDLIIKLPKYSLFELENGRKRMLASAGELQKGNELALPSKYVNFLYLASHYEKLKGSPEDNEQKQLFVEQHKHYLDEIIEQISEFSKRVILADANLDKVLSAYNKHRDKPIREQAENIIHLFTLTNLGAPAAFKYFDTTIDRKRYTSTKEVLDATLIHQSITGLYETRIDLSQLGGDGGPAPEAAAKGGGGGMDLLKPLTVERKGVKIKGYWNSQADITCVPKDLLQGEEPVRQQNVTTIHGTQEGDVYYVNLKIDGRRINTEVIGTTLDYAIITPGDVPWILKKPLELTIKLDLEEQQGTLLNNSILSKKGKEELKQLFEKYSALWQSWENQVGHRRIRPHKIATGTVKPTPQKQYHINPKAKPDIQIVINDLLKQGVLIQKESTMNTPVYPVPKPNGRWRMVLDYRAVNKVTPLIAVQNQHSYGILGSLFKGRYKTTIDLSNGFWAHPIVPEDYWITAFTWQGKQYCWTVLPQGFLNSPGLFNGDVVDLLQGIPNVEVYVDDVYISHDSEKEHLEYLDILFNRLKEAGYIISLKKSNIANSIVDFLGFQITNEGRGLTDTFKEKLENITAPTTLKQLQSILGLLNFARNFIPDFTELIAPLYALIPKSPKNYVPWQIEHSTTLETLITKLNGAEYLQGRKGDKTLIMKVNASYTTGYIRYYNEGEKKPISYVSIVFSKTELKFTELEKLLTTVHKGLLKALDLSMGQNIHVYSPIVSMQNIQKTPQTAKKALASRWLSWLSYLEDPRIRFFYDPQMPALKDLPAVDTGKDNKKHPSNFQHIFYTDGSAITSPTKEGHLNAGMGIVYFINKDGNLQKQQEWSISLGNHTAQFAEIAAFEFALKKCLPLGGNILVVTDSNYVAKAYNEELDVWASNGFVNNRKKPLKHISKWKSVADLKRLRPDVVVTHEPGHQKLDSSPHAYGNNLADQLATQASFKVHAGKRTADGSEFEKRTADGSEFESPKKKAKVE

SEQ ID NO: 1119 - protein, 2182 aa, synthetic construct
MPAAKRVKLDGGDKKYSIGLDIGTNSVGWAVITDEYKVPSKKFKVLGNTDRHSIKKNLIGALLFDSGETAEATRLKRTARRRYTRRKNRICYLQEIFSNEMAKVDDSFFHRLEESFLVEEDKKHERHPIFGNIVDEVAYHEKYPTIYHLRKKLVDSTDKADLRLIYLALAHMIKFRGHFLIEGDLNPDNSDVDKLFIQLVQTYNQLFEENPINASGVDAKAILSARLSKSRRLENLIAQLPGEKKNGLFGNLIALSLGLTPNFKSNFDLAEDAKLQLSKDTYDDDLDNLLAQIGDQYADLFLAAKNLSDAILLSDILRVNTEITKAPLSASMIKRYDEHHQDLTLLKALVRQQLPEKYKEIFFDQSKNGYAGYIDGGASQEEFYKFIKPILEKMDGTEELLVKLNREDLLRKQRTFDNGSIPHQIHLGELHAILRRQEDFYPFLKDNREKIEKILTFRIPYYVGPLARGNSRFAWMTRKSEETITPWNFEEVVDKGASAQSFIERMTNFDKNLPNEKVLPKHSLLYEYFTVYNELTKVKYVTEGMRKPAFLSGEQKKAIVDLLFKTNRKVTVKQLKEDYFKKIECFDSVEISGVEDRFNASLGTYHDLLKIIKDKDFLDNEENEDILEDIVLTLTLFEDREMIEERLKTYAHLFDDKVMKQLKRRRYTGWGRLSRKLINGIRDKQSGKTILDFLKSDGFANRNFMQLIHDDSLTFKEDIQKAQVSGQGDSLHEHIANLAGSPAIKKGILQTVKVVDELVKVMGRHKPENIVIEMARENQTTQKGQKNSRERMKRIEEGIKELGSQILKEHPVENTQLQNEKLYLYYLQNGRDMYVDQELDINRLSDYDVDHIVPQSFLKDDSIDNKVLTRSDKARGKSDNVPSEEVVKKMKNYWRQLLNAKLITQRKFDNLTKAERGGLSELDKAGFIKRQLVETRQITKHVAQILDSRMNTKYDENDKLIREVKVITLKSKLVSDFRKDFQFYKVREINNYHHAHDAYLNAVVGTALIKKYPKLESEFVYGDYKVYDVRKMIAKSEQEIGKATAKYFFYSNIMNFFKTEITLANGEIRKRPLIETNGETGEIVWDKGRDFATVRKVLSMPQVNIVKKTEVQTGGFSKESILPKRNSDKLIARKKDWDPKKYGGFDSPTVAYSVLVVAKVEKGKSKKLKSVKELLGITIMERSSFEKNPIDFLEAKGYKEVKKDLIIKLPKYSLFELENGRKRMLASAGELQKGNELALPSKYVNFLYLASHYEKLKGSPEDNEQKQLFVEQHKHYLDEIIEQISEFSKRVILADANLDKVLSAYNKHRDKPIREQAENIIHLFTLTNLGAPAAFKYFDTTIDRKRYTSTKEVLDATLIHQSITGLYETRIDLSQLGGDGGGGGGSGGGGSGGGGSGGGGSGGMDLLKPLTVERKGVKIKGYWNSQADITCVPKDLLQGEEPVRQQNVTTIHGTQEGDVYYVNLKIDGRRINTEVIGTTLDYAIITPGDVPWILKKPLELTIKLDLEEQQGTLLNNSILSKKGKEELKQLFEKYSALWQSWENQVGHRRIRPHKIATGTVKPTPQKQYHINPKAKPDIQIVINDLLKQGVLIQKESTMNTPVYPVPKPNGRWRMVLDYRAVNKVTPLIAVQNQHSYGILGSLFKGRYKTTIDLSNGFWAHPIVPEDYWITAFTWQGKQYCWTVLPQGFLNSPGLFNGDVVDLLQGIPNVEVYVDDVYISHDSEKEHLEYLDILFNRLKEAGYIISLKKSNIANSIVDFLGFQITNEGRGLTDTFKEKLENITAPTTLKQLQSILGLLNFARNFIPDFTELIAPLYALIPKSPKNYVPWQIEHSTTLETLITKLNGAEYLQGRKGDKTLIMKVNASYTTGYIRYYNEGEKKPISYVSIVFSKTELKFTELEKLLTTVHKGLLKALDLSMGQNIHVYSPIVSMQNIQKTPQTAKKALASRWLSWLSYLEDPRIRFFYDPQMPALKDLPAVDTGKDNKKHPSNFQHIFYTDGSAITSPTKEGHLNAGMGIVYFINKDGNLQKQQEWSISLGNHTAQFAEIAAFEFALKKCLPLGGNILVVTDSNYVAKAYNEELDVWASNGFVNNRKKPLKHISKWKSVADLKRLRPDVVVTHEPGHQKLDSSPHAYGNNLADQLATQASFKVHAGKRTADGSEFEKRTADGSEFESPKKKAKVE

SEQ ID NO: 1120 - protein, 2171 aa, synthetic construct
MPAAKRVKLDGGDKKYSIGLDIGTNSVGWAVITDEYKVPSKKFKVLGNTDRHSIKKNLIGALLFDSGETAEATRLKRTARRRYTRRKNRICYLQEIFSNEMAKVDDSFFHRLEESFLVEEDKKHERHPIFGNIVDEVAYHEKYPTIYHLRKKLVDSTDKADLRLIYLALAHMIKFRGHFLIEGDLNPDNSDVDKLFIQLVQTYNQLFEENPINASGVDAKAILSARLSKSRRLENLIAQLPGEKKNGLFGNLIALSLGLTPNFKSNFDLAEDAKLQLSKDTYDDDLDNLLAQIGDQYADLFLAAKNLSDAILLSDILRVNTEITKAPLSASMIKRYDEHHQDLTLLKALVRQQLPEKYKEIFFDQSKNGYAGYIDGGASQEEFYKFIKPILEKMDGTEELLVKLNREDLLRKQRTFDNGSIPHQIHLGELHAILRRQEDFYPFLKDNREKIEKILTFRIPYYVGPLARGNSRFAWMTRKSEETITPWNFEEVVDKGASAQSFIERMTNFDKNLPNEKVLPKHSLLYEYFTVYNELTKVKYVTEGMRKPAFLSGEQKKAIVDLLFKTNRKVTVKQLKEDYFKKIECFDSVEISGVEDRFNASLGTYHDLLKIIKDKDFLDNEENEDILEDIVLTLTLFEDREMIEERLKTYAHLFDDKVMKQLKRRRYTGWGRLSRKLINGIRDKQSGKTILDFLKSDGFANRNFMQLIHDDSLTFKEDIQKAQVSGQGDSLHEHIANLAGSPAIKKGILQTVKVVDELVKVMGRHKPENIVIEMARENQTTQKGQKNSRERMKRIEEGIKELGSQILKEHPVENTQLQNEKLYLYYLQNGRDMYVDQELDINRLSDYDVDHIVPQSFLKDDSIDNKVLTRSDKARGKSDNVPSEEVVKKMKNYWRQLLNAKLITQRKFDNLTKAERGGLSELDKAGFIKRQLVETRQITKHVAQILDSRMNTKYDENDKLIREVKVITLKSKLVSDFRKDFQFYKVREINNYHHAHDAYLNAVVGTALIKKYPKLESEFVYGDYKVYDVRKMIAKSEQEIGKATAKYFFYSNIMNFFKTEITLANGEIRKRPLIETNGETGEIVWDKGRDFATVRKVLSMPQVNIVKKTEVQTGGFSKESILPKRNSDKLIARKKDWDPKKYGGFDSPTVAYSVLVVAKVEKGKSKKLKSVKELLGITIMERSSFEKNPIDFLEAKGYKEVKKDLIIKLPKYSLFELENGRKRMLASAGELQKGNELALPSKYVNFLYLASHYEKLKGSPEDNEQKQLFVEQHKHYLDEIIEQISEFSKRVILADANLDKVLSAYNKHRDKPIREQAENIIHLFTLTNLGAPAAFKYFDTTIDRKRYTSTKEVLDATLIHQSITGLYETRIDLSQLGGDGGPAPGGSGSSGGMDLLKPLTVERKGVKIKGYWNSQADITCVPKDLLQGEEPVRQQNVTTIHGTQEGDVYYVNLKIDGRRINTEVIGTTLDYAIITPGDVPWILKKPLELTIKLDLEEQQGTLLNNSILSKKGKEELKQLFEKYSALWQSWENQVGHRRIRPHKIATGTVKPTPQKQYHINPKAKPDIQIVINDLLKQGVLIQKESTMNTPVYPVPKPNGRWRMVLDYRAVNKVTPLIAVQNQHSYGILGSLFKGRYKTTIDLSNGFWAHPIVPEDYWITAFTWQGKQYCWTVLPQGFLNSPGLFNGDVVDLLQGIPNVEVYVDDVYISHDSEKEHLEYLDILFNRLKEAGYIISLKKSNIANSIVDFLGFQITNEGRGLTDTFKEKLENITAPTTLKQLQSILGLLNFARNFIPDFTELIAPLYALIPKSPKNYVPWQIEHSTTLETLITKLNGAEYLQGRKGDKTLIMKVNASYTTGYIRYYNEGEKKPISYVSIVFSKTELKFTELEKLLTTVHKGLLKALDLSMGQNIHVYSPIVSMQNIQKTPQTAKKALASRWLSWLSYLEDPRIRFFYDPQMPALKDLPAVDTGKDNKKHPSNFQHIFYTDGSAITSPTKEGHLNAGMGIVYFINKDGNLQKQQEWSISLGNHTAQFAEIAAFEFALKKCLPLGGNILVVTDSNYVAKAYNEELDVWASNGFVNNRKKPLKHISKWKSVADLKRLRPDVVVTHEPGHQKLDSSPHAYGNNLADQLATQASFKVHAGKRTADGSEFEKRTADGSEFESPKKKAKVE

SEQ ID NO: 1121 - protein, 2173 aa, synthetic construct
MPAAKRVKLDGGDKKYSIGLDIGTNSVGWAVITDEYKVPSKKFKVLGNTDRHSIKKNLIGALLFDSGETAEATRLKRTARRRYTRRKNRICYLQEIFSNEMAKVDDSFFHRLEESFLVEEDKKHERHPIFGNIVDEVAYHEKYPTIYHLRKKLVDSTDKADLRLIYLALAHMIKFRGHFLIEGDLNPDNSDVDKLFIQLVQTYNQLFEENPINASGVDAKAILSARLSKSRRLENLIAQLPGEKKNGLFGNLIALSLGLTPNFKSNFDLAEDAKLQLSKDTYDDDLDNLLAQIGDQYADLFLAAKNLSDAILLSDILRVNTEITKAPLSASMIKRYDEHHQDLTLLKALVRQQLPEKYKEIFFDQSKNGYAGYIDGGASQEEFYKFIKPILEKMDGTEELLVKLNREDLLRKQRTFDNGSIPHQIHLGELHAILRRQEDFYPFLKDNREKIEKILTFRIPYYVGPLARGNSRFAWMTRKSEETITPWNFEEVVDKGASAQSFIERMTNFDKNLPNEKVLPKHSLLYEYFTVYNELTKVKYVTEGMRKPAFLSGEQKKAIVDLLFKTNRKVTVKQLKEDYFKKIECFDSVEISGVEDRFNASLGTYHDLLKIIKDKDFLDNEENEDILEDIVLTLTLFEDREMIEERLKTYAHLFDDKVMKQLKRRRYTGWGRLSRKLINGIRDKQSGKTILDFLKSDGFANRNFMQLIHDDSLTFKEDIQKAQVSGQGDSLHEHIANLAGSPAIKKGILQTVKVVDELVKVMGRHKPENIVIEMARENQTTQKGQKNSRERMKRIEEGIKELGSQILKEHPVENTQLQNEKLYLYYLQNGRDMYVDQELDINRLSDYDVDHIVPQSFLKDDSIDNKVLTRSDKARGKSDNVPSEEVVKKMKNYWRQLLNAKLITQRKFDNLTKAERGGLSELDKAGFIKRQLVETRQITKHVAQILDSRMNTKYDENDKLIREVKVITLKSKLVSDFRKDFQFYKVREINNYHHAHDAYLNAVVGTALIKKYPKLESEFVYGDYKVYDVRKMIAKSEQEIGKATAKYFFYSNIMNFFKTEITLANGEIRKRPLIETNGETGEIVWDKGRDFATVRKVLSMPQVNIVKKTEVQTGGFSKESILPKRNSDKLIARKKDWDPKKYGGFDSPTVAYSVLVVAKVEKGKSKKLKSVKELLGITIMERSSFEKNPIDFLEAKGYKEVKKDLIIKLPKYSLFELENGRKRMLASAGELQKGNELALPSKYVNFLYLASHYEKLKGSPEDNEQKQLFVEQHKHYLDEIIEQISEFSKRVILADANLDKVLSAYNKHRDKPIREQAENIIHLFTLTNLGAPAAFKYFDTTIDRKRYTSTKEVLDATLIHQSITGLYETRIDLSQLGGDGGEAAAKPAPGSSGGMDLLKPLTVERKGVKIKGYWNSQADITCVPKDLLQGEEPVRQQNVTTIHGTQEGDVYYVNLKIDGRRINTEVIGTTLDYAIITPGDVPWILKKPLELTIKLDLEEQQGTLLNNSILSKKGKEELKQLFEKYSALWQSWENQVGHRRIRPHKIATGTVKPTPQKQYHINPKAKPDIQIVINDLLKQGVLIQKESTMNTPVYPVPKPNGRWRMVLDYRAVNKVTPLIAVQNQHSYGILGSLFKGRYKTTIDLSNGFWAHPIVPEDYWITAFTWQGKQYCWTVLPQGFLNSPGLFNGDVVDLLQGIPNVEVYVDDVYISHDSEKEHLEYLDILFNRLKEAGYIISLKKSNIANSIVDFLGFQITNEGRGLTDTFKEKLENITAPTTLKQLQSILGLLNFARNFIPDFTELIAPLYALIPKSPKNYVPWQIEHSTTLETLITKLNGAEYLQGRKGDKTLIMKVNASYTTGYIRYYNEGEKKPISYVSIVFSKTELKFTELEKLLTTVHKGLLKALDLSMGQNIHVYSPIVSMQNIQKTPQTAKKALASRWLSWLSYLEDPRIRFFYDPQMPALKDLPAVDTGKDNKKHPSNFQHIFYTDGSAITSPTKEGHLNAGMGIVYFINKDGNLQKQQEWSISLGNHTAQFAEIAAFEFALKKCLPLGGNILVVTDSNYVAKAYNEELDVWASNGFVNNRKKPLKHISKWKSVADLKRLRPDVVVTHEPGHQKLDSSPHAYGNNLADQLATQASFKVHAGKRTADGSEFEKRTADGSEFESPKKKAKVE

SEQ ID NO: 1122 - protein, 2172 aa, synthetic construct
MPAAKRVKLDGGDKKYSIGLDIGTNSVGWAVITDEYKVPSKKFKVLGNTDRHSIKKNLIGALLFDSGETAEATRLKRTARRRYTRRKNRICYLQEIFSNEMAKVDDSFFHRLEESFLVEEDKKHERHPIFGNIVDEVAYHEKYPTIYHLRKKLVDSTDKADLRLIYLALAHMIKFRGHFLIEGDLNPDNSDVDKLFIQLVQTYNQLFEENPINASGVDAKAILSARLSKSRRLENLIAQLPGEKKNGLFGNLIALSLGLTPNFKSNFDLAEDAKLQLSKDTYDDDLDNLLAQIGDQYADLFLAAKNLSDAILLSDILRVNTEITKAPLSASMIKRYDEHHQDLTLLKALVRQQLPEKYKEIFFDQSKNGYAGYIDGGASQEEFYKFIKPILEKMDGTEELLVKLNREDLLRKQRTFDNGSIPHQIHLGELHAILRRQEDFYPFLKDNREKIEKILTFRIPYYVGPLARGNSRFAWMTRKSEETITPWNFEEVVDKGASAQSFIERMTNFDKNLPNEKVLPKHSLLYEYFTVYNELTKVKYVTEGMRKPAFLSGEQKKAIVDLLFKTNRKVTVKQLKEDYFKKIECFDSVEISGVEDRFNASLGTYHDLLKIIKDKDFLDNEENEDILEDIVLTLTLFEDREMIEERLKTYAHLFDDKVMKQLKRRRYTGWGRLSRKLINGIRDKQSGKTILDFLKSDGFANRNFMQLIHDDSLTFKEDIQKAQVSGQGDSLHEHIANLAGSPAIKKGILQTVKVVDELVKVMGRHKPENIVIEMARENQTTQKGQKNSRERMKRIEEGIKELGSQILKEHPVENTQLQNEKLYLYYLQNGRDMYVDQELDINRLSDYDVDHIVPQSFLKDDSIDNKVLTRSDKARGKSDNVPSEEVVKKMKNYWRQLLNAKLITQRKFDNLTKAERGGLSELDKAGFIKRQLVETRQITKHVAQILDSRMNTKYDENDKLIREVKVITLKSKLVSDFRKDFQFYKVREINNYHHAHDAYLNAVVGTALIKKYPKLESEFVYGDYKVYDVRKMIAKSEQEIGKATAKYFFYSNIMNFFKTEITLANGEIRKRPLIETNGETGEIVWDKGRDFATVRKVLSMPQVNIVKKTEVQTGGFSKESILPKRNSDKLIARKKDWDPKKYGGFDSPTVAYSVLVVAKVEKGKSKKLKSVKELLGITIMERSSFEKNPIDFLEAKGYKEVKKDLIIKLPKYSLFELENGRKRMLASAGELQKGNELALPSKYVNFLYLASHYEKLKGSPEDNEQKQLFVEQHKHYLDEIIEQISEFSKRVILADANLDKVLSAYNKHRDKPIREQAENIIHLFTLTNLGAPAAFKYFDTTIDRKRYTSTKEVLDATLIHQSITGLYETRIDLSQLGGDGGGGGGSGGGGSGGMDLLKPLTVERKGVKIKGYWNSQADITCVPKDLLQGEEPVRQQNVTTIHGTQEGDVYYVNLKIDGRRINTEVIGTTLDYAIITPGDVPWILKKPLELTIKLDLEEQQGTLLNNSILSKKGKEELKQLFEKYSALWQSWENQVGHRRIRPHKIATGTVKPTPQKQYHINPKAKPDIQIVINDLLKQGVLIQKESTMNTPVYPVPKPNGRWRMVLDYRAVNKVTPLIAVQNQHSYGILGSLFKGRYKTTIDLSNGFWAHPIVPEDYWITAFTWQGKQYCWTVLPQGFLNSPGLFNGDVVDLLQGIPNVEVYVDDVYISHDSEKEHLEYLDILFNRLKEAGYIISLKKSNIANSIVDFLGFQITNEGRGLTDTFKEKLENITAPTTLKQLQSILGLLNFARNFIPDFTELIAPLYALIPKSPKNYVPWQIEHSTTLETLITKLNGAEYLQGRKGDKTLIMKVNASYTTGYIRYYNEGEKKPISYVSIVFSKTELKFTELEKLLTTVHKGLLKALDLSMGQNIHVYSPIVSMQNIQKTPQTAKKALASRWLSWLSYLEDPRIRFFYDPQMPALKDLPAVDTGKDNKKHPSNFQHIFYTDGSAITSPTKEGHLNAGMGIVYFINKDGNLQKQQEWSISLGNHTAQFAEIAAFEFALKKCLPLGGNILVVTDSNYVAKAYNEELDVWASNGFVNNRKKPLKHISKWKSVADLKRLRPDVVVTHEPGHQKLDSSPHAYGNNLADQLATQASFKVHAGKRTADGSEFEKRTADGSEFESPKKKAKVE

SEQ ID NO: 1123 - protein, 2173 aa, synthetic construct
MPAAKRVKLDGGDKKYSIGLDIGTNSVGWAVITDEYKVPSKKFKVLGNTDRHSIKKNLIGALLFDSGETAEATRLKRTARRRYTRRKNRICYLQEIFSNEMAKVDDSFFHRLEESFLVEEDKKHERHPIFGNIVDEVAYHEKYPTIYHLRKKLVDSTDKADLRLIYLALAHMIKFRGHFLIEGDLNPDNSDVDKLFIQLVQTYNQLFEENPINASGVDAKAILSARLSKSRRLENLIAQLPGEKKNGLFGNLIALSLGLTPNFKSNFDLAEDAKLQLSKDTYDDDLDNLLAQIGDQYADLFLAAKNLSDAILLSDILRVNTEITKAPLSASMIKRYDEHHQDLTLLKALVRQQLPEKYKEIFFDQSKNGYAGYIDGGASQEEFYKFIKPILEKMDGTEELLVKLNREDLLRKQRTFDNGSIPHQIHLGELHAILRRQEDFYPFLKDNREKIEKILTFRIPYYVGPLARGNSRFAWMTRKSEETITPWNFEEVVDKGASAQSFIERMTNFDKNLPNEKVLPKHSLLYEYFTVYNELTKVKYVTEGMRKPAFLSGEQKKAIVDLLFKTNRKVTVKQLKEDYFKKIECFDSVEISGVEDRFNASLGTYHDLLKIIKDKDFLDNEENEDILEDIVLTLTLFEDREMIEERLKTYAHLFDDKVMKQLKRRRYTGWGRLSRKLINGIRDKQSGKTILDFLKSDGFANRNFMQLIHDDSLTFKEDIQKAQVSGQGDSLHEHIANLAGSPAIKKGILQTVKVVDELVKVMGRHKPENIVIEMARENQTTQKGQKNSRERMKRIEEGIKELGSQILKEHPVENTQLQNEKLYLYYLQNGRDMYVDQELDINRLSDYDVDHIVPQSFLKDDSIDNKVLTRSDKARGKSDNVPSEEVVKKMKNYWRQLLNAKLITQRKFDNLTKAERGGLSELDKAGFIKRQLVETRQITKHVAQILDSRMNTKYDENDKLIREVKVITLKSKLVSDFRKDFQFYKVREINNYHHAHDAYLNAVVGTALIKKYPKLESEFVYGDYKVYDVRKMIAKSEQEIGKATAKYFFYSNIMNFFKTEITLANGEIRKRPLIETNGETGEIVWDKGRDFATVRKVLSMPQVNIVKKTEVQTGGFSKESILPKRNSDKLIARKKDWDPKKYGGFDSPTVAYSVLVVAKVEKGKSKKLKSVKELLGITIMERSSFEKNPIDFLEAKGYKEVKKDLIIKLPKYSLFELENGRKRMLASAGELQKGNELALPSKYVNFLYLASHYEKLKGSPEDNEQKQLFVEQHKHYLDEIIEQISEFSKRVILADANLDKVLSAYNKHRDKPIREQAENIIHLFTLTNLGAPAAFKYFDTTIDRKRYTSTKEVLDATLIHQSITGLYETRIDLSQLGGDGGGGSEAAAKPAPGGMDLLKPLTVERKGVKIKGYWNSQADITCVPKDLLQGEEPVRQQNVTTIHGTQEGDVYYVNLKIDGRRINTEVIGTTLDYAIITPGDVPWILKKPLELTIKLDLEEQQGTLLNNSILSKKGKEELKQLFEKYSALWQSWENQVGHRRIRPHKIATGTVKPTPQKQYHINPKAKPDIQIVINDLLKQGVLIQKESTMNTPVYPVPKPNGRWRMVLDYRAVNKVTPLIAVQNQHSYGILGSLFKGRYKTTIDLSNGFWAHPIVPEDYWITAFTWQGKQYCWTVLPQGFLNSPGLFNGDVVDLLQGIPNVEVYVDDVYISHDSEKEHLEYLDILFNRLKEAGYIISLKKSNIANSIVDFLGFQITNEGRGLTDTFKEKLENITAPTTLKQLQSILGLLNFARNFIPDFTELIAPLYALIPKSPKNYVPWQIEHSTTLETLITKLNGAEYLQGRKGDKTLIMKVNASYTTGYIRYYNEGEKKPISYVSIVFSKTELKFTELEKLLTTVHKGLLKALDLSMGQNIHVYSPIVSMQNIQKTPQTAKKALASRWLSWLSYLEDPRIRFFYDPQMPALKDLPAVDTGKDNKKHPSNFQHIFYTDGSAITSPTKEGHLNAGMGIVYFINKDGNLQKQQEWSISLGNHTAQFAEIAAFEFALKKCLPLGGNILVVTDSNYVAKAYNEELDVWASNGFVNNRKKPLKHISKWKSVADLKRLRPDVVVTHEPGHQKLDSSPHAYGNNLADQLATQASFKVHAGKRTADGSEFEKRTADGSEFESPKKKAKVE

SEQ ID NO: 1124 - protein, 2171 aa, synthetic construct
MPAAKRVKLDGGDKKYSIGLDIGTNSVGWAVITDEYKVPSKKFKVLGNTDRHSIKKNLIGALLFDSGETAEATRLKRTARRRYTRRKNRICYLQEIFSNEMAKVDDSFFHRLEESFLVEEDKKHERHPIFGNIVDEVAYHEKYPTIYHLRKKLVDSTDKADLRLIYLALAHMIKFRGHFLIEGDLNPDNSDVDKLFIQLVQTYNQLFEENPINASGVDAKAILSARLSKSRRLENLIAQLPGEKKNGLFGNLIALSLGLTPNFKSNFDLAEDAKLQLSKDTYDDDLDNLLAQIGDQYADLFLAAKNLSDAILLSDILRVNTEITKAPLSASMIKRYDEHHQDLTLLKALVRQQLPEKYKEIFFDQSKNGYAGYIDGGASQEEFYKFIKPILEKMDGTEELLVKLNREDLLRKQRTFDNGSIPHQIHLGELHAILRRQEDFYPFLKDNREKIEKILTFRIPYYVGPLARGNSRFAWMTRKSEETITPWNFEEVVDKGASAQSFIERMTNFDKNLPNEKVLPKHSLLYEYFTVYNELTKVKYVTEGMRKPAFLSGEQKKAIVDLLFKTNRKVTVKQLKEDYFKKIECFDSVEISGVEDRFNASLGTYHDLLKIIKDKDFLDNEENEDILEDIVLTLTLFEDREMIEERLKTYAHLFDDKVMKQLKRRRYTGWGRLSRKLINGIRDKQSGKTILDFLKSDGFANRNFMQLIHDDSLTFKEDIQKAQVSGQGDSLHEHIANLAGSPAIKKGILQTVKVVDELVKVMGRHKPENIVIEMARENQTTQKGQKNSRERMKRIEEGIKELGSQILKEHPVENTQLQNEKLYLYYLQNGRDMYVDQELDINRLSDYDVDHIVPQSFLKDDSIDNKVLTRSDKARGKSDNVPSEEVVKKMKNYWRQLLNAKLITQRKFDNLTKAERGGLSELDKAGFIKRQLVETRQITKHVAQILDSRMNTKYDENDKLIREVKVITLKSKLVSDFRKDFQFYKVREINNYHHAHDAYLNAVVGTALIKKYPKLESEFVYGDYKVYDVRKMIAKSEQEIGKATAKYFFYSNIMNFFKTEITLANGEIRKRPLIETNGETGEIVWDKGRDFATVRKVLSMPQVNIVKKTEVQTGGFSKESILPKRNSDKLIARKKDWDPKKYGGFDSPTVAYSVLVVAKVEKGKSKKLKSVKELLGITIMERSSFEKNPIDFLEAKGYKEVKKDLIIKLPKYSLFELENGRKRMLASAGELQKGNELALPSKYVNFLYLASHYEKLKGSPEDNEQKQLFVEQHKHYLDEIIEQISEFSKRVILADANLDKVLSAYNKHRDKPIREQAENIIHLFTLTNLGAPAAFKYFDTTIDRKRYTSTKEVLDATLIHQSITGLYETRIDLSQLGGDGGGGGGSSPAPGGMDLLKPLTVERKGVKIKGYWNSQADITCVPKDLLQGEEPVRQQNVTTIHGTQEGDVYYVNLKIDGRRINTEVIGTTLDYAIITPGDVPWILKKPLELTIKLDLEEQQGTLLNNSILSKKGKEELKQLFEKYSALWQSWENQVGHRRIRPHKIATGTVKPTPQKQYHINPKAKPDIQIVINDLLKQGVLIQKESTMNTPVYPVPKPNGRWRMVLDYRAVNKVTPLIAVQNQHSYGILGSLFKGRYKTTIDLSNGFWAHPIVPEDYWITAFTWQGKQYCWTVLPQGFLNSPGLFNGDVVDLLQGIPNVEVYVDDVYISHDSEKEHLEYLDILFNRLKEAGYIISLKKSNIANSIVDFLGFQITNEGRGLTDTFKEKLENITAPTTLKQLQSILGLLNFARNFIPDFTELIAPLYALIPKSPKNYVPWQIEHSTTLETLITKLNGAEYLQGRKGDKTLIMKVNASYTTGYIRYYNEGEKKPISYVSIVFSKTELKFTELEKLLTTVHKGLLKALDLSMGQNIHVYSPIVSMQNIQKTPQTAKKALASRWLSWLSYLEDPRIRFFYDPQMPALKDLPAVDTGKDNKKHPSNFQHIFYTDGSAITSPTKEGHLNAGMGIVYFINKDGNLQKQQEWSISLGNHTAQFAEIAAFEFALKKCLPLGGNILVVTDSNYVAKAYNEELDVWASNGFVNNRKKPLKHISKWKSVADLKRLRPDVVVTHEPGHQKLDSSPHAYGNNLADQLATQASFKVHAGKRTADGSEFEKRTADGSEFESPKKKAKVE

SEQ ID NO: 1125 - protein, 2177 aa, synthetic construct
MPAAKRVKLDGGDKKYSIGLDIGTNSVGWAVITDEYKVPSKKFKVLGNTDRHSIKKNLIGALLFDSGETAEATRLKRTARRRYTRRKNRICYLQEIFSNEMAKVDDSFFHRLEESFLVEEDKKHERHPIFGNIVDEVAYHEKYPTIYHLRKKLVDSTDKADLRLIYLALAHMIKFRGHFLIEGDLNPDNSDVDKLFIQLVQTYNQLFEENPINASGVDAKAILSARLSKSRRLENLIAQLPGEKKNGLFGNLIALSLGLTPNFKSNFDLAEDAKLQLSKDTYDDDLDNLLAQIGDQYADLFLAAKNLSDAILLSDILRVNTEITKAPLSASMIKRYDEHHQDLTLLKALVRQQLPEKYKEIFFDQSKNGYAGYIDGGASQEEFYKFIKPILEKMDGTEELLVKLNREDLLRKQRTFDNGSIPHQIHLGELHAILRRQEDFYPFLKDNREKIEKILTFRIPYYVGPLARGNSRFAWMTRKSEETITPWNFEEVVDKGASAQSFIERMTNFDKNLPNEKVLPKHSLLYEYFTVYNELTKVKYVTEGMRKPAFLSGEQKKAIVDLLFKTNRKVTVKQLKEDYFKKIECFDSVEISGVEDRFNASLGTYHDLLKIIKDKDFLDNEENEDILEDIVLTLTLFEDREMIEERLKTYAHLFDDKVMKQLKRRRYTGWGRLSRKLINGIRDKQSGKTILDFLKSDGFANRNFMQLIHDDSLTFKEDIQKAQVSGQGDSLHEHIANLAGSPAIKKGILQTVKVVDELVKVMGRHKPENIVIEMARENQTTQKGQKNSRERMKRIEEGIKELGSQILKEHPVENTQLQNEKLYLYYLQNGRDMYVDQELDINRLSDYDVDHIVPQSFLKDDSIDNKVLTRSDKARGKSDNVPSEEVVKKMKNYWRQLLNAKLITQRKFDNLTKAERGGLSELDKAGFIKRQLVETRQITKHVAQILDSRMNTKYDENDKLIREVKVITLKSKLVSDFRKDFQFYKVREINNYHHAHDAYLNAVVGTALIKKYPKLESEFVYGDYKVYDVRKMIAKSEQEIGKATAKYFFYSNIMNFFKTEITLANGEIRKRPLIETNGETGEIVWDKGRDFATVRKVLSMPQVNIVKKTEVQTGGFSKESILPKRNSDKLIARKKDWDPKKYGGFDSPTVAYSVLVVAKVEKGKSKKLKSVKELLGITIMERSSFEKNPIDFLEAKGYKEVKKDLIIKLPKYSLFELENGRKRMLASAGELQKGNELALPSKYVNFLYLASHYEKLKGSPEDNEQKQLFVEQHKHYLDEIIEQISEFSKRVILADANLDKVLSAYNKHRDKPIREQAENIIHLFTLTNLGAPAAFKYFDTTIDRKRYTSTKEVLDATLIHQSITGLYETRIDLSQLGGDGGGGGGSGGGGSGGGGSGGMDLLKPLTVERKGVKIKGYWNSQADITCVPKDLLQGEEPVRQQNVTTIHGTQEGDVYYVNLKIDGRRINTEVIGTTLDYAIITPGDVPWILKKPLELTIKLDLEEQQGTLLNNSILSKKGKEELKQLFEKYSALWQSWENQVGHRRIRPHKIATGTVKPTPQKQYHINPKAKPDIQIVINDLLKQGVLIQKESTMNTPVYPVPKPNGRWRMVLDYRAVNKVTPLIAVQNQHSYGILGSLFKGRYKTTIDLSNGFWAHPIVPEDYWITAFTWQGKQYCWTVLPQGFLNSPGLFNGDVVDLLQGIPNVEVYVDDVYISHDSEKEHLEYLDILFNRLKEAGYIISLKKSNIANSIVDFLGFQITNEGRGLTDTFKEKLENITAPTTLKQLQSILGLLNFARNFIPDFTELIAPLYALIPKSPKNYVPWQIEHSTTLETLITKLNGAEYLQGRKGDKTLIMKVNASYTTGYIRYYNEGEKKPISYVSIVFSKTELKFTELEKLLTTVHKGLLKALDLSMGQNIHVYSPIVSMQNIQKTPQTAKKALASRWLSWLSYLEDPRIRFFYDPQMPALKDLPAVDTGKDNKKHPSNFQHIFYTDGSAITSPTKEGHLNAGMGIVYFINKDGNLQKQQEWSISLGNHTAQFAEIAAFEFALKKCLPLGGNILVVTDSNYVAKAYNEELDVWASNGFVNNRKKPLKHISKWKSVADLKRLRPDVVVTHEPGHQKLDSSPHAYGNNLADQLATQASFKVHAGKRTADGSEFEKRTADGSEFESPKKKAKVE

SEQ ID NO: 1126 - protein, 2177 aa, synthetic construct
MPAAKRVKLDGGDKKYSIGLDIGTNSVGWAVITDEYKVPSKKFKVLGNTDRHSIKKNLIGALLFDSGETAEATRLKRTARRRYTRRKNRICYLQEIFSNEMAKVDDSFFHRLEESFLVEEDKKHERHPIFGNIVDEVAYHEKYPTIYHLRKKLVDSTDKADLRLIYLALAHMIKFRGHFLIEGDLNPDNSDVDKLFIQLVQTYNQLFEENPINASGVDAKAILSARLSKSRRLENLIAQLPGEKKNGLFGNLIALSLGLTPNFKSNFDLAEDAKLQLSKDTYDDDLDNLLAQIGDQYADLFLAAKNLSDAILLSDILRVNTEITKAPLSASMIKRYDEHHQDLTLLKALVRQQLPEKYKEIFFDQSKNGYAGYIDGGASQEEFYKFIKPILEKMDGTEELLVKLNREDLLRKQRTFDNGSIPHQIHLGELHAILRRQEDFYPFLKDNREKIEKILTFRIPYYVGPLARGNSRFAWMTRKSEETITPWNFEEVVDKGASAQSFIERMTNFDKNLPNEKVLPKHSLLYEYFTVYNELTKVKYVTEGMRKPAFLSGEQKKAIVDLLFKTNRKVTVKQLKEDYFKKIECFDSVEISGVEDRFNASLGTYHDLLKIIKDKDFLDNEENEDILEDIVLTLTLFEDREMIEERLKTYAHLFDDKVMKQLKRRRYTGWGRLSRKLINGIRDKQSGKTILDFLKSDGFANRNFMQLIHDDSLTFKEDIQKAQVSGQGDSLHEHIANLAGSPAIKKGILQTVKVVDELVKVMGRHKPENIVIEMARENQTTQKGQKNSRERMKRIEEGIKELGSQILKEHPVENTQLQNEKLYLYYLQNGRDMYVDQELDINRLSDYDVDHIVPQSFLKDDSIDNKVLTRSDKARGKSDNVPSEEVVKKMKNYWRQLLNAKLITQRKFDNLTKAERGGLSELDKAGFIKRQLVETRQITKHVAQILDSRMNTKYDENDKLIREVKVITLKSKLVSDFRKDFQFYKVREINNYHHAHDAYLNAVVGTALIKKYPKLESEFVYGDYKVYDVRKMIAKSEQEIGKATAKYFFYSNIMNFFKTEITLANGEIRKRPLIETNGETGEIVWDKGRDFATVRKVLSMPQVNIVKKTEVQTGGFSKESILPKRNSDKLIARKKDWDPKKYGGFDSPTVAYSVLVVAKVEKGKSKKLKSVKELLGITIMERSSFEKNPIDFLEAKGYKEVKKDLIIKLPKYSLFELENGRKRMLASAGELQKGNELALPSKYVNFLYLASHYEKLKGSPEDNEQKQLFVEQHKHYLDEIIEQISEFSKRVILADANLDKVLSAYNKHRDKPIREQAENIIHLFTLTNLGAPAAFKYFDTTIDRKRYTSTKEVLDATLIHQSITGLYETRIDLSQLGGDGGEAAAKEAAAKEAAAKGGMDLLKPLTVERKGVKIKGYWNSQADITCVPKDLLQGEEPVRQQNVTTIHGTQEGDVYYVNLKIDGRRINTEVIGTTLDYAIITPGDVPWILKKPLELTIKLDLEEQQGTLLNNSILSKKGKEELKQLFEKYSALWQSWENQVGHRRIRPHKIATGTVKPTPQKQYHINPKAKPDIQIVINDLLKQGVLIQKESTMNTPVYPVPKPNGRWRMVLDYRAVNKVTPLIAVQNQHSYGILGSLFKGRYKTTIDLSNGFWAHPIVPEDYWITAFTWQGKQYCWTVLPQGFLNSPGLFNGDVVDLLQGIPNVEVYVDDVYISHDSEKEHLEYLDILFNRLKEAGYIISLKKSNIANSIVDFLGFQITNEGRGLTDTFKEKLENITAPTTLKQLQSILGLLNFARNFIPDFTELIAPLYALIPKSPKNYVPWQIEHSTTLETLITKLNGAEYLQGRKGDKTLIMKVNASYTTGYIRYYNEGEKKPISYVSIVFSKTELKFTELEKLLTTVHKGLLKALDLSMGQNIHVYSPIVSMQNIQKTPQTAKKALASRWLSWLSYLEDPRIRFFYDPQMPALKDLPAVDTGKDNKKHPSNFQHIFYTDGSAITSPTKEGHLNAGMGIVYFINKDGNLQKQQEWSISLGNHTAQFAEIAAFEFALKKCLPLGGNILVVTDSNYVAKAYNEELDVWASNGFVNNRKKPLKHISKWKSVADLKRLRPDVVVTHEPGHQKLDSSPHAYGNNLADQLATQASFKVHAGKRTADGSEFEKRTADGSEFESPKKKAKVE

SEQ ID NO: 1127 - protein, 2173 aa, synthetic construct
MPAAKRVKLDGGDKKYSIGLDIGTNSVGWAVITDEYKVPSKKFKVLGNTDRHSIKKNLIGALLFDSGETAEATRLKRTARRRYTRRKNRICYLQEIFSNEMAKVDDSFFHRLEESFLVEEDKKHERHPIFGNIVDEVAYHEKYPTIYHLRKKLVDSTDKADLRLIYLALAHMIKFRGHFLIEGDLNPDNSDVDKLFIQLVQTYNQLFEENPINASGVDAKAILSARLSKSRRLENLIAQLPGEKKNGLFGNLIALSLGLTPNFKSNFDLAEDAKLQLSKDTYDDDLDNLLAQIGDQYADLFLAAKNLSDAILLSDILRVNTEITKAPLSASMIKRYDEHHQDLTLLKALVRQQLPEKYKEIFFDQSKNGYAGYIDGGASQEEFYKFIKPILEKMDGTEELLVKLNREDLLRKQRTFDNGSIPHQIHLGELHAILRRQEDFYPFLKDNREKIEKILTFRIPYYVGPLARGNSRFAWMTRKSEETITPWNFEEVVDKGASAQSFIERMTNFDKNLPNEKVLPKHSLLYEYFTVYNELTKVKYVTEGMRKPAFLSGEQKKAIVDLLFKTNRKVTVKQLKEDYFKKIECFDSVEISGVEDRFNASLGTYHDLLKIIKDKDFLDNEENEDILEDIVLTLTLFEDREMIEERLKTYAHLFDDKVMKQLKRRRYTGWGRLSRKLINGIRDKQSGKTILDFLKSDGFANRNFMQLIHDDSLTFKEDIQKAQVSGQGDSLHEHIANLAGSPAIKKGILQTVKVVDELVKVMGRHKPENIVIEMARENQTTQKGQKNSRERMKRIEEGIKELGSQILKEHPVENTQLQNEKLYLYYLQNGRDMYVDQELDINRLSDYDVDHIVPQSFLKDDSIDNKVLTRSDKARGKSDNVPSEEVVKKMKNYWRQLLNAKLITQRKFDNLTKAERGGLSELDKAGFIKRQLVETRQITKHVAQILDSRMNTKYDENDKLIREVKVITLKSKLVSDFRKDFQFYKVREINNYHHAHDAYLNAVVGTALIKKYPKLESEFVYGDYKVYDVRKMIAKSEQEIGKATAKYFFYSNIMNFFKTEITLANGEIRKRPLIETNGETGEIVWDKGRDFATVRKVLSMPQVNIVKKTEVQTGGFSKESILPKRNSDKLIARKKDWDPKKYGGFDSPTVAYSVLVVAKVEKGKSKKLKSVKELLGITIMERSSFEKNPIDFLEAKGYKEVKKDLIIKLPKYSLFELENGRKRMLASAGELQKGNELALPSKYVNFLYLASHYEKLKGSPEDNEQKQLFVEQHKHYLDEIIEQISEFSKRVILADANLDKVLSAYNKHRDKPIREQAENIIHLFTLTNLGAPAAFKYFDTTIDRKRYTSTKEVLDATLIHQSITGLYETRIDLSQLGGDGGEAAAKGSSGGSGGMDLLKPLTVERKGVKIKGYWNSQADITCVPKDLLQGEEPVRQQNVTTIHGTQEGDVYYVNLKIDGRRINTEVIGTTLDYAIITPGDVPWILKKPLELTIKLDLEEQQGTLLNNSILSKKGKEELKQLFEKYSALWQSWENQVGHRRIRPHKIATGTVKPTPQKQYHINPKAKPDIQIVINDLLKQGVLIQKESTMNTPVYPVPKPNGRWRMVLDYRAVNKVTPLIAVQNQHSYGILGSLFKGRYKTTIDLSNGFWAHPIVPEDYWITAFTWQGKQYCWTVLPQGFLNSPGLFNGDVVDLLQGIPNVEVYVDDVYISHDSEKEHLEYLDILFNRLKEAGYIISLKKSNIANSIVDFLGFQITNEGRGLTDTFKEKLENITAPTTLKQLQSILGLLNFARNFIPDFTELIAPLYALIPKSPKNYVPWQIEHSTTLETLITKLNGAEYLQGRKGDKTLIMKVNASYTTGYIRYYNEGEKKPISYVSIVFSKTELKFTELEKLLTTVHKGLLKALDLSMGQNIHVYSPIVSMQNIQKTPQTAKKALASRWLSWLSYLEDPRIRFFYDPQMPALKDLPAVDTGKDNKKHPSNFQHIFYTDGSAITSPTKEGHLNAGMGIVYFINKDGNLQKQQEWSISLGNHTAQFAEIAAFEFALKKCLPLGGNILVVTDSNYVAKAYNEELDVWASNGFVNNRKKPLKHISKWKSVADLKRLRPDVVVTHEPGHQKLDSSPHAYGNNLADQLATQASFKVHAGKRTADGSEFEKRTADGSEFESPKKKAKVE

SEQ ID NO: 1128 - protein, 2171 aa, synthetic construct
MPAAKRVKLDGGDKKYSIGLDIGTNSVGWAVITDEYKVPSKKFKVLGNTDRHSIKKNLIGALLFDSGETAEATRLKRTARRRYTRRKNRICYLQEIFSNEMAKVDDSFFHRLEESFLVEEDKKHERHPIFGNIVDEVAYHEKYPTIYHLRKKLVDSTDKADLRLIYLALAHMIKFRGHFLIEGDLNPDNSDVDKLFIQLVQTYNQLFEENPINASGVDAKAILSARLSKSRRLENLIAQLPGEKKNGLFGNLIALSLGLTPNFKSNFDLAEDAKLQLSKDTYDDDLDNLLAQIGDQYADLFLAAKNLSDAILLSDILRVNTEITKAPLSASMIKRYDEHHQDLTLLKALVRQQLPEKYKEIFFDQSKNGYAGYIDGGASQEEFYKFIKPILEKMDGTEELLVKLNREDLLRKQRTFDNGSIPHQIHLGELHAILRRQEDFYPFLKDNREKIEKILTFRIPYYVGPLARGNSRFAWMTRKSEETITPWNFEEVVDKGASAQSFIERMTNFDKNLPNEKVLPKHSLLYEYFTVYNELTKVKYVTEGMRKPAFLSGEQKKAIVDLLFKTNRKVTVKQLKEDYFKKIECFDSVEISGVEDRFNASLGTYHDLLKIIKDKDFLDNEENEDILEDIVLTLTLFEDREMIEERLKTYAHLFDDKVMKQLKRRRYTGWGRLSRKLINGIRDKQSGKTILDFLKSDGFANRNFMQLIHDDSLTFKEDIQKAQVSGQGDSLHEHIANLAGSPAIKKGILQTVKVVDELVKVMGRHKPENIVIEMARENQTTQKGQKNSRERMKRIEEGIKELGSQILKEHPVENTQLQNEKLYLYYLQNGRDMYVDQELDINRLSDYDVDHIVPQSFLKDDSIDNKVLTRSDKARGKSDNVPSEEVVKKMKNYWRQLLNAKLITQRKFDNLTKAERGGLSELDKAGFIKRQLVETRQITKHVAQILDSRMNTKYDENDKLIREVKVITLKSKLVSDFRKDFQFYKVREINNYHHAHDAYLNAVVGTALIKKYPKLESEFVYGDYKVYDVRKMIAKSEQEIGKATAKYFFYSNIMNFFKTEITLANGEIRKRPLIETNGETGEIVWDKGRDFATVRKVLSMPQVNIVKKTEVQTGGFSKESILPKRNSDKLIARKKDWDPKKYGGFDSPTVAYSVLVVAKVEKGKSKKLKSVKELLGITIMERSSFEKNPIDFLEAKGYKEVKKDLIIKLPKYSLFELENGRKRMLASAGELQKGNELALPSKYVNFLYLASHYEKLKGSPEDNEQKQLFVEQHKHYLDEIIEQISEFSKRVILADANLDKVLSAYNKHRDKPIREQAENIIHLFTLTNLGAPAAFKYFDTTIDRKRYTSTKEVLDATLIHQSITGLYETRIDLSQLGGDGGGGSGGGPAPGGMDLLKPLTVERKGVKIKGYWNSQADITCVPKDLLQGEEPVRQQNVTTIHGTQEGDVYYVNLKIDGRRINTEVIGTTLDYAIITPGDVPWILKKPLELTIKLDLEEQQGTLLNNSILSKKGKEELKQLFEKYSALWQSWENQVGHRRIRPHKIATGTVKPTPQKQYHINPKAKPDIQIVINDLLKQGVLIQKESTMNTPVYPVPKPNGRWRMVLDYRAVNKVTPLIAVQNQHSYGILGSLFKGRYKTTIDLSNGFWAHPIVPEDYWITAFTWQGKQYCWTVLPQGFLNSPGLFNGDVVDLLQGIPNVEVYVDDVYISHDSEKEHLEYLDILFNRLKEAGYIISLKKSNIANSIVDFLGFQITNEGRGLTDTFKEKLENITAPTTLKQLQSILGLLNFARNFIPDFTELIAPLYALIPKSPKNYVPWQIEHSTTLETLITKLNGAEYLQGRKGDKTLIMKVNASYTTGYIRYYNEGEKKPISYVSIVFSKTELKFTELEKLLTTVHKGLLKALDLSMGQNIHVYSPIVSMQNIQKTPQTAKKALASRWLSWLSYLEDPRIRFFYDPQMPALKDLPAVDTGKDNKKHPSNFQHIFYTDGSAITSPTKEGHLNAGMGIVYFINKDGNLQKQQEWSISLGNHTAQFAEIAAFEFALKKCLPLGGNILVVTDSNYVAKAYNEELDVWASNGFVNNRKKPLKHISKWKSVADLKRLRPDVVVTHEPGHQKLDSSPHAYGNNLADQLATQASFKVHAGKRTADGSEFEKRTADGSEFESPKKKAKVE

SEQ ID NO: 1129 - protein, 2208 aa, synthetic construct
MPAAKRVKLDGGDKKYSIGLDIGTNSVGWAVITDEYKVPSKKFKVLGNTDRHSIKKNLIGALLFDSGETAEATRLKRTARRRYTRRKNRICYLQEIFSNEMAKVDDSFFHRLEESFLVEEDKKHERHPIFGNIVDEVAYHEKYPTIYHLRKKLVDSTDKADLRLIYLALAHMIKFRGHFLIEGDLNPDNSDVDKLFIQLVQTYNQLFEENPINASGVDAKAILSARLSKSRRLENLIAQLPGEKKNGLFGNLIALSLGLTPNFKSNFDLAEDAKLQLSKDTYDDDLDNLLAQIGDQYADLFLAAKNLSDAILLSDILRVNTEITKAPLSASMIKRYDEHHQDLTLLKALVRQQLPEKYKEIFFDQSKNGYAGYIDGGASQEEFYKFIKPILEKMDGTEELLVKLNREDLLRKQRTFDNGSIPHQIHLGELHAILRRQEDFYPFLKDNREKIEKILTFRIPYYVGPLARGNSRFAWMTRKSEETITPWNFEEVVDKGASAQSFIERMTNFDKNLPNEKVLPKHSLLYEYFTVYNELTKVKYVTEGMRKPAFLSGEQKKAIVDLLFKTNRKVTVKQLKEDYFKKIECFDSVEISGVEDRFNASLGTYHDLLKIIKDKDFLDNEENEDILEDIVLTLTLFEDREMIEERLKTYAHLFDDKVMKQLKRRRYTGWGRLSRKLINGIRDKQSGKTILDFLKSDGFANRNFMQLIHDDSLTFKEDIQKAQVSGQGDSLHEHIANLAGSPAIKKGILQTVKVVDELVKVMGRHKPENIVIEMARENQTTQKGQKNSRERMKRIEEGIKELGSQILKEHPVENTQLQNEKLYLYYLQNGRDMYVDQELDINRLSDYDVDHIVPQSFLKDDSIDNKVLTRSDKARGKSDNVPSEEVVKKMKNYWRQLLNAKLITQRKFDNLTKAERGGLSELDKAGFIKRQLVETRQITKHVAQILDSRMNTKYDENDKLIREVKVITLKSKLVSDFRKDFQFYKVREINNYHHAHDAYLNAVVGTALIKKYPKLESEFVYGDYKVYDVRKMIAKSEQEIGKATAKYFFYSNIMNFFKTEITLANGEIRKRPLIETNGETGEIVWDKGRDFATVRKVLSMPQVNIVKKTEVQTGGFSKESILPKRNSDKLIARKKDWDPKKYGGFDSPTVAYSVLVVAKVEKGKSKKLKSVKELLGITIMERSSFEKNPIDFLEAKGYKEVKKDLIIKLPKYSLFELENGRKRMLASAGELQKGNELALPSKYVNFLYLASHYEKLKGSPEDNEQKQLFVEQHKHYLDEIIEQISEFSKRVILADANLDKVLSAYNKHRDKPIREQAENIIHLFTLTNLGAPAAFKYFDTTIDRKRYTSTKEVLDATLIHQSITGLYETRIDLSQLGGDGGAEAAAKEAAAKEAAAKEAAAKALEAEAAAKEAAAKEAAAKEAAAKAGGMDLLKPLTVERKGVKIKGYWNSQADITCVPKDLLQGEEPVRQQNVTTIHGTQEGDVYYVNLKIDGRRINTEVIGTTLDYAIITPGDVPWILKKPLELTIKLDLEEQQGTLLNNSILSKKGKEELKQLFEKYSALWQSWENQVGHRRIRPHKIATGTVKPTPQKQYHINPKAKPDIQIVINDLLKQGVLIQKESTMNTPVYPVPKPNGRWRMVLDYRAVNKVTPLIAVQNQHSYGILGSLFKGRYKTTIDLSNGFWAHPIVPEDYWITAFTWQGKQYCWTVLPQGFLNSPGLFNGDVVDLLQGIPNVEVYVDDVYISHDSEKEHLEYLDILFNRLKEAGYIISLKKSNIANSIVDFLGFQITNEGRGLTDTFKEKLENITAPTTLKQLQSILGKLNFARNFIPDFTELIAPLYALIPKSPKNYVPWQIEHSTTLETLITKLNGAEYLQGRKGDKTLIMKVNASYTTGYIRYYNEGEKKPISYVSIVFSKTELKFTELEKLLTTVHKGLLKALDLSMGQNIHVYSPIVSMQNIQKTPQTAKKALASRWLSWLSYLEDPRIRFFYDPQMPALKDLPAVDTGKDNKKHPSNFQHIFYTDGSAITSPTKEGHLNAGMGIVYFINKDGNLQKQQEWSISLGNHTAQFAEIAAFEFALKKCLPLGGNILVVTDSNYVAKAYNEELDVWASNGFVNNRKKPLKHISKWKSVADLKRLRPDVVVTHEPGHQKLDSSPHAYGNNLADQLATQASFKVHAGKRTADGSEFEKRTADGSEFESPKKKAKVE

SEQ ID NO: 1130 - protein, 2171 aa, synthetic construct
MPAAKRVKLDGGDKKYSIGLDIGTNSVGWAVITDEYKVPSKKFKVLGNTDRHSIKKNLIGALLFDSGETAEATRLKRTARRRYTRRKNRICYLQEIFSNEMAKVDDSFFHRLEESFLVEEDKKHERHPIFGNIVDEVAYHEKYPTIYHLRKKLVDSTDKADLRLIYLALAHMIKFRGHFLIEGDLNPDNSDVDKLFIQLVQTYNQLFEENPINASGVDAKAILSARLSKSRRLENLIAQLPGEKKNGLFGNLIALSLGLTPNFKSNFDLAEDAKLQLSKDTYDDDLDNLLAQIGDQYADLFLAAKNLSDAILLSDILRVNTEITKAPLSASMIKRYDEHHQDLTLLKALVRQQLPEKYKEIFFDQSKNGYAGYIDGGASQEEFYKFIKPILEKMDGTEELLVKLNREDLLRKQRTFDNGSIPHQIHLGELHAILRRQEDFYPFLKDNREKIEKILTFRIPYYVGPLARGNSRFAWMTRKSEETITPWNFEEVVDKGASAQSFIERMTNFDKNLPNEKVLPKHSLLYEYFTVYNELTKVKYVTEGMRKPAFLSGEQKKAIVDLLFKTNRKVTVKQLKEDYFKKIECFDSVEISGVEDRFNASLGTYHDLLKIIKDKDFLDNEENEDILEDIVLTLTLFEDREMIEERLKTYAHLFDDKVMKQLKRRRYTGWGRLSRKLINGIRDKQSGKTILDFLKSDGFANRNFMQLIHDDSLTFKEDIQKAQVSGQGDSLHEHIANLAGSPAIKKGILQTVKVVDELVKVMGRHKPENIVIEMARENQTTQKGQKNSRERMKRIEEGIKELGSQILKEHPVENTQLQNEKLYLYYLQNGRDMYVDQELDINRLSDYDVDHIVPQSFLKDDSIDNKVLTRSDKARGKSDNVPSEEVVKKMKNYWRQLLNAKLITQRKFDNLTKAERGGLSELDKAGFIKRQLVETRQITKHVAQILDSRMNTKYDENDKLIREVKVITLKSKLVSDFRKDFQFYKVREINNYHHAHDAYLNAVVGTALIKKYPKLESEFVYGDYKVYDVRKMIAKSEQEIGKATAKYFFYSNIMNFFKTEITLANGEIRKRPLIETNGETGEIVWDKGRDFATVRKVLSMPQVNIVKKTEVQTGGFSKESILPKRNSDKLIARKKDWDPKKYGGFDSPTVAYSVLVVAKVEKGKSKKLKSVKELLGITIMERSSFEKNPIDFLEAKGYKEVKKDLIIKLPKYSLFELENGRKRMLASAGELQKGNELALPSKYVNFLYLASHYEKLKGSPEDNEQKQLFVEQHKHYLDEIIEQISEFSKRVILADANLDKVLSAYNKHRDKPIREQAENIIHLFTLTNLGAPAAFKYFDTTIDRKRYTSTKEVLDATLIHQSITGLYETRIDLSQLGGDGGGSSPAPGGSGGMDLLKPLTVERKGVKIKGYWNSQADITCVPKDLLQGEEPVRQQNVTTIHGTQEGDVYYVNLKIDGRRINTEVIGTTLDYAIITPGDVPWILKKPLELTIKLDLEEQQGTLLNNSILSKKGKEELKQLFEKYSALWQSWENQVGHRRIRPHKIATGTVKPTPQKQYHINPKAKPDIQIVINDLLKQGVLIQKESTMNTPVYPVPKPNGRWRMVLDYRAVNKVTPLIAVQNQHSYGILGSLFKGRYKTTIDLSNGFWAHPIVPEDYWITAFTWQGKQYCWTVLPQGFLNSPGLFNGDVVDLLQGIPNVEVYVDDVYISHDSEKEHLEYLDILFNRLKEAGYIISLKKSNIANSIVDFLGFQITNEGRGLTDTFKEKLENITAPTTLKQLQSILGKLNFARNFIPDFTELIAPLYALIPKSPKNYVPWQIEHSTTLETLITKLNGAEYLQGRKGDKTLIMKVNASYTTGYIRYYNEGEKKPISYVSIVFSKTELKFTELEKLLTTVHKGLLKALDLSMGQNIHVYSPIVSMQNIQKTPQTAKKALASRWLSWLSYLEDPRIRFFYDPQMPALKDLPAVDTGKDNKKHPSNFQHIFYTDGSAITSPTKEGHLNAGMGIVYFINKDGNLQKQQEWSISLGNHTAQFAEIAAFEFALKKCLPLGGNILVVTDSNYVAKAYNEELDVWASNGFVNNRKKPLKHISKWKSVADLKRLRPDVVVTHEPGHQKLDSSPHAYGNNLADQLATQASFKVHAGKRTADGSEFEKRTADGSEFESPKKKAKVE

SEQ ID NO: 1131 - protein, 2182 aa, synthetic construct
MPAAKRVKLDGGDKKYSIGLDIGTNSVGWAVITDEYKVPSKKFKVLGNTDRHSIKKNLIGALLFDSGETAEATRLKRTARRRYTRRKNRICYLQEIFSNEMAKVDDSFFHRLEESFLVEEDKKHERHPIFGNIVDEVAYHEKYPTIYHLRKKLVDSTDKADLRLIYLALAHMIKFRGHFLIEGDLNPDNSDVDKLFIQLVQTYNQLFEENPINASGVDAKAILSARLSKSRRLENLIAQLPGEKKNGLFGNLIALSLGLTPNFKSNFDLAEDAKLQLSKDTYDDDLDNLLAQIGDQYADLFLAAKNLSDAILLSDILRVNTEITKAPLSASMIKRYDEHHQDLTLLKALVRQQLPEKYKEIFFDQSKNGYAGYIDGGASQEEFYKFIKPILEKMDGTEELLVKLNREDLLRKQRTFDNGSIPHQIHLGELHAILRRQEDFYPFLKDNREKIEKILTFRIPYYVGPLARGNSRFAWMTRKSEETITPWNFEEVVDKGASAQSFIERMTNFDKNLPNEKVLPKHSLLYEYFTVYNELTKVKYVTEGMRKPAFLSGEQKKAIVDLLFKTNRKVTVKQLKEDYFKKIECFDSVEISGVEDRFNASLGTYHDLLKIIKDKDFLDNEENEDILEDIVLTLTLFEDREMIEERLKTYAHLFDDKVMKQLKRRRYTGWGRLSRKLINGIRDKQSGKTILDFLKSDGFANRNFMQLIHDDSLTFKEDIQKAQVSGQGDSLHEHIANLAGSPAIKKGILQTVKVVDELVKVMGRHKPENIVIEMARENQTTQKGQKNSRERMKRIEEGIKELGSQILKEHPVENTQLQNEKLYLYYLQNGRDMYVDQELDINRLSDYDVDHIVPQSFLKDDSIDNKVLTRSDKARGKSDNVPSEEVVKKMKNYWRQLLNAKLITQRKFDNLTKAERGGLSELDKAGFIKRQLVETRQITKHVAQILDSRMNTKYDENDKLIREVKVITLKSKLVSDFRKDFQFYKVREINNYHHAHDAYLNAVVGTALIKKYPKLESEFVYGDYKVYDVRKMIAKSEQEIGKATAKYFFYSNIMNFFKTEITLANGEIRKRPLIETNGETGEIVWDKGRDFATVRKVLSMPQVNIVKKTEVQTGGFSKESILPKRNSDKLIARKKDWDPKKYGGFDSPTVAYSVLVVAKVEKGKSKKLKSVKELLGITIMERSSFEKNPIDFLEAKGYKEVKKDLIIKLPKYSLFELENGRKRMLASAGELQKGNELALPSKYVNFLYLASHYEKLKGSPEDNEQKQLFVEQHKHYLDEIIEQISEFSKRVILADANLDKVLSAYNKHRDKPIREQAENIIHLFTLTNLGAPAAFKYFDTTIDRKRYTSTKEVLDATLIHQSITGLYETRIDLSQLGGDGGGGGGSGGGGSGGGGSGGGGSGGMDLLKPLTVERKGVKIKGYWNSQADITCVPKDLLQGEEPVRQQNVTTIHGTQEGDVYYVNLKIDGRRINTEVIGTTLDYAIITPGDVPWILKKPLELTIKLDLEEQQGTLLNNSILSKKGKEELKQLFEKYSALWQSWENQVGHRRIRPHKIATGTVKPTPQKQYHINPKAKPDIQIVINDLLKQGVLIQKESTMNTPVYPVPKPNGRWRMVLDYRAVNKVTPLIAVQNQHSYGILGSLFKGRYKTTIDLSNGFWAHPIVPEDYWITAFTWQGKQYCWTVLPQGFLNSPGLFNGDVVDLLQGIPNVEVYVDDVYISHDSEKEHLEYLDILFNRLKEAGYIISLKKSNIANSIVDFLGFQITNEGRGLTDTFKEKLENITAPTTLKQLQSILGKLNFARNFIPDFTELIAPLYALIPKSPKNYVPWQIEHSTTLETLITKLNGAEYLQGRKGDKTLIMKVNASYTTGYIRYYNEGEKKPISYVSIVFSKTELKFTELEKLLTTVHKGLLKALDLSMGQNIHVYSPIVSMQNIQKTPQTAKKALASRWLSWLSYLEDPRIRFFYDPQMPALKDLPAVDTGKDNKKHPSNFQHIFYTDGSAITSPTKEGHLNAGMGIVYFINKDGNLQKQQEWSISLGNHTAQFAEIAAFEFALKKCLPLGGNILVVTDSNYVAKAYNEELDVWASNGFVNNRKKPLKHISKWKSVADLKRLRPDVVVTHEPGHQKLDSSPHAYGNNLADQLATQASFKVHAGKRTADGSEFEKRTADGSEFESPKKKAKVE

SEQ ID NO: 1132 - protein, 2167 aa, synthetic construct
MPAAKRVKLDGGDKKYSIGLDIGTNSVGWAVITDEYKVPSKKFKVLGNTDRHSIKKNLIGALLFDSGETAEATRLKRTARRRYTRRKNRICYLQEIFSNEMAKVDDSFFHRLEESFLVEEDKKHERHPIFGNIVDEVAYHEKYPTIYHLRKKLVDSTDKADLRLIYLALAHMIKFRGHFLIEGDLNPDNSDVDKLFIQLVQTYNQLFEENPINASGVDAKAILSARLSKSRRLENLIAQLPGEKKNGLFGNLIALSLGLTPNFKSNFDLAEDAKLQLSKDTYDDDLDNLLAQIGDQYADLFLAAKNLSDAILLSDILRVNTEITKAPLSASMIKRYDEHHQDLTLLKALVRQQLPEKYKEIFFDQSKNGYAGYIDGGASQEEFYKFIKPILEKMDGTEELLVKLNREDLLRKQRTFDNGSIPHQIHLGELHAILRRQEDFYPFLKDNREKIEKILTFRIPYYVGPLARGNSRFAWMTRKSEETITPWNFEEVVDKGASAQSFIERMTNFDKNLPNEKVLPKHSLLYEYFTVYNELTKVKYVTEGMRKPAFLSGEQKKAIVDLLFKTNRKVTVKQLKEDYFKKIECFDSVEISGVEDRFNASLGTYHDLLKIIKDKDFLDNEENEDILEDIVLTLTLFEDREMIEERLKTYAHLFDDKVMKQLKRRRYTGWGRLSRKLINGIRDKQSGKTILDFLKSDGFANRNFMQLIHDDSLTFKEDIQKAQVSGQGDSLHEHIANLAGSPAIKKGILQTVKVVDELVKVMGRHKPENIVIEMARENQTTQKGQKNSRERMKRIEEGIKELGSQILKEHPVENTQLQNEKLYLYYLQNGRDMYVDQELDINRLSDYDVDHIVPQSFLKDDSIDNKVLTRSDKARGKSDNVPSEEVVKKMKNYWRQLLNAKLITQRKFDNLTKAERGGLSELDKAGFIKRQLVETRQITKHVAQILDSRMNTKYDENDKLIREVKVITLKSKLVSDFRKDFQFYKVREINNYHHAHDAYLNAVVGTALIKKYPKLESEFVYGDYKVYDVRKMIAKSEQEIGKATAKYFFYSNIMNFFKTEITLANGEIRKRPLIETNGETGEIVWDKGRDFATVRKVLSMPQVNIVKKTEVQTGGFSKESILPKRNSDKLIARKKDWDPKKYGGFDSPTVAYSVLVVAKVEKGKSKKLKSVKELLGITIMERSSFEKNPIDFLEAKGYKEVKKDLIIKLPKYSLFELENGRKRMLASAGELQKGNELALPSKYVNFLYLASHYEKLKGSPEDNEQKQLFVEQHKHYLDEIIEQISEFSKRVILADANLDKVLSAYNKHRDKPIREQAENIIHLFTLTNLGAPAAFKYFDTTIDRKRYTSTKEVLDATLIHQSITGLYETRIDLSQLGGDGGEAAAKGGMDLLKPLTVERKGVKIKGYWNSQADITCVPKDLLQGEEPVRQQNVTTIHGTQEGDVYYVNLKIDGRRINTEVIGTTLDYAIITPGDVPWILKKPLELTIKLDLEEQQGTLLNNSILSKKGKEELKQLFEKYSALWQSWENQVGHRRIRPHKIATGTVKPTPQKQYHINPKAKPDIQIVINDLLKQGVLIQKESTMNTPVYPVPKPNGRWRMVLDYRAVNKVTPLIAVQNQHSYGILGSLFKGRYKTTIDLSNGFWAHPIVPEDYWITAFTWQGKQYCWTVLPQGFLNSPGLFNGDVVDLLQGIPNVEVYVDDVYISHDSEKEHLEYLDILFNRLKEAGYIISLKKSNIANSIVDFLGFQITNEGRGLTDTFKEKLENITAPTTLKQLQSILGKLNFARNFIPDFTELIAPLYALIPKSPKNYVPWQIEHSTTLETLITKLNGAEYLQGRKGDKTLIMKVNASYTTGYIRYYNEGEKKPISYVSIVFSKTELKFTELEKLLTTVHKGLLKALDLSMGQNIHVYSPIVSMQNIQKTPQTAKKALASRWLSWLSYLEDPRIRFFYDPQMPALKDLPAVDTGKDNKKHPSNFQHIFYTDGSAITSPTKEGHLNAGMGIVYFINKDGNLQKQQEWSISLGNHTAQFAEIAAFEFALKKCLPLGGNILVVTDSNYVAKAYNEELDVWASNGFVNNRKKPLKHISKWKSVADLKRLRPDVVVTHEPGHQKLDSSPHAYGNNLADQLATQASFKVHAGKRTADGSEFEKRTADGSEFESPKKKAKVE

SEQ ID NO: 1133 - protein, 2174 aa, synthetic construct
MPAAKRVKLDGGDKKYSIGLDIGTNSVGWAVITDEYKVPSKKFKVLGNTDRHSIKKNLIGALLFDSGETAEATRLKRTARRRYTRRKNRICYLQEIFSNEMAKVDDSFFHRLEESFLVEEDKKHERHPIFGNIVDEVAYHEKYPTIYHLRKKLVDSTDKADLRLIYLALAHMIKFRGHFLIEGDLNPDNSDVDKLFIQLVQTYNQLFEENPINASGVDAKAILSARLSKSRRLENLIAQLPGEKKNGLFGNLIALSLGLTPNFKSNFDLAEDAKLQLSKDTYDDDLDNLLAQIGDQYADLFLAAKNLSDAILLSDILRVNTEITKAPLSASMIKRYDEHHQDLTLLKALVRQQLPEKYKEIFFDQSKNGYAGYIDGGASQEEFYKFIKPILEKMDGTEELLVKLNREDLLRKQRTFDNGSIPHQIHLGELHAILRRQEDFYPFLKDNREKIEKILTFRIPYYVGPLARGNSRFAWMTRKSEETITPWNFEEVVDKGASAQSFIERMTNFDKNLPNEKVLPKHSLLYEYFTVYNELTKVKYVTEGMRKPAFLSGEQKKAIVDLLFKTNRKVTVKQLKEDYFKKIECFDSVEISGVEDRFNASLGTYHDLLKIIKDKDFLDNEENEDILEDIVLTLTLFEDREMIEERLKTYAHLFDDKVMKQLKRRRYTGWGRLSRKLINGIRDKQSGKTILDFLKSDGFANRNFMQLIHDDSLTFKEDIQKAQVSGQGDSLHEHIANLAGSPAIKKGILQTVKVVDELVKVMGRHKPENIVIEMARENQTTQKGQKNSRERMKRIEEGIKELGSQILKEHPVENTQLQNEKLYLYYLQNGRDMYVDQELDINRLSDYDVDHIVPQSFLKDDSIDNKVLTRSDKARGKSDNVPSEEVVKKMKNYWRQLLNAKLITQRKFDNLTKAERGGLSELDKAGFIKRQLVETRQITKHVAQILDSRMNTKYDENDKLIREVKVITLKSKLVSDFRKDFQFYKVREINNYHHAHDAYLNAVVGTALIKKYPKLESEFVYGDYKVYDVRKMIAKSEQEIGKATAKYFFYSNIMNFFKTEITLANGEIRKRPLIETNGETGEIVWDKGRDFATVRKVLSMPQVNIVKKTEVQTGGFSKESILPKRNSDKLIARKKDWDPKKYGGFDSPTVAYSVLVVAKVEKGKSKKLKSVKELLGITIMERSSFEKNPIDFLEAKGYKEVKKDLIIKLPKYSLFELENGRKRMLASAGELQKGNELALPSKYVNFLYLASHYEKLKGSPEDNEQKQLFVEQHKHYLDEIIEQISEFSKRVILADANLDKVLSAYNKHRDKPIREQAENIIHLFTLTNLGAPAAFKYFDTTIDRKRYTSTKEVLDATLIHQSITGLYETRIDLSQLGGDGGGSAGSAAGSGEFGGMDLLKPLTVERKGVKIKGYWNSQADITCVPKDLLQGEEPVRQQNVTTIHGTQEGDVYYVNLKIDGRRINTEVIGTTLDYAIITPGDVPWILKKPLELTIKLDLEEQQGTLLNNSILSKKGKEELKQLFEKYSALWQSWENQVGHRRIRPHKIATGTVKPTPQKQYHINPKAKPDIQIVINDLLKQGVLIQKESTMNTPVYPVPKPNGRWRMVLDYRAVNKVTPLIAVQNQHSYGILGSLFKGRYKTTIDLSNGFWAHPIVPEDYWITAFTWQGKQYCWTVLPQGFLNSPGLFNGDVVDLLQGIPNVEVYVDDVYISHDSEKEHLEYLDILFNRLKEAGYIISLKKSNIANSIVDFLGFQITNEGRGLTDTFKEKLENITAPTTLKQLQSILGKLNFARNFIPDFTELIAPLYALIPKSPKNYVPWQIEHSTTLETLITKLNGAEYLQGRKGDKTLIMKVNASYTTGYIRYYNEGEKKPISYVSIVFSKTELKFTELEKLLTTVHKGLLKALDLSMGQNIHVYSPIVSMQNIQKTPQTAKKALASRWLSWLSYLEDPRIRFFYDPQMPALKDLPAVDTGKDNKKHPSNFQHIFYTDGSAITSPTKEGHLNAGMGIVYFINKDGNLQKQQEWSISLGNHTAQFAEIAAFEFALKKCLPLGGNILVVTDSNYVAKAYNEELDVWASNGFVNNRKKPLKHISKWKSVADLKRLRPDVVVTHEPGHQKLDSSPHAYGNNLADQLATQASFKVHAGKRTADGSEFEKRTADGSEFESPKKKAKVE

SEQ ID NO: 1134 - protein, 2109 aa, synthetic construct
MPAAKRVKLDGGDKKYSIGLDIGTNSVGWAVITDEYKVPSKKFKVLGNTDRHSIKKNLIGALLFDSGETAEATRLKRTARRRYTRRKNRICYLQEIFSNEMAKVDDSFFHRLEESFLVEEDKKHERHPIFGNIVDEVAYHEKYPTIYHLRKKLVDSTDKADLRLIYLALAHMIKFRGHFLIEGDLNPDNSDVDKLFIQLVQTYNQLFEENPINASGVDAKAILSARLSKSRRLENLIAQLPGEKKNGLFGNLIALSLGLTPNFKSNFDLAEDAKLQLSKDTYDDDLDNLLAQIGDQYADLFLAAKNLSDAILLSDILRVNTEITKAPLSASMIKRYDEHHQDLTLLKALVRQQLPEKYKEIFFDQSKNGYAGYIDGGASQEEFYKFIKPILEKMDGTEELLVKLNREDLLRKQRTFDNGSIPHQIHLGELHAILRRQEDFYPFLKDNREKIEKILTFRIPYYVGPLARGNSRFAWMTRKSEETITPWNFEEVVDKGASAQSFIERMTNFDKNLPNEKVLPKHSLLYEYFTVYNELTKVKYVTEGMRKPAFLSGEQKKAIVDLLFKTNRKVTVKQLKEDYFKKIECFDSVEISGVEDRFNASLGTYHDLLKIIKDKDFLDNEENEDILEDIVLTLTLFEDREMIEERLKTYAHLFDDKVMKQLKRRRYTGWGRLSRKLINGIRDKQSGKTILDFLKSDGFANRNFMQLIHDDSLTFKEDIQKAQVSGQGDSLHEHIANLAGSPAIKKGILQTVKVVDELVKVMGRHKPENIVIEMARENQTTQKGQKNSRERMKRIEEGIKELGSQILKEHPVENTQLQNEKLYLYYLQNGRDMYVDQELDINRLSDYDVDHIVPQSFLKDDSIDNKVLTRSDKARGKSDNVPSEEVVKKMKNYWRQLLNAKLITQRKFDNLTKAERGGLSELDKAGFIKRQLVETRQITKHVAQILDSRMNTKYDENDKLIREVKVITLKSKLVSDFRKDFQFYKVREINNYHHAHDAYLNAVVGTALIKKYPKLESEFVYGDYKVYDVRKMIAKSEQEIGKATAKYFFYSNIMNFFKTEITLANGEIRKRPLIETNGETGEIVWDKGRDFATVRKVLSMPQVNIVKKTEVQTGGFSKESILPKRNSDKLIARKKDWDPKKYGGFDSPTVAYSVLVVAKVEKGKSKKLKSVKELLGITIMERSSFEKNPIDFLEAKGYKEVKKDLIIKLPKYSLFELENGRKRMLASAGELQKGNELALPSKYVNFLYLASHYEKLKGSPEDNEQKQLFVEQHKHYLDEIIEQISEFSKRVILADANLDKVLSAYNKHRDKPIREQAENIIHLFTLTNLGAPAAFKYFDTTIDRKRYTSTKEVLDATLIHQSITGLYETRIDLSQLGGDGGEAAAKEAAAKEAAAKEAAAKEAAAKGGTLQLEEEYRLFEPESTQKQEMDIWLKNFPQAWAETGGMGTAHCQAPVLIQLKATATPISIRQYPMPHEAYQGIKPHIRRMLDQGILKPCQSPWNTPLLPVKKPGTEDYRPVQDLREVNKRVEDIHPTVPNPYNLLSTLPPSHPWYTVLDLKDAFFCLRLHSESQLLFAFEWRDPEIGLSGQLTWTRLPQGFKNSPTLFDEALHSDLADFRVRYPALVLLQYVDDLLLAAATRTECLEGTKALLETLGNKGYRASAKKAQICLQEVTYLGYSLKDGQRWLTKARKEAILSIPVPKNSRQVREFLGTAGYCRLWIPGFAELAAPLYPLTRPGTLFQWGTEQQLAFEDIKKALLSSPALGLPDITKPFELFIDENSGFAKGVLVQKLGPWKRPVAYLSKKLDTVASGWPPCLRMVAAIAILVKDAGKLTLGQPLTILTSHPVEALVRQPPNKWLSNARMTHYQAMLLDAERVHFGPTVSLNPATLLPLPSGGNHHDCLQILAETHGTRPDLTDQPLPDADLTWYTDGSSFIRNGEREAGAAVTTESEVIWAAPLPPGTSAQRAELIALTQALKMAEGKKLTVYTDSRYAFATTHVHGEIYRRRGLLTSEGKEIKNKNEILALLEALFLPKRLSIIHCPGHQKGDSPQAKGNRLADDTAKKAATETHSSLTVLPAGKRTADGSEFEKRTADGSEFESPKKKAKVE

SEQ ID NO: 1135 - protein, 2095 aa, synthetic construct
MPAAKRVKLDGGDKKYSIGLDIGTNSVGWAVITDEYKVPSKKFKVLGNTDRHSIKKNLIGALLFDSGETAEATRLKRTARRRYTRRKNRICYLQEIFSNEMAKVDDSFFHRLEESFLVEEDKKHERHPIFGNIVDEVAYHEKYPTIYHLRKKLVDSTDKADLRLIYLALAHMIKFRGHFLIEGDLNPDNSDVDKLFIQLVQTYNQLFEENPINASGVDAKAILSARLSKSRRLENLIAQLPGEKKNGLFGNLIALSLGLTPNFKSNFDLAEDAKLQLSKDTYDDDLDNLLAQIGDQYADLFLAAKNLSDAILLSDILRVNTEITKAPLSASMIKRYDEHHQDLTLLKALVRQQLPEKYKEIFFDQSKNGYAGYIDGGASQEEFYKFIKPILEKMDGTEELLVKLNREDLLRKQRTFDNGSIPHQIHLGELHAILRRQEDFYPFLKDNREKIEKILTFRIPYYVGPLARGNSRFAWMTRKSEETITPWNFEEVVDKGASAQSFIERMTNFDKNLPNEKVLPKHSLLYEYFTVYNELTKVKYVTEGMRKPAFLSGEQKKAIVDLLFKTNRKVTVKQLKEDYFKKIECFDSVEISGVEDRFNASLGTYHDLLKIIKDKDFLDNEENEDILEDIVLTLTLFEDREMIEERLKTYAHLFDDKVMKQLKRRRYTGWGRLSRKLINGIRDKQSGKTILDFLKSDGFANRNFMQLIHDDSLTFKEDIQKAQVSGQGDSLHEHIANLAGSPAIKKGILQTVKVVDELVKVMGRHKPENIVIEMARENQTTQKGQKNSRERMKRIEEGIKELGSQILKEHPVENTQLQNEKLYLYYLQNGRDMYVDQELDINRLSDYDVDHIVPQSFLKDDSIDNKVLTRSDKARGKSDNVPSEEVVKKMKNYWRQLLNAKLITQRKFDNLTKAERGGLSELDKAGFIKRQLVETRQITKHVAQILDSRMNTKYDENDKLIREVKVITLKSKLVSDFRKDFQFYKVREINNYHHAHDAYLNAVVGTALIKKYPKLESEFVYGDYKVYDVRKMIAKSEQEIGKATAKYFFYSNIMNFFKTEITLANGEIRKRPLIETNGETGEIVWDKGRDFATVRKVLSMPQVNIVKKTEVQTGGFSKESILPKRNSDKLIARKKDWDPKKYGGFDSPTVAYSVLVVAKVEKGKSKKLKSVKELLGITIMERSSFEKNPIDFLEAKGYKEVKKDLIIKLPKYSLFELENGRKRMLASAGELQKGNELALPSKYVNFLYLASHYEKLKGSPEDNEQKQLFVEQHKHYLDEIIEQISEFSKRVILADANLDKVLSAYNKHRDKPIREQAENIIHLFTLTNLGAPAAFKYFDTTIDRKRYTSTKEVLDATLIHQSITGLYETRIDLSQLGGDGGGGSEAAAKPAPGGTLQLEEEYRLFEPESTQKQEMDIWLKNFPQAWAETGGMGTAHCQAPVLIQLKATATPISIRQYPMPHEAYQGIKPHIRRMLDQGILKPCQSPWNTPLLPVKKPGTEDYRPVQDLREVNKRVEDIHPTVPNPYNLLSTLPPSHPWYTVLDLKDAFFCLRLHSESQLLFAFEWRDPEIGLSGQLTWTRLPQGFKNSPTLFDEALHSDLADFRVRYPALVLLQYVDDLLLAAATRTECLEGTKALLETLGNKGYRASAKKAQICLQEVTYLGYSLKDGQRWLTKARKEAILSIPVPKNSRQVREFLGTAGYCRLWIPGFAELAAPLYPLTRPGTLFQWGTEQQLAFEDIKKALLSSPALGLPDITKPFELFIDENSGFAKGVLVQKLGPWKRPVAYLSKKLDTVASGWPPCLRMVAAIAILVKDAGKLTLGQPLTILTSHPVEALVRQPPNKWLSNARMTHYQAMLLDAERVHFGPTVSLNPATLLPLPSGGNHHDCLQILAETHGTRPDLTDQPLPDADLTWYTDGSSFIRNGEREAGAAVTTESEVIWAAPLPPGTSAQRAELIALTQALKMAEGKKLTVYTDSRYAFATTHVHGEIYRRRGLLTSEGKEIKNKNEILALLEALFLPKRLSIIHCPGHQKGDSPQAKGNRLADDTAKKAATETHSSLTVLPAGKRTADGSEFEKRTADGSEFESPKKKAKVE

SEQ ID NO: 1136 - protein, 2093 aa, synthetic construct
MPAAKRVKLDGGDKKYSIGLDIGTNSVGWAVITDEYKVPSKKFKVLGNTDRHSIKKNLIGALLFDSGETAEATRLKRTARRRYTRRKNRICYLQEIFSNEMAKVDDSFFHRLEESFLVEEDKKHERHPIFGNIVDEVAYHEKYPTIYHLRKKLVDSTDKADLRLIYLALAHMIKFRGHFLIEGDLNPDNSDVDKLFIQLVQTYNQLFEENPINASGVDAKAILSARLSKSRRLENLIAQLPGEKKNGLFGNLIALSLGLTPNFKSNFDLAEDAKLQLSKDTYDDDLDNLLAQIGDQYADLFLAAKNLSDAILLSDILRVNTEITKAPLSASMIKRYDEHHQDLTLLKALVRQQLPEKYKEIFFDQSKNGYAGYIDGGASQEEFYKFIKPILEKMDGTEELLVKLNREDLLRKQRTFDNGSIPHQIHLGELHAILRRQEDFYPFLKDNREKIEKILTFRIPYYVGPLARGNSRFAWMTRKSEETITPWNFEEVVDKGASAQSFIERMTNFDKNLPNEKVLPKHSLLYEYFTVYNELTKVKYVTEGMRKPAFLSGEQKKAIVDLLFKTNRKVTVKQLKEDYFKKIECFDSVEISGVEDRFNASLGTYHDLLKIIKDKDFLDNEENEDILEDIVLTLTLFEDREMIEERLKTYAHLFDDKVMKQLKRRRYTGWGRLSRKLINGIRDKQSGKTILDFLKSDGFANRNFMQLIHDDSLTFKEDIQKAQVSGQGDSLHEHIANLAGSPAIKKGILQTVKVVDELVKVMGRHKPENIVIEMARENQTTQKGQKNSRERMKRIEEGIKELGSQILKEHPVENTQLQNEKLYLYYLQNGRDMYVDQELDINRLSDYDVDHIVPQSFLKDDSIDNKVLTRSDKARGKSDNVPSEEVVKKMKNYWRQLLNAKLITQRKFDNLTKAERGGLSELDKAGFIKRQLVETRQITKHVAQILDSRMNTKYDENDKLIREVKVITLKSKLVSDFRKDFQFYKVREINNYHHAHDAYLNAVVGTALIKKYPKLESEFVYGDYKVYDVRKMIAKSEQEIGKATAKYFFYSNIMNFFKTEITLANGEIRKRPLIETNGETGEIVWDKGRDFATVRKVLSMPQVNIVKKTEVQTGGFSKESILPKRNSDKLIARKKDWDPKKYGGFDSPTVAYSVLVVAKVEKGKSKKLKSVKELLGITIMERSSFEKNPIDFLEAKGYKEVKKDLIIKLPKYSLFELENGRKRMLASAGELQKGNELALPSKYVNFLYLASHYEKLKGSPEDNEQKQLFVEQHKHYLDEIIEQISEFSKRVILADANLDKVLSAYNKHRDKPIREQAENIIHLFTLTNLGAPAAFKYFDTTIDRKRYTSTKEVLDATLIHQSITGLYETRIDLSQLGGDGGPAPGSSGGGGGTLQLEEEYRLFEPESTQKQEMDIWLKNFPQAWAETGGMGTAHCQAPVLIQLKATATPISIRQYPMPHEAYQGIKPHIRRMLDQGILKPCQSPWNTPLLPVKKPGTEDYRPVQDLREVNKRVEDIHPTVPNPYNLLSTLPPSHPWYTVLDLKDAFFCLRLHSESQLLFAFEWRDPEIGLSGQLTWTRLPQGFKNSPTLFDEALHSDLADFRVRYPALVLLQYVDDLLLAAATRTECLEGTKALLETLGNKGYRASAKKAQICLQEVTYLGYSLKDGQRWLTKARKEAILSIPVPKNSRQVREFLGTAGYCRLWIPGFAELAAPLYPLTRPGTLFQWGTEQQLAFEDIKKALLSSPALGLPDITKPFELFIDENSGFAKGVLVQKLGPWKRPVAYLSKKLDTVASGWPPCLRMVAAIAILVKDAGKLTLGQPLTILTSHPVEALVRQPPNKWLSNARMTHYQAMLLDAERVHFGPTVSLNPATLLPLPSGGNHHDCLQILAETHGTRPDLTDQPLPDADLTWYTDGSSFIRNGEREAGAAVTTESEVIWAAPLPPGTSAQRAELIALTQALKMAEGKKLTVYTDSRYAFATTHVHGEIYRRRGLLTSEGKEIKNKNEILALLEALFLPKRLSIIHCPGHQKGDSPQAKGNRLADDTAKKAATETHSSLTVLPAGKRTADGSEFEKRTADGSEFESPKKKAKVE

SEQ ID NO: 1137 - protein, 2107 aa, synthetic construct
MPAAKRVKLDGGDKKYSIGLDIGTNSVGWAVITDEYKVPSKKFKVLGNTDRHSIKKNLIGALLFDSGETAEATRLKRTARRRYTRRKNRICYLQEIFSNEMAKVDDSFFHRLEESFLVEEDKKHERHPIFGNIVDEVAYHEKYPTIYHLRKKLVDSTDKADLRLIYLALAHMIKFRGHFLIEGDLNPDNSDVDKLFIQLVQTYNQLFEENPINASGVDAKAILSARLSKSRRLENLIAQLPGEKKNGLFGNLIALSLGLTPNFKSNFDLAEDAKLQLSKDTYDDDLDNLLAQIGDQYADLFLAAKNLSDAILLSDILRVNTEITKAPLSASMIKRYDEHHQDLTLLKALVRQQLPEKYKEIFFDQSKNGYAGYIDGGASQEEFYKFIKPILEKMDGTEELLVKLNREDLLRKQRTFDNGSIPHQIHLGELHAILRRQEDFYPFLKDNREKIEKILTFRIPYYVGPLARGNSRFAWMTRKSEETITPWNFEEVVDKGASAQSFIERMTNFDKNLPNEKVLPKHSLLYEYFTVYNELTKVKYVTEGMRKPAFLSGEQKKAIVDLLFKTNRKVTVKQLKEDYFKKIECFDSVEISGVEDRFNASLGTYHDLLKIIKDKDFLDNEENEDILEDIVLTLTLFEDREMIEERLKTYAHLFDDKVMKQLKRRRYTGWGRLSRKLINGIRDKQSGKTILDFLKSDGFANRNFMQLIHDDSLTFKEDIQKAQVSGQGDSLHEHIANLAGSPAIKKGILQTVKVVDELVKVMGRHKPENIVIEMARENQTTQKGQKNSRERMKRIEEGIKELGSQILKEHPVENTQLQNEKLYLYYLQNGRDMYVDQELDINRLSDYDVDHIVPQSFLKDDSIDNKVLTRSDKARGKSDNVPSEEVVKKMKNYWRQLLNAKLITQRKFDNLTKAERGGLSELDKAGFIKRQLVETRQITKHVAQILDSRMNTKYDENDKLIREVKVITLKSKLVSDFRKDFQFYKVREINNYHHAHDAYLNAVVGTALIKKYPKLESEFVYGDYKVYDVRKMIAKSEQEIGKATAKYFFYSNIMNFFKTEITLANGEIRKRPLIETNGETGEIVWDKGRDFATVRKVLSMPQVNIVKKTEVQTGGFSKESILPKRNSDKLIARKKDWDPKKYGGFDSPTVAYSVLVVAKVEKGKSKKLKSVKELLGITIMERSSFEKNPIDFLEAKGYKEVKKDLIIKLPKYSLFELENGRKRMLASAGELQKGNELALPSKYVNFLYLASHYEKLKGSPEDNEQKQLFVEQHKHYLDEIIEQISEFSKRVILADANLDKVLSAYNKHRDKPIREQAENIIHLFTLTNLGAPAAFKYFDTTIDRKRYTSTKEVLDATLIHQSITGLYETRIDLSQLGGDGGEAAAKEAAAKEAAAKEAAAKGGTAPLEEEYRLFLEAPIQNVTLLEQWKREIPKVWAEINPPGLASTQAPIHVQLLSTALPVRVRQYPITLEAKRSLRETIRKFRAAGILRPVHSPWNTPLLPVRKSGTSEYRMVQDLREVNKRVETIHPTVPNPYTLLSLLPPDRIWYSVLDLKDAFFCIPLAPESQLIFAFEWADAEEGESGQLTWTRLPQGFKNSPTLFNEALNRDLQGFRLDHPSVSLLQYVDDLLIAADTQAACLSATRDLLMTLAELGYRVSGKKAQLCQEEVTYLGFKIHKGSRSLSNSRTQAILQIPVPKTKRQVREFLGTIGYCRLWIPGFAELAQPLYAATRPGNDPLVWGEKEEEAFQSLKLALTQPPALALPSLDKPFQLFVEETSGAAKGVLTQALGPWKRPVAYLSKRLDPVAAGWPRCLRAIAAAALLTREASKLTFGQDIEITSSHNLESLLRSPPDKWLTNARITQYQVLLLDPPRVRFKQTAALNPATLLPETDDTLPIHHCLDTLDSLTSTRPDLTDQPLAQAEATLFTDGSSYIRDGKRYAGAAVVTLDSVIWAEPLPIGTSAQKAELIALTKALEWSKDKSVNIYTDSRYAFATLHVHGMIYRERGWLTAGGKAIKNAPEILALLTAVWLPKRVAVMHCKGHQKDDAPTSTGNRRADEVAREVAIRPLSTQATISAGKRTADGSEFEKRTADGSEFESPKKKAKVE

SEQ ID NO: 1138 - protein, 2100 aa, synthetic construct
MPAAKRVKLDGGDKKYSIGLDIGTNSVGWAVITDEYKVPSKKFKVLGNTDRHSIKKNLIGALLFDSGETAEATRLKRTARRRYTRRKNRICYLQEIFSNEMAKVDDSFFHRLEESFLVEEDKKHERHPIFGNIVDEVAYHEKYPTIYHLRKKLVDSTDKADLRLIYLALAHMIKFRGHFLIEGDLNPDNSDVDKLFIQLVQTYNQLFEENPINASGVDAKAILSARLSKSRRLENLIAQLPGEKKNGLFGNLIALSLGLTPNFKSNFDLAEDAKLQLSKDTYDDDLDNLLAQIGDQYADLFLAAKNLSDAILLSDILRVNTEITKAPLSASMIKRYDEHHQDLTLLKALVRQQLPEKYKEIFFDQSKNGYAGYIDGGASQEEFYKFIKPILEKMDGTEELLVKLNREDLLRKQRTFDNGSIPHQIHLGELHAILRRQEDFYPFLKDNREKIEKILTFRIPYYVGPLARGNSRFAWMTRKSEETITPWNFEEVVDKGASAQSFIERMTNFDKNLPNEKVLPKHSLLYEYFTVYNELTKVKYVTEGMRKPAFLSGEQKKAIVDLLFKTNRKVTVKQLKEDYFKKIECFDSVEISGVEDRFNASLGTYHDLLKIIKDKDFLDNEENEDILEDIVLTLTLFEDREMIEERLKTYAHLFDDKVMKQLKRRRYTGWGRLSRKLINGIRDKQSGKTILDFLKSDGFANRNFMQLIHDDSLTFKEDIQKAQVSGQGDSLHEHIANLAGSPAIKKGILQTVKVVDELVKVMGRHKPENIVIEMARENQTTQKGQKNSRERMKRIEEGIKELGSQILKEHPVENTQLQNEKLYLYYLQNGRDMYVDQELDINRLSDYDVDHIVPQSFLKDDSIDNKVLTRSDKARGKSDNVPSEEVVKKMKNYWRQLLNAKLITQRKFDNLTKAERGGLSELDKAGFIKRQLVETRQITKHVAQILDSRMNTKYDENDKLIREVKVITLKSKLVSDFRKDFQFYKVREINNYHHAHDAYLNAVVGTALIKKYPKLESEFVYGDYKVYDVRKMIAKSEQEIGKATAKYFFYSNIMNFFKTEITLANGEIRKRPLIETNGETGEIVWDKGRDFATVRKVLSMPQVNIVKKTEVQTGGFSKESILPKRNSDKLIARKKDWDPKKYGGFDSPTVAYSVLVVAKVEKGKSKKLKSVKELLGITIMERSSFEKNPIDFLEAKGYKEVKKDLIIKLPKYSLFELENGRKRMLASAGELQKGNELALPSKYVNFLYLASHYEKLKGSPEDNEQKQLFVEQHKHYLDEIIEQISEFSKRVILADANLDKVLSAYNKHRDKPIREQAENIIHLFTLTNLGAPAAFKYFDTTIDRKRYTSTKEVLDATLIHQSITGLYETRIDLSQLGGDGGPAPAPAPAPAPAPGGTAPLEEEYRLFLEAPIQNVTLLEQWKREIPKVWAEINPPGLASTQAPIHVQLLSTALPVRVRQYPITLEAKRSLRETIRKFRAAGILRPVHSPWNTPLLPVRKSGTSEYRMVQDLREVNKRVETIHPTVPNPYTLLSLLPPDRIWYSVLDLKDAFFCIPLAPESQLIFAFEWADAEEGESGQLTWTRLPQGFKNSPTLFNEALNRDLQGFRLDHPSVSLLQYVDDLLIAADTQAACLSATRDLLMTLAELGYRVSGKKAQLCQEEVTYLGFKIHKGSRSLSNSRTQAILQIPVPKTKRQVREFLGTIGYCRLWIPGFAELAQPLYAATRPGNDPLVWGEKEEEAFQSLKLALTQPPALALPSLDKPFQLFVEETSGAAKGVLTQALGPWKRPVAYLSKRLDPVAAGWPRCLRAIAAAALLTREASKLTFGQDIEITSSHNLESLLRSPPDKWLTNARITQYQVLLLDPPRVRFKQTAALNPATLLPETDDTLPIHHCLDTLDSLTSTRPDLTDQPLAQAEATLFTDGSSYIRDGKRYAGAAVVTLDSVIWAEPLPIGTSAQKAELIALTKALEWSKDKSVNIYTDSRYAFATLHVHGMIYRERGWLTAGGKAIKNAPEILALLTAVWLPKRVAVMHCKGHQKDDAPTSTGNRRADEVAREVAIRPLSTQATISAGKRTADGSEFEKRTADGSEFESPKKKAKVE

SEQ ID NO: 1139 - protein, 2098 aa, synthetic construct
MPAAKRVKLDGGDKKYSIGLDIGTNSVGWAVITDEYKVPSKKFKVLGNTDRHSIKKNLIGALLFDSGETAEATRLKRTARRRYTRRKNRICYLQEIFSNEMAKVDDSFFHRLEESFLVEEDKKHERHPIFGNIVDEVAYHEKYPTIYHLRKKLVDSTDKADLRLIYLALAHMIKFRGHFLIEGDLNPDNSDVDKLFIQLVQTYNQLFEENPINASGVDAKAILSARLSKSRRLENLIAQLPGEKKNGLFGNLIALSLGLTPNFKSNFDLAEDAKLQLSKDTYDDDLDNLLAQIGDQYADLFLAAKNLSDAILLSDILRVNTEITKAPLSASMIKRYDEHHQDLTLLKALVRQQLPEKYKEIFFDQSKNGYAGYIDGGASQEEFYKFIKPILEKMDGTEELLVKLNREDLLRKQRTFDNGSIPHQIHLGELHAILRRQEDFYPFLKDNREKIEKILTFRIPYYVGPLARGNSRFAWMTRKSEETITPWNFEEVVDKGASAQSFIERMTNFDKNLPNEKVLPKHSLLYEYFTVYNELTKVKYVTEGMRKPAFLSGEQKKAIVDLLFKTNRKVTVKQLKEDYFKKIECFDSVEISGVEDRFNASLGTYHDLLKIIKDKDFLDNEENEDILEDIVLTLTLFEDREMIEERLKTYAHLFDDKVMKQLKRRRYTGWGRLSRKLINGIRDKQSGKTILDFLKSDGFANRNFMQLIHDDSLTFKEDIQKAQVSGQGDSLHEHIANLAGSPAIKKGILQTVKVVDELVKVMGRHKPENIVIEMARENQTTQKGQKNSRERMKRIEEGIKELGSQILKEHPVENTQLQNEKLYLYYLQNGRDMYVDQELDINRLSDYDVDHIVPQSFLKDDSIDNKVLTRSDKARGKSDNVPSEEVVKKMKNYWRQLLNAKLITQRKFDNLTKAERGGLSELDKAGFIKRQLVETRQITKHVAQILDSRMNTKYDENDKLIREVKVITLKSKLVSDFRKDFQFYKVREINNYHHAHDAYLNAVVGTALIKKYPKLESEFVYGDYKVYDVRKMIAKSEQEIGKATAKYFFYSNIMNFFKTEITLANGEIRKRPLIETNGETGEIVWDKGRDFATVRKVLSMPQVNIVKKTEVQTGGFSKESILPKRNSDKLIARKKDWDPKKYGGFDSPTVAYSVLVVAKVEKGKSKKLKSVKELLGITIMERSSFEKNPIDFLEAKGYKEVKKDLIIKLPKYSLFELENGRKRMLASAGELQKGNELALPSKYVNFLYLASHYEKLKGSPEDNEQKQLFVEQHKHYLDEIIEQISEFSKRVILADANLDKVLSAYNKHRDKPIREQAENIIHLFTLTNLGAPAAFKYFDTTIDRKRYTSTKEVLDATLIHQSITGLYETRIDLSQLGGDGGEAAAKGGSPAPGGTAPLEEEYRLFLEAPIQNVTLLEQWKREIPKVWAEINPPGLASTQAPIHVQLLSTALPVRVRQYPITLEAKRSLRETIRKFRAAGILRPVHSPWNTPLLPVRKSGTSEYRMVQDLREVNKRVETIHPTVPNPYTLLSLLPPDRIWYSVLDLKDAFFCIPLAPESQLIFAFEWADAEEGESGQLTWTRLPQGFKNSPTLFNEALNRDLQGFRLDHPSVSLLQYVDDLLIAADTQAACLSATRDLLMTLAELGYRVSGKKAQLCQEEVTYLGFKIHKGSRSLSNSRTQAILQIPVPKTKRQVREFLGTIGYCRLWIPGFAELAQPLYAATRPGNDPLVWGEKEEEAFQSLKLALTQPPALALPSLDKPFQLFVEETSGAAKGVLTQALGPWKRPVAYLSKRLDPVAAGWPRCLRAIAAAALLTREASKLTFGQDIEITSSHNLESLLRSPPDKWLTNARITQYQVLLLDPPRVRFKQTAALNPATLLPETDDTLPIHHCLDTLDSLTSTRPDLTDQPLAQAEATLFTDGSSYIRDGKRYAGAAVVTLDSVIWAEPLPIGTSAQKAELIALTKALEWSKDKSVNIYTDSRYAFATLHVHGMIYRERGWLTAGGKAIKNAPEILALLTAVWLPKRVAVMHCKGHQKDDAPTSTGNRRADEVAREVAIRPLSTQATISAGKRTADGSEFEKRTADGSEFESPKKKAKVE

SEQ ID NO: 1140 - protein, 2096 aa, synthetic construct
MPAAKRVKLDGGDKKYSIGLDIGTNSVGWAVITDEYKVPSKKFKVLGNTDRHSIKKNLIGALLFDSGETAEATRLKRTARRRYTRRKNRICYLQEIFSNEMAKVDDSFFHRLEESFLVEEDKKHERHPIFGNIVDEVAYHEKYPTIYHLRKKLVDSTDKADLRLIYLALAHMIKFRGHFLIEGDLNPDNSDVDKLFIQLVQTYNQLFEENPINASGVDAKAILSARLSKSRRLENLIAQLPGEKKNGLFGNLIALSLGLTPNFKSNFDLAEDAKLQLSKDTYDDDLDNLLAQIGDQYADLFLAAKNLSDAILLSDILRVNTEITKAPLSASMIKRYDEHHQDLTLLKALVRQQLPEKYKEIFFDQSKNGYAGYIDGGASQEEFYKFIKPILEKMDGTEELLVKLNREDLLRKQRTFDNGSIPHQIHLGELHAILRRQEDFYPFLKDNREKIEKILTFRIPYYVGPLARGNSRFAWMTRKSEETITPWNFEEVVDKGASAQSFIERMTNFDKNLPNEKVLPKHSLLYEYFTVYNELTKVKYVTEGMRKPAFLSGEQKKAIVDLLFKTNRKVTVKQLKEDYFKKIECFDSVEISGVEDRFNASLGTYHDLLKIIKDKDFLDNEENEDILEDIVLTLTLFEDREMIEERLKTYAHLFDDKVMKQLKRRRYTGWGRLSRKLINGIRDKQSGKTILDFLKSDGFANRNFMQLIHDDSLTFKEDIQKAQVSGQGDSLHEHIANLAGSPAIKKGILQTVKVVDELVKVMGRHKPENIVIEMARENQTTQKGQKNSRERMKRIEEGIKELGSQILKEHPVENTQLQNEKLYLYYLQNGRDMYVDQELDINRLSDYDVDHIVPQSFLKDDSIDNKVLTRSDKARGKSDNVPSEEVVKKMKNYWRQLLNAKLITQRKFDNLTKAERGGLSELDKAGFIKRQLVETRQITKHVAQILDSRMNTKYDENDKLIREVKVITLKSKLVSDFRKDFQFYKVREINNYHHAHDAYLNAVVGTALIKKYPKLESEFVYGDYKVYDVRKMIAKSEQEIGKATAKYFFYSNIMNFFKTEITLANGEIRKRPLIETNGETGEIVWDKGRDFATVRKVLSMPQVNIVKKTEVQTGGFSKESILPKRNSDKLIARKKDWDPKKYGGFDSPTVAYSVLVVAKVEKGKSKKLKSVKELLGITIMERSSFEKNPIDFLEAKGYKEVKKDLIIKLPKYSLFELENGRKRMLASAGELQKGNELALPSKYVNFLYLASHYEKLKGSPEDNEQKQLFVEQHKHYLDEIIEQISEFSKRVILADANLDKVLSAYNKHRDKPIREQAENIIHLFTLTNLGAPAAFKYFDTTIDRKRYTSTKEVLDATLIHQSITGLYETRIDLSQLGGDGGGGGPAPGSSGGTAPLEEEYRLFLEAPIQNVTLLEQWKREIPKVWAEINPPGLASTQAPIHVQLLSTALPVRVRQYPITLEAKRSLRETIRKFRAAGILRPVHSPWNTPLLPVRKSGTSEYRMVQDLREVNKRVETIHPTVPNPYTLLSLLPPDRIWYSVLDLKDAFFCIPLAPESQLIFAFEWADAEEGESGQLTWTRLPQGFKNSPTLFNEALNRDLQGFRLDHPSVSLLQYVDDLLIAADTQAACLSATRDLLMTLAELGYRVSGKKAQLCQEEVTYLGFKIHKGSRSLSNSRTQAILQIPVPKTKRQVREFLGTIGYCRLWIPGFAELAQPLYAATRPGNDPLVWGEKEEEAFQSLKLALTQPPALALPSLDKPFQLFVEETSGAAKGVLTQALGPWKRPVAYLSKRLDPVAAGWPRCLRAIAAAALLTREASKLTFGQDIEITSSHNLESLLRSPPDKWLTNARITQYQVLLLDPPRVRFKQTAALNPATLLPETDDTLPIHHCLDTLDSLTSTRPDLTDQPLAQAEATLFTDGSSYIRDGKRYAGAAVVTLDSVIWAEPLPIGTSAQKAELIALTKALEWSKDKSVNIYTDSRYAFATLHVHGMIYRERGWLTAGGKAIKNAPEILALLTAVWLPKRVAVMHCKGHQKDDAPTSTGNRRADEVAREVAIRPLSTQATISAGKRTADGSEFEKRTADGSEFESPKKKAKVE

SEQ ID NO: 1141 - protein, 2095 aa, synthetic construct
MPAAKRVKLDGGDKKYSIGLDIGTNSVGWAVITDEYKVPSKKFKVLGNTDRHSIKKNLIGALLFDSGETAEATRLKRTARRRYTRRKNRICYLQEIFSNEMAKVDDSFFHRLEESFLVEEDKKHERHPIFGNIVDEVAYHEKYPTIYHLRKKLVDSTDKADLRLIYLALAHMIKFRGHFLIEGDLNPDNSDVDKLFIQLVQTYNQLFEENPINASGVDAKAILSARLSKSRRLENLIAQLPGEKKNGLFGNLIALSLGLTPNFKSNFDLAEDAKLQLSKDTYDDDLDNLLAQIGDQYADLFLAAKNLSDAILLSDILRVNTEITKAPLSASMIKRYDEHHQDLTLLKALVRQQLPEKYKEIFFDQSKNGYAGYIDGGASQEEFYKFIKPILEKMDGTEELLVKLNREDLLRKQRTFDNGSIPHQIHLGELHAILRRQEDFYPFLKDNREKIEKILTFRIPYYVGPLARGNSRFAWMTRKSEETITPWNFEEVVDKGASAQSFIERMTNFDKNLPNEKVLPKHSLLYEYFTVYNELTKVKYVTEGMRKPAFLSGEQKKAIVDLLFKTNRKVTVKQLKEDYFKKIECFDSVEISGVEDRFNASLGTYHDLLKIIKDKDFLDNEENEDILEDIVLTLTLFEDREMIEERLKTYAHLFDDKVMKQLKRRRYTGWGRLSRKLINGIRDKQSGKTILDFLKSDGFANRNFMQLIHDDSLTFKEDIQKAQVSGQGDSLHEHIANLAGSPAIKKGILQTVKVVDELVKVMGRHKPENIVIEMARENQTTQKGQKNSRERMKRIEEGIKELGSQILKEHPVENTQLQNEKLYLYYLQNGRDMYVDQELDINRLSDYDVDHIVPQSFLKDDSIDNKVLTRSDKARGKSDNVPSEEVVKKMKNYWRQLLNAKLITQRKFDNLTKAERGGLSELDKAGFIKRQLVETRQITKHVAQILDSRMNTKYDENDKLIREVKVITLKSKLVSDFRKDFQFYKVREINNYHHAHDAYLNAVVGTALIKKYPKLESEFVYGDYKVYDVRKMIAKSEQEIGKATAKYFFYSNIMNFFKTEITLANGEIRKRPLIETNGETGEIVWDKGRDFATVRKVLSMPQVNIVKKTEVQTGGFSKESILPKRNSDKLIARKKDWDPKKYGGFDSPTVAYSVLVVAKVEKGKSKKLKSVKELLGITIMERSSFEKNPIDFLEAKGYKEVKKDLIIKLPKYSLFELENGRKRMLASAGELQKGNELALPSKYVNFLYLASHYEKLKGSPEDNEQKQLFVEQHKHYLDEIIEQISEFSKRVILADANLDKVLSAYNKHRDKPIREQAENIIHLFTLTNLGAPAAFKYFDTTIDRKRYTSTKEVLDATLIHQSITGLYETRIDLSQLGGDGGEAAAKGGGGGTAPLEEEYRLFLEAPIQNVTLLEQWKREIPKVWAEINPPGLASTQAPIHVQLLSTALPVRVRQYPITLEAKRSLRETIRKFRAAGILRPVHSPWNTPLLPVRKSGTSEYRMVQDLREVNKRVETIHPTVPNPYTLLSLLPPDRIWYSVLDLKDAFFCIPLAPESQLIFAFEWADAEEGESGQLTWTRLPQGFKNSPTLFNEALNRDLQGFRLDHPSVSLLQYVDDLLIAADTQAACLSATRDLLMTLAELGYRVSGKKAQLCQEEVTYLGFKIHKGSRSLSNSRTQAILQIPVPKTKRQVREFLGTIGYCRLWIPGFAELAQPLYAATRPGNDPLVWGEKEEEAFQSLKLALTQPPALALPSLDKPFQLFVEETSGAAKGVLTQALGPWKRPVAYLSKRLDPVAAGWPRCLRAIAAAALLTREASKLTFGQDIEITSSHNLESLLRSPPDKWLTNARITQYQVLLLDPPRVRFKQTAALNPATLLPETDDTLPIHHCLDTLDSLTSTRPDLTDQPLAQAEATLFTDGSSYIRDGKRYAGAAVVTLDSVIWAEPLPIGTSAQKAELIALTKALEWSKDKSVNIYTDSRYAFATLHVHGMIYRERGWLTAGGKAIKNAPEILALLTAVWLPKRVAVMHCKGHQKDDAPTSTGNRRADEVAREVAIRPLSTQATISAGKRTADGSEFEKRTADGSEFESPKKKAKVE

SEQ ID NO: 1142 - protein, 2098 aa, synthetic construct
MPAAKRVKLDGGDKKYSIGLDIGTNSVGWAVITDEYKVPSKKFKVLGNTDRHSIKKNLIGALLFDSGETAEATRLKRTARRRYTRRKNRICYLQEIFSNEMAKVDDSFFHRLEESFLVEEDKKHERHPIFGNIVDEVAYHEKYPTIYHLRKKLVDSTDKADLRLIYLALAHMIKFRGHFLIEGDLNPDNSDVDKLFIQLVQTYNQLFEENPINASGVDAKAILSARLSKSRRLENLIAQLPGEKKNGLFGNLIALSLGLTPNFKSNFDLAEDAKLQLSKDTYDDDLDNLLAQIGDQYADLFLAAKNLSDAILLSDILRVNTEITKAPLSASMIKRYDEHHQDLTLLKALVRQQLPEKYKEIFFDQSKNGYAGYIDGGASQEEFYKFIKPILEKMDGTEELLVKLNREDLLRKQRTFDNGSIPHQIHLGELHAILRRQEDFYPFLKDNREKIEKILTFRIPYYVGPLARGNSRFAWMTRKSEETITPWNFEEVVDKGASAQSFIERMTNFDKNLPNEKVLPKHSLLYEYFTVYNELTKVKYVTEGMRKPAFLSGEQKKAIVDLLFKTNRKVTVKQLKEDYFKKIECFDSVEISGVEDRFNASLGTYHDLLKIIKDKDFLDNEENEDILEDIVLTLTLFEDREMIEERLKTYAHLFDDKVMKQLKRRRYTGWGRLSRKLINGIRDKQSGKTILDFLKSDGFANRNFMQLIHDDSLTFKEDIQKAQVSGQGDSLHEHIANLAGSPAIKKGILQTVKVVDELVKVMGRHKPENIVIEMARENQTTQKGQKNSRERMKRIEEGIKELGSQILKEHPVENTQLQNEKLYLYYLQNGRDMYVDQELDINRLSDYDVDHIVPQSFLKDDSIDNKVLTRSDKARGKSDNVPSEEVVKKMKNYWRQLLNAKLITQRKFDNLTKAERGGLSELDKAGFIKRQLVETRQITKHVAQILDSRMNTKYDENDKLIREVKVITLKSKLVSDFRKDFQFYKVREINNYHHAHDAYLNAVVGTALIKKYPKLESEFVYGDYKVYDVRKMIAKSEQEIGKATAKYFFYSNIMNFFKTEITLANGEIRKRPLIETNGETGEIVWDKGRDFATVRKVLSMPQVNIVKKTEVQTGGFSKESILPKRNSDKLIARKKDWDPKKYGGFDSPTVAYSVLVVAKVEKGKSKKLKSVKELLGITIMERSSFEKNPIDFLEAKGYKEVKKDLIIKLPKYSLFELENGRKRMLASAGELQKGNELALPSKYVNFLYLASHYEKLKGSPEDNEQKQLFVEQHKHYLDEIIEQISEFSKRVILADANLDKVLSAYNKHRDKPIREQAENIIHLFTLTNLGAPAAFKYFDTTIDRKRYTSTKEVLDATLIHQSITGLYETRIDLSQLGGDGGGGGEAAAKGSSGGTAPLEEEYRLFLEAPIQNVTLLEQWKREIPKVWAEINPPGLASTQAPIHVQLLSTALPVRVRQYPITLEAKRSLRETIRKFRAAGILRPVHSPWNTPLLPVRKSGTSEYRMVQDLREVNKRVETIHPTVPNPYTLLSLLPPDRIWYSVLDLKDAFFCIPLAPESQLIFAFEWADAEEGESGQLTWTRLPQGFKNSPTLFNEALNRDLQGFRLDHPSVSLLQYVDDLLIAADTQAACLSATRDLLMTLAELGYRVSGKKAQLCQEEVTYLGFKIHKGSRSLSNSRTQAILQIPVPKTKRQVREFLGTIGYCRLWIPGFAELAQPLYAATRPGNDPLVWGEKEEEAFQSLKLALTQPPALALPSLDKPFQLFVEETSGAAKGVLTQALGPWKRPVAYLSKRLDPVAAGWPRCLRAIAAAALLTREASKLTFGQDIEITSSHNLESLLRSPPDKWLTNARITQYQVLLLDPPRVRFKQTAALNPATLLPETDDTLPIHHCLDTLDSLTSTRPDLTDQPLAQAEATLFTDGSSYIRDGKRYAGAAVVTLDSVIWAEPLPIGTSAQKAELIALTKALEWSKDKSVNIYTDSRYAFATLHVHGMIYRERGWLTAGGKAIKNAPEILALLTAVWLPKRVAVMHCKGHQKDDAPTSTGNRRADEVAREVAIRPLSTQATISAGKRTADGSEFEKRTADGSEFESPKKKAKVE

SEQ ID NO: 1143 - protein, 2102 aa, synthetic construct
MPAAKRVKLDGGDKKYSIGLDIGTNSVGWAVITDEYKVPSKKFKVLGNTDRHSIKKNLIGALLFDSGETAEATRLKRTARRRYTRRKNRICYLQEIFSNEMAKVDDSFFHRLEESFLVEEDKKHERHPIFGNIVDEVAYHEKYPTIYHLRKKLVDSTDKADLRLIYLALAHMIKFRGHFLIEGDLNPDNSDVDKLFIQLVQTYNQLFEENPINASGVDAKAILSARLSKSRRLENLIAQLPGEKKNGLFGNLIALSLGLTPNFKSNFDLAEDAKLQLSKDTYDDDLDNLLAQIGDQYADLFLAAKNLSDAILLSDILRVNTEITKAPLSASMIKRYDEHHQDLTLLKALVRQQLPEKYKEIFFDQSKNGYAGYIDGGASQEEFYKFIKPILEKMDGTEELLVKLNREDLLRKQRTFDNGSIPHQIHLGELHAILRRQEDFYPFLKDNREKIEKILTFRIPYYVGPLARGNSRFAWMTRKSEETITPWNFEEVVDKGASAQSFIERMTNFDKNLPNEKVLPKHSLLYEYFTVYNELTKVKYVTEGMRKPAFLSGEQKKAIVDLLFKTNRKVTVKQLKEDYFKKIECFDSVEISGVEDRFNASLGTYHDLLKIIKDKDFLDNEENEDILEDIVLTLTLFEDREMIEERLKTYAHLFDDKVMKQLKRRRYTGWGRLSRKLINGIRDKQSGKTILDFLKSDGFANRNFMQLIHDDSLTFKEDIQKAQVSGQGDSLHEHIANLAGSPAIKKGILQTVKVVDELVKVMGRHKPENIVIEMARENQTTQKGQKNSRERMKRIEEGIKELGSQILKEHPVENTQLQNEKLYLYYLQNGRDMYVDQELDINRLSDYDVDHIVPQSFLKDDSIDNKVLTRSDKARGKSDNVPSEEVVKKMKNYWRQLLNAKLITQRKFDNLTKAERGGLSELDKAGFIKRQLVETRQITKHVAQILDSRMNTKYDENDKLIREVKVITLKSKLVSDFRKDFQFYKVREINNYHHAHDAYLNAVVGTALIKKYPKLESEFVYGDYKVYDVRKMIAKSEQEIGKATAKYFFYSNIMNFFKTEITLANGEIRKRPLIETNGETGEIVWDKGRDFATVRKVLSMPQVNIVKKTEVQTGGFSKESILPKRNSDKLIARKKDWDPKKYGGFDSPTVAYSVLVVAKVEKGKSKKLKSVKELLGITIMERSSFEKNPIDFLEAKGYKEVKKDLIIKLPKYSLFELENGRKRMLASAGELQKGNELALPSKYVNFLYLASHYEKLKGSPEDNEQKQLFVEQHKHYLDEIIEQISEFSKRVILADANLDKVLSAYNKHRDKPIREQAENIIHLFTLTNLGAPAAFKYFDTTIDRKRYTSTKEVLDATLIHQSITGLYETRIDLSQLGGDGGGSSGSSGSSGSSGSSGGTAPLEEEYRLFLEAPIQNVTLLEQWKREIPKVWAEINPPGLASTQAPIHVQLLSTALPVRVRQYPITLEAKRSLRETIRKFRAAGILRPVHSPWNTPLLPVRKSGTSEYRMVQDLREVNKRVETIHPTVPNPYTLLSLLPPDRIWYSVLDLKDAFFCIPLAPESQLIFAFEWADAEEGESGQLTWTRLPQGFKNSPTLFNEALNRDLQGFRLDHPSVSLLQYVDDLLIAADTQAACLSATRDLLMTLAELGYRVSGKKAQLCQEEVTYLGFKIHKGSRSLSNSRTQAILQIPVPKTKRQVREFLGTIGYCRLWIPGFAELAQPLYAATRPGNDPLVWGEKEEEAFQSLKLALTQPPALALPSLDKPFQLFVEETSGAAKGVLTQALGPWKRPVAYLSKRLDPVAAGWPRCLRAIAAAALLTREASKLTFGQDIEITSSHNLESLLRSPPDKWLTNARITQYQVLLLDPPRVRFKQTAALNPATLLPETDDTLPIHHCLDTLDSLTSTRPDLTDQPLAQAEATLFTDGSSYIRDGKRYAGAAVVTLDSVIWAEPLPIGTSAQKAELIALTKALEWSKDKSVNIYTDSRYAFATLHVHGMIYRERGWLTAGGKAIKNAPEILALLTAVWLPKRVAVMHCKGHQKDDAPTSTGNRRADEVAREVAIRPLSTQATISAGKRTADGSEFEKRTADGSEFESPKKKAKVE

SEQ ID NO: 1144 - protein, 2090 aa, synthetic construct
MPAAKRVKLDGGDKKYSIGLDIGTNSVGWAVITDEYKVPSKKFKVLGNTDRHSIKKNLIGALLFDSGETAEATRLKRTARRRYTRRKNRICYLQEIFSNEMAKVDDSFFHRLEESFLVEEDKKHERHPIFGNIVDEVAYHEKYPTIYHLRKKLVDSTDKADLRLIYLALAHMIKFRGHFLIEGDLNPDNSDVDKLFIQLVQTYNQLFEENPINASGVDAKAILSARLSKSRRLENLIAQLPGEKKNGLFGNLIALSLGLTPNFKSNFDLAEDAKLQLSKDTYDDDLDNLLAQIGDQYADLFLAAKNLSDAILLSDILRVNTEITKAPLSASMIKRYDEHHQDLTLLKALVRQQLPEKYKEIFFDQSKNGYAGYIDGGASQEEFYKFIKPILEKMDGTEELLVKLNREDLLRKQRTFDNGSIPHQIHLGELHAILRRQEDFYPFLKDNREKIEKILTFRIPYYVGPLARGNSRFAWMTRKSEETITPWNFEEVVDKGASAQSFIERMTNFDKNLPNEKVLPKHSLLYEYFTVYNELTKVKYVTEGMRKPAFLSGEQKKAIVDLLFKTNRKVTVKQLKEDYFKKIECFDSVEISGVEDRFNASLGTYHDLLKIIKDKDFLDNEENEDILEDIVLTLTLFEDREMIEERLKTYAHLFDDKVMKQLKRRRYTGWGRLSRKLINGIRDKQSGKTILDFLKSDGFANRNFMQLIHDDSLTFKEDIQKAQVSGQGDSLHEHIANLAGSPAIKKGILQTVKVVDELVKVMGRHKPENIVIEMARENQTTQKGQKNSRERMKRIEEGIKELGSQILKEHPVENTQLQNEKLYLYYLQNGRDMYVDQELDINRLSDYDVDHIVPQSFLKDDSIDNKVLTRSDKARGKSDNVPSEEVVKKMKNYWRQLLNAKLITQRKFDNLTKAERGGLSELDKAGFIKRQLVETRQITKHVAQILDSRMNTKYDENDKLIREVKVITLKSKLVSDFRKDFQFYKVREINNYHHAHDAYLNAVVGTALIKKYPKLESEFVYGDYKVYDVRKMIAKSEQEIGKATAKYFFYSNIMNFFKTEITLANGEIRKRPLIETNGETGEIVWDKGRDFATVRKVLSMPQVNIVKKTEVQTGGFSKESILPKRNSDKLIARKKDWDPKKYGGFDSPTVAYSVLVVAKVEKGKSKKLKSVKELLGITIMERSSFEKNPIDFLEAKGYKEVKKDLIIKLPKYSLFELENGRKRMLASAGELQKGNELALPSKYVNFLYLASHYEKLKGSPEDNEQKQLFVEQHKHYLDEIIEQISEFSKRVILADANLDKVLSAYNKHRDKPIREQAENIIHLFTLTNLGAPAAFKYFDTTIDRKRYTSTKEVLDATLIHQSITGLYETRIDLSQLGGDGGGGSGGTAPLEEEYRLFLEAPIQNVTLLEQWKREIPKVWAEINPPGLASTQAPIHVQLLSTALPVRVRQYPITLEAKRSLRETIRKFRAAGILRPVHSPWNTPLLPVRKSGTSEYRMVQDLREVNKRVETIHPTVPNPYTLLSLLPPDRIWYSVLDLKDAFFCIPLAPESQLIFAFEWADAEEGESGQLTWTRLPQGFKNSPTLFNEALNRDLQGFRLDHPSVSLLQYVDDLLIAADTQAACLSATRDLLMTLAELGYRVSGKKAQLCQEEVTYLGFKIHKGSRSLSNSRTQAILQIPVPKTKRQVREFLGTIGYCRLWIPGFAELAQPLYAATRPGNDPLVWGEKEEEAFQSLKLALTQPPALALPSLDKPFQLFVEETSGAAKGVLTQALGPWKRPVAYLSKRLDPVAAGWPRCLRAIAAAALLTREASKLTFGQDIEITSSHNLESLLRSPPDKWLTNARITQYQVLLLDPPRVRFKQTAALNPATLLPETDDTLPIHHCLDTLDSLTSTRPDLTDQPLAQAEATLFTDGSSYIRDGKRYAGAAVVTLDSVIWAEPLPIGTSAQKAELIALTKALEWSKDKSVNIYTDSRYAFATLHVHGMIYRERGWLTAGGKAIKNAPEILALLTAVWLPKRVAVMHCKGHQKDDAPTSTGNRRADEVAREVAIRPLSTQATISAGKRTADGSEFEKRTADGSEFESPKKKAKVE

SEQ ID NO: 1145 - protein, 2098 aa, synthetic construct
MPAAKRVKLDGGDKKYSIGLDIGTNSVGWAVITDEYKVPSKKFKVLGNTDRHSIKKNLIGALLFDSGETAEATRLKRTARRRYTRRKNRICYLQEIFSNEMAKVDDSFFHRLEESFLVEEDKKHERHPIFGNIVDEVAYHEKYPTIYHLRKKLVDSTDKADLRLIYLALAHMIKFRGHFLIEGDLNPDNSDVDKLFIQLVQTYNQLFEENPINASGVDAKAILSARLSKSRRLENLIAQLPGEKKNGLFGNLIALSLGLTPNFKSNFDLAEDAKLQLSKDTYDDDLDNLLAQIGDQYADLFLAAKNLSDAILLSDILRVNTEITKAPLSASMIKRYDEHHQDLTLLKALVRQQLPEKYKEIFFDQSKNGYAGYIDGGASQEEFYKFIKPILEKMDGTEELLVKLNREDLLRKQRTFDNGSIPHQIHLGELHAILRRQEDFYPFLKDNREKIEKILTFRIPYYVGPLARGNSRFAWMTRKSEETITPWNFEEVVDKGASAQSFIERMTNFDKNLPNEKVLPKHSLLYEYFTVYNELTKVKYVTEGMRKPAFLSGEQKKAIVDLLFKTNRKVTVKQLKEDYFKKIECFDSVEISGVEDRFNASLGTYHDLLKIIKDKDFLDNEENEDILEDIVLTLTLFEDREMIEERLKTYAHLFDDKVMKQLKRRRYTGWGRLSRKLINGIRDKQSGKTILDFLKSDGFANRNFMQLIHDDSLTFKEDIQKAQVSGQGDSLHEHIANLAGSPAIKKGILQTVKVVDELVKVMGRHKPENIVIEMARENQTTQKGQKNSRERMKRIEEGIKELGSQILKEHPVENTQLQNEKLYLYYLQNGRDMYVDQELDINRLSDYDVDHIVPQSFLKDDSIDNKVLTRSDKARGKSDNVPSEEVVKKMKNYWRQLLNAKLITQRKFDNLTKAERGGLSELDKAGFIKRQLVETRQITKHVAQILDSRMNTKYDENDKLIREVKVITLKSKLVSDFRKDFQFYKVREINNYHHAHDAYLNAVVGTALIKKYPKLESEFVYGDYKVYDVRKMIAKSEQEIGKATAKYFFYSNIMNFFKTEITLANGEIRKRPLIETNGETGEIVWDKGRDFATVRKVLSMPQVNIVKKTEVQTGGFSKESILPKRNSDKLIARKKDWDPKKYGGFDSPTVAYSVLVVAKVEKGKSKKLKSVKELLGITIMERSSFEKNPIDFLEAKGYKEVKKDLIIKLPKYSLFELENGRKRMLASAGELQKGNELALPSKYVNFLYLASHYEKLKGSPEDNEQKQLFVEQHKHYLDEIIEQISEFSKRVILADANLDKVLSAYNKHRDKPIREQAENIIHLFTLTNLGAPAAFKYFDTTIDRKRYTSTKEVLDATLIHQSITGLYETRIDLSQLGGDGGEAAAKPAPGSSGGTAPLEEEYRLFLEAPIQNVTLLEQWKREIPKVWAEINPPGLASTQAPIHVQLLSTALPVRVRQYPITLEAKRSLRETIRKFRAAGILRPVHSPWNTPLLPVRKSGTSEYRMVQDLREVNKRVETIHPTVPNPYTLLSLLPPDRIWYSVLDLKDAFFCIPLAPESQLIFAFEWADAEEGESGQLTWTRLPQGFKNSPTLFNEALNRDLQGFRLDHPSVSLLQYVDDLLIAADTQAACLSATRDLLMTLAELGYRVSGKKAQLCQEEVTYLGFKIHKGSRSLSNSRTQAILQIPVPKTKRQVREFLGTIGYCRLWIPGFAELAQPLYAATRPGNDPLVWGEKEEEAFQSLKLALTQPPALALPSLDKPFQLFVEETSGAAKGVLTQALGPWKRPVAYLSKRLDPVAAGWPRCLRAIAAAALLTREASKLTFGQDIEITSSHNLESLLRSPPDKWLTNARITQYQVLLLDPPRVRFKQTAALNPATLLPETDDTLPIHHCLDTLDSLTSTRPDLTDQPLAQAEATLFTDGSSYIRDGKRYAGAAVVTLDSVIWAEPLPIGTSAQKAELIALTKALEWSKDKSVNIYTDSRYAFATLHVHGMIYRERGWLTAGGKAIKNAPEILALLTAVWLPKRVAVMHCKGHQKDDAPTSTGNRRADEVAREVAIRPLSTQATISAGKRTADGSEFEKRTADGSEFESPKKKAKVE

SEQ ID NO: 1146 - protein, 2133 aa, synthetic construct
MPAAKRVKLDGGDKKYSIGLDIGTNSVGWAVITDEYKVPSKKFKVLGNTDRHSIKKNLIGALLFDSGETAEATRLKRTARRRYTRRKNRICYLQEIFSNEMAKVDDSFFHRLEESFLVEEDKKHERHPIFGNIVDEVAYHEKYPTIYHLRKKLVDSTDKADLRLIYLALAHMIKFRGHFLIEGDLNPDNSDVDKLFIQLVQTYNQLFEENPINASGVDAKAILSARLSKSRRLENLIAQLPGEKKNGLFGNLIALSLGLTPNFKSNFDLAEDAKLQLSKDTYDDDLDNLLAQIGDQYADLFLAAKNLSDAILLSDILRVNTEITKAPLSASMIKRYDEHHQDLTLLKALVRQQLPEKYKEIFFDQSKNGYAGYIDGGASQEEFYKFIKPILEKMDGTEELLVKLNREDLLRKQRTFDNGSIPHQIHLGELHAILRRQEDFYPFLKDNREKIEKILTFRIPYYVGPLARGNSRFAWMTRKSEETITPWNFEEVVDKGASAQSFIERMTNFDKNLPNEKVLPKHSLLYEYFTVYNELTKVKYVTEGMRKPAFLSGEQKKAIVDLLFKTNRKVTVKQLKEDYFKKIECFDSVEISGVEDRFNASLGTYHDLLKIIKDKDFLDNEENEDILEDIVLTLTLFEDREMIEERLKTYAHLFDDKVMKQLKRRRYTGWGRLSRKLINGIRDKQSGKTILDFLKSDGFANRNFMQLIHDDSLTFKEDIQKAQVSGQGDSLHEHIANLAGSPAIKKGILQTVKVVDELVKVMGRHKPENIVIEMARENQTTQKGQKNSRERMKRIEEGIKELGSQILKEHPVENTQLQNEKLYLYYLQNGRDMYVDQELDINRLSDYDVDHIVPQSFLKDDSIDNKVLTRSDKARGKSDNVPSEEVVKKMKNYWRQLLNAKLITQRKFDNLTKAERGGLSELDKAGFIKRQLVETRQITKHVAQILDSRMNTKYDENDKLIREVKVITLKSKLVSDFRKDFQFYKVREINNYHHAHDAYLNAVVGTALIKKYPKLESEFVYGDYKVYDVRKMIAKSEQEIGKATAKYFFYSNIMNFFKTEITLANGEIRKRPLIETNGETGEIVWDKGRDFATVRKVLSMPQVNIVKKTEVQTGGFSKESILPKRNSDKLIARKKDWDPKKYGGFDSPTVAYSVLVVAKVEKGKSKKLKSVKELLGITIMERSSFEKNPIDFLEAKGYKEVKKDLIIKLPKYSLFELENGRKRMLASAGELQKGNELALPSKYVNFLYLASHYEKLKGSPEDNEQKQLFVEQHKHYLDEIIEQISEFSKRVILADANLDKVLSAYNKHRDKPIREQAENIIHLFTLTNLGAPAAFKYFDTTIDRKRYTSTKEVLDATLIHQSITGLYETRIDLSQLGGDGGAEAAAKEAAAKEAAAKEAAAKALEAEAAAKEAAAKEAAAKEAAAKAGGTAPLEEEYRLFLEAPIQNVTLLEQWKREIPKVWAEINPPGLASTQAPIHVQLLSTALPVRVRQYPITLEAKRSLRETIRKFRAAGILRPVHSPWNTPLLPVRKSGTSEYRMVQDLREVNKRVETIHPTVPNPYTLLSLLPPDRIWYSVLDLKDAFFCIPLAPESQLIFAFEWADAEEGESGQLTWTRLPQGFKNSPTLFNEALNRDLQGFRLDHPSVSLLQYVDDLLIAADTQAACLSATRDLLMTLAELGYRVSGKKAQLCQEEVTYLGFKIHKGSRSLSNSRTQAILQIPVPKTKRQVREFLGTIGYCRLWIPGFAELAQPLYAATRPGNDPLVWGEKEEEAFQSLKLALTQPPALALPSLDKPFQLFVEETSGAAKGVLTQALGPWKRPVAYLSKRLDPVAAGWPRCLRAIAAAALLTREASKLTFGQDIEITSSHNLESLLRSPPDKWLTNARITQYQVLLLDPPRVRFKQTAALNPATLLPETDDTLPIHHCLDTLDSLTSTRPDLTDQPLAQAEATLFTDGSSYIRDGKRYAGAAVVTLDSVIWAEPLPIGTSAQKAELIALTKALEWSKDKSVNIYTDSRYAFATLHVHGMIYRERGWLTAGGKAIKNAPEILALLTAVWLPKRVAVMHCKGHQKDDAPTSTGNRRADEVAREVAIRPLSTQATISAGKRTADGSEFEKRTADGSEFESPKKKAKVE

SEQ ID NO: 1147 - protein, 2098 aa, synthetic construct
MPAAKRVKLDGGDKKYSIGLDIGTNSVGWAVITDEYKVPSKKFKVLGNTDRHSIKKNLIGALLFDSGETAEATRLKRTARRRYTRRKNRICYLQEIFSNEMAKVDDSFFHRLEESFLVEEDKKHERHPIFGNIVDEVAYHEKYPTIYHLRKKLVDSTDKADLRLIYLALAHMIKFRGHFLIEGDLNPDNSDVDKLFIQLVQTYNQLFEENPINASGVDAKAILSARLSKSRRLENLIAQLPGEKKNGLFGNLIALSLGLTPNFKSNFDLAEDAKLQLSKDTYDDDLDNLLAQIGDQYADLFLAAKNLSDAILLSDILRVNTEITKAPLSASMIKRYDEHHQDLTLLKALVRQQLPEKYKEIFFDQSKNGYAGYIDGGASQEEFYKFIKPILEKMDGTEELLVKLNREDLLRKQRTFDNGSIPHQIHLGELHAILRRQEDFYPFLKDNREKIEKILTFRIPYYVGPLARGNSRFAWMTRKSEETITPWNFEEVVDKGASAQSFIERMTNFDKNLPNEKVLPKHSLLYEYFTVYNELTKVKYVTEGMRKPAFLSGEQKKAIVDLLFKTNRKVTVKQLKEDYFKKIECFDSVEISGVEDRFNASLGTYHDLLKIIKDKDFLDNEENEDILEDIVLTLTLFEDREMIEERLKTYAHLFDDKVMKQLKRRRYTGWGRLSRKLINGIRDKQSGKTILDFLKSDGFANRNFMQLIHDDSLTFKEDIQKAQVSGQGDSLHEHIANLAGSPAIKKGILQTVKVVDELVKVMGRHKPENIVIEMARENQTTQKGQKNSRERMKRIEEGIKELGSQILKEHPVENTQLQNEKLYLYYLQNGRDMYVDQELDINRLSDYDVDHIVPQSFLKDDSIDNKVLTRSDKARGKSDNVPSEEVVKKMKNYWRQLLNAKLITQRKFDNLTKAERGGLSELDKAGFIKRQLVETRQITKHVAQILDSRMNTKYDENDKLIREVKVITLKSKLVSDFRKDFQFYKVREINNYHHAHDAYLNAVVGTALIKKYPKLESEFVYGDYKVYDVRKMIAKSEQEIGKATAKYFFYSNIMNFFKTEITLANGEIRKRPLIETNGETGEIVWDKGRDFATVRKVLSMPQVNIVKKTEVQTGGFSKESILPKRNSDKLIARKKDWDPKKYGGFDSPTVAYSVLVVAKVEKGKSKKLKSVKELLGITIMERSSFEKNPIDFLEAKGYKEVKKDLIIKLPKYSLFELENGRKRMLASAGELQKGNELALPSKYVNFLYLASHYEKLKGSPEDNEQKQLFVEQHKHYLDEIIEQISEFSKRVILADANLDKVLSAYNKHRDKPIREQAENIIHLFTLTNLGAPAAFKYFDTTIDRKRYTSTKEVLDATLIHQSITGLYETRIDLSQLGGDGGGGSEAAAKPAPGGTAPLEEEYRLFLEAPIQNVTLLEQWKREIPKVWAEINPPGLASTQAPIHVQLLSTALPVRVRQYPITLEAKRSLRETIRKFRAAGILRPVHSPWNTPLLPVRKSGTSEYRMVQDLREVNKRVETIHPTVPNPYTLLSLLPPDRIWYSVLDLKDAFFCIPLAPESQLIFAFEWADAEEGESGQLTWTRLPQGFKNSPTLFNEALNRDLQGFRLDHPSVSLLQYVDDLLIAADTQAACLSATRDLLMTLAELGYRVSGKKAQLCQEEVTYLGFKIHKGSRSLSNSRTQAILQIPVPKTKRQVREFLGTIGYCRLWIPGFAELAQPLYAATRPGNDPLVWGEKEEEAFQSLKLALTQPPALALPSLDKPFQLFVEETSGAAKGVLTQALGPWKRPVAYLSKRLDPVAAGWPRCLRAIAAAALLTREASKLTFGQDIEITSSHNLESLLRSPPDKWLTNARITQYQVLLLDPPRVRFKQTAALNPATLLPETDDTLPIHHCLDTLDSLTSTRPDLTDQPLAQAEATLFTDGSSYIRDGKRYAGAAVVTLDSVIWAEPLPIGTSAQKAELIALTKALEWSKDKSVNIYTDSRYAFATLHVHGMIYRERGWLTAGGKAIKNAPEILALLTAVWLPKRVAVMHCKGHQKDDAPTSTGNRRADEVAREVAIRPLSTQATISAGKRTADGSEFEKRTADGSEFESPKKKAKVE

SEQ ID NO: 1148 - protein, 2090 aa, synthetic construct
MPAAKRVKLDGGDKKYSIGLDIGTNSVGWAVITDEYKVPSKKFKVLGNTDRHSIKKNLIGALLFDSGETAEATRLKRTARRRYTRRKNRICYLQEIFSNEMAKVDDSFFHRLEESFLVEEDKKHERHPIFGNIVDEVAYHEKYPTIYHLRKKLVDSTDKADLRLIYLALAHMIKFRGHFLIEGDLNPDNSDVDKLFIQLVQTYNQLFEENPINASGVDAKAILSARLSKSRRLENLIAQLPGEKKNGLFGNLIALSLGLTPNFKSNFDLAEDAKLQLSKDTYDDDLDNLLAQIGDQYADLFLAAKNLSDAILLSDILRVNTEITKAPLSASMIKRYDEHHQDLTLLKALVRQQLPEKYKEIFFDQSKNGYAGYIDGGASQEEFYKFIKPILEKMDGTEELLVKLNREDLLRKQRTFDNGSIPHQIHLGELHAILRRQEDFYPFLKDNREKIEKILTFRIPYYVGPLARGNSRFAWMTRKSEETITPWNFEEVVDKGASAQSFIERMTNFDKNLPNEKVLPKHSLLYEYFTVYNELTKVKYVTEGMRKPAFLSGEQKKAIVDLLFKTNRKVTVKQLKEDYFKKIECFDSVEISGVEDRFNASLGTYHDLLKIIKDKDFLDNEENEDILEDIVLTLTLFEDREMIEERLKTYAHLFDDKVMKQLKRRRYTGWGRLSRKLINGIRDKQSGKTILDFLKSDGFANRNFMQLIHDDSLTFKEDIQKAQVSGQGDSLHEHIANLAGSPAIKKGILQTVKVVDELVKVMGRHKPENIVIEMARENQTTQKGQKNSRERMKRIEEGIKELGSQILKEHPVENTQLQNEKLYLYYLQNGRDMYVDQELDINRLSDYDVDHIVPQSFLKDDSIDNKVLTRSDKARGKSDNVPSEEVVKKMKNYWRQLLNAKLITQRKFDNLTKAERGGLSELDKAGFIKRQLVETRQITKHVAQILDSRMNTKYDENDKLIREVKVITLKSKLVSDFRKDFQFYKVREINNYHHAHDAYLNAVVGTALIKKYPKLESEFVYGDYKVYDVRKMIAKSEQEIGKATAKYFFYSNIMNFFKTEITLANGEIRKRPLIETNGETGEIVWDKGRDFATVRKVLSMPQVNIVKKTEVQTGGFSKESILPKRNSDKLIARKKDWDPKKYGGFDSPTVAYSVLVVAKVEKGKSKKLKSVKELLGITIMERSSFEKNPIDFLEAKGYKEVKKDLIIKLPKYSLFELENGRKRMLASAGELQKGNELALPSKYVNFLYLASHYEKLKGSPEDNEQKQLFVEQHKHYLDEIIEQISEFSKRVILADANLDKVLSAYNKHRDKPIREQAENIIHLFTLTNLGAPAAFKYFDTTIDRKRYTSTKEVLDATLIHQSITGLYETRIDLSQLGGDGGPAPGGTAPLEEEYRLFLEAPIQNVTLLEQWKREIPKVWAEINPPGLASTQAPIHVQLLSTALPVRVRQYPITLEAKRSLRETIRKFRAAGILRPVHSPWNTPLLPVRKSGTSEYRMVQDLREVNKRVETIHPTVPNPYTLLSLLPPDRIWYSVLDLKDAFFCIPLAPESQLIFAFEWADAEEGESGQLTWTRLPQGFKNSPTLFNEALNRDLQGFRLDHPSVSLLQYVDDLLIAADTQAACLSATRDLLMTLAELGYRVSGKKAQLCQEEVTYLGFKIHKGSRSLSNSRTQAILQIPVPKTKRQVREFLGTIGYCRLWIPGFAELAQPLYAATRPGNDPLVWGEKEEEAFQSLKLALTQPPALALPSLDKPFQLFVEETSGAAKGVLTQALGPWKRPVAYLSKRLDPVAAGWPRCLRAIAAAALLTREASKLTFGQDIEITSSHNLESLLRSPPDKWLTNARITQYQVLLLDPPRVRFKQTAALNPATLLPETDDTLPIHHCLDTLDSLTSTRPDLTDQPLAQAEATLFTDGSSYIRDGKRYAGAAVVTLDSVIWAEPLPIGTSAQKAELIALTKALEWSKDKSVNIYTDSRYAFATLHVHGMIYRERGWLTAGGKAIKNAPEILALLTAVWLPKRVAVMHCKGHQKDDAPTSTGNRRADEVAREVAIRPLSTQATISAGKRTADGSEFEKRTADGSEFESPKKKAKVE

SEQ ID NO: 1149 - protein, 2092 aa, synthetic construct
MPAAKRVKLDGGDKKYSIGLDIGTNSVGWAVITDEYKVPSKKFKVLGNTDRHSIKKNLIGALLFDSGETAEATRLKRTARRRYTRRKNRICYLQEIFSNEMAKVDDSFFHRLEESFLVEEDKKHERHPIFGNIVDEVAYHEKYPTIYHLRKKLVDSTDKADLRLIYLALAHMIKFRGHFLIEGDLNPDNSDVDKLFIQLVQTYNQLFEENPINASGVDAKAILSARLSKSRRLENLIAQLPGEKKNGLFGNLIALSLGLTPNFKSNFDLAEDAKLQLSKDTYDDDLDNLLAQIGDQYADLFLAAKNLSDAILLSDILRVNTEITKAPLSASMIKRYDEHHQDLTLLKALVRQQLPEKYKEIFFDQSKNGYAGYIDGGASQEEFYKFIKPILEKMDGTEELLVKLNREDLLRKQRTFDNGSIPHQIHLGELHAILRRQEDFYPFLKDNREKIEKILTFRIPYYVGPLARGNSRFAWMTRKSEETITPWNFEEVVDKGASAQSFIERMTNFDKNLPNEKVLPKHSLLYEYFTVYNELTKVKYVTEGMRKPAFLSGEQKKAIVDLLFKTNRKVTVKQLKEDYFKKIECFDSVEISGVEDRFNASLGTYHDLLKIIKDKDFLDNEENEDILEDIVLTLTLFEDREMIEERLKTYAHLFDDKVMKQLKRRRYTGWGRLSRKLINGIRDKQSGKTILDFLKSDGFANRNFMQLIHDDSLTFKEDIQKAQVSGQGDSLHEHIANLAGSPAIKKGILQTVKVVDELVKVMGRHKPENIVIEMARENQTTQKGQKNSRERMKRIEEGIKELGSQILKEHPVENTQLQNEKLYLYYLQNGRDMYVDQELDINRLSDYDVDHIVPQSFLKDDSIDNKVLTRSDKARGKSDNVPSEEVVKKMKNYWRQLLNAKLITQRKFDNLTKAERGGLSELDKAGFIKRQLVETRQITKHVAQILDSRMNTKYDENDKLIREVKVITLKSKLVSDFRKDFQFYKVREINNYHHAHDAYLNAVVGTALIKKYPKLESEFVYGDYKVYDVRKMIAKSEQEIGKATAKYFFYSNIMNFFKTEITLANGEIRKRPLIETNGETGEIVWDKGRDFATVRKVLSMPQVNIVKKTEVQTGGFSKESILPKRNSDKLIARKKDWDPKKYGGFDSPTVAYSVLVVAKVEKGKSKKLKSVKELLGITIMERSSFEKNPIDFLEAKGYKEVKKDLIIKLPKYSLFELENGRKRMLASAGELQKGNELALPSKYVNFLYLASHYEKLKGSPEDNEQKQLFVEQHKHYLDEIIEQISEFSKRVILADANLDKVLSAYNKHRDKPIREQAENIIHLFTLTNLGAPAAFKYFDTTIDRKRYTSTKEVLDATLIHQSITGLYETRIDLSQLGGDGGPAPAPGGTAPLEEEYRLFLEAPIQNVTLLEQWKREIPKVWAEINPPGLASTQAPIHVQLLSTALPVRVRQYPITLEAKRSLRETIRKFRAAGILRPVHSPWNTPLLPVRKSGTSEYRMVQDLREVNKRVETIHPTVPNPYTLLSLLPPDRIWYSVLDLKDAFFCIPLAPESQLIFAFEWADAEEGESGQLTWTRLPQGFKNSPTLFNEALNRDLQGFRLDHPSVSLLQYVDDLLIAADTQAACLSATRDLLMTLAELGYRVSGKKAQLCQEEVTYLGFKIHKGSRSLSNSRTQAILQIPVPKTKRQVREFLGTIGYCRLWIPGFAELAQPLYAATRPGNDPLVWGEKEEEAFQSLKLALTQPPALALPSLDKPFQLFVEETSGAAKGVLTQALGPWKRPVAYLSKRLDPVAAGWPRCLRAIAAAALLTREASKLTFGQDIEITSSHNLESLLRSPPDKWLTNARITQYQVLLLDPPRVRFKQTAALNPATLLPETDDTLPIHHCLDTLDSLTSTRPDLTDQPLAQAEATLFTDGSSYIRDGKRYAGAAVVTLDSVIWAEPLPIGTSAQKAELIALTKALEWSKDKSVNIYTDSRYAFATLHVHGMIYRERGWLTAGGKAIKNAPEILALLTAVWLPKRVAVMHCKGHQKDDAPTSTGNRRADEVAREVAIRPLSTQATISAGKRTADGSEFEKRTADGSEFESPKKKAKVE

SEQ ID NO: 1150 - protein, 2096 aa, synthetic construct
MPAAKRVKLDGGDKKYSIGLDIGTNSVGWAVITDEYKVPSKKFKVLGNTDRHSIKKNLIGALLFDSGETAEATRLKRTARRRYTRRKNRICYLQEIFSNEMAKVDDSFFHRLEESFLVEEDKKHERHPIFGNIVDEVAYHEKYPTIYHLRKKLVDSTDKADLRLIYLALAHMIKFRGHFLIEGDLNPDNSDVDKLFIQLVQTYNQLFEENPINASGVDAKAILSARLSKSRRLENLIAQLPGEKKNGLFGNLIALSLGLTPNFKSNFDLAEDAKLQLSKDTYDDDLDNLLAQIGDQYADLFLAAKNLSDAILLSDILRVNTEITKAPLSASMIKRYDEHHQDLTLLKALVRQQLPEKYKEIFFDQSKNGYAGYIDGGASQEEFYKFIKPILEKMDGTEELLVKLNREDLLRKQRTFDNGSIPHQIHLGELHAILRRQEDFYPFLKDNREKIEKILTFRIPYYVGPLARGNSRFAWMTRKSEETITPWNFEEVVDKGASAQSFIERMTNFDKNLPNEKVLPKHSLLYEYFTVYNELTKVKYVTEGMRKPAFLSGEQKKAIVDLLFKTNRKVTVKQLKEDYFKKIECFDSVEISGVEDRFNASLGTYHDLLKIIKDKDFLDNEENEDILEDIVLTLTLFEDREMIEERLKTYAHLFDDKVMKQLKRRRYTGWGRLSRKLINGIRDKQSGKTILDFLKSDGFANRNFMQLIHDDSLTFKEDIQKAQVSGQGDSLHEHIANLAGSPAIKKGILQTVKVVDELVKVMGRHKPENIVIEMARENQTTQKGQKNSRERMKRIEEGIKELGSQILKEHPVENTQLQNEKLYLYYLQNGRDMYVDQELDINRLSDYDVDHIVPQSFLKDDSIDNKVLTRSDKARGKSDNVPSEEVVKKMKNYWRQLLNAKLITQRKFDNLTKAERGGLSELDKAGFIKRQLVETRQITKHVAQILDSRMNTKYDENDKLIREVKVITLKSKLVSDFRKDFQFYKVREINNYHHAHDAYLNAVVGTALIKKYPKLESEFVYGDYKVYDVRKMIAKSEQEIGKATAKYFFYSNIMNFFKTEITLANGEIRKRPLIETNGETGEIVWDKGRDFATVRKVLSMPQVNIVKKTEVQTGGFSKESILPKRNSDKLIARKKDWDPKKYGGFDSPTVAYSVLVVAKVEKGKSKKLKSVKELLGITIMERSSFEKNPIDFLEAKGYKEVKKDLIIKLPKYSLFELENGRKRMLASAGELQKGNELALPSKYVNFLYLASHYEKLKGSPEDNEQKQLFVEQHKHYLDEIIEQISEFSKRVILADANLDKVLSAYNKHRDKPIREQAENIIHLFTLTNLGAPAAFKYFDTTIDRKRYTSTKEVLDATLIHQSITGLYETRIDLSQLGGDGGGGSPAPGGGGGTAPLEEEYRLFLEAPIQNVTLLEQWKREIPKVWAEINPPGLASTQAPIHVQLLSTALPVRVRQYPITLEAKRSLRETIRKFRAAGILRPVHSPWNTPLLPVRKSGTSEYRMVQDLREVNKRVETIHPTVPNPYTLLSLLPPDRIWYSVLDLKDAFFCIPLAPESQLIFAFEWADAEEGESGQLTWTRLPQGFKNSPTLFNEALNRDLQGFRLDHPSVSLLQYVDDLLIAADTQAACLSATRDLLMTLAELGYRVSGKKAQLCQEEVTYLGFKIHKGSRSLSNSRTQAILQIPVPKTKRQVREFLGTIGYCRLWIPGFAELAQPLYAATRPGNDPLVWGEKEEEAFQSLKLALTQPPALALPSLDKPFQLFVEETSGAAKGVLTQALGPWKRPVAYLSKRLDPVAAGWPRCLRAIAAAALLTREASKLTFGQDIEITSSHNLESLLRSPPDKWLTNARITQYQVLLLDPPRVRFKQTAALNPATLLPETDDTLPIHHCLDTLDSLTSTRPDLTDQPLAQAEATLFTDGSSYIRDGKRYAGAAVVTLDSVIWAEPLPIGTSAQKAELIALTKALEWSKDKSVNIYTDSRYAFATLHVHGMIYRERGWLTAGGKAIKNAPEILALLTAVWLPKRVAVMHCKGHQKDDAPTSTGNRRADEVAREVAIRPLSTQATISAGKRTADGSEFEKRTADGSEFESPKKKAKVE

SEQ ID NO: 1151 - protein, 2098 aa, synthetic construct
MPAAKRVKLDGGDKKYSIGLDIGTNSVGWAVITDEYKVPSKKFKVLGNTDRHSIKKNLIGALLFDSGETAEATRLKRTARRRYTRRKNRICYLQEIFSNEMAKVDDSFFHRLEESFLVEEDKKHERHPIFGNIVDEVAYHEKYPTIYHLRKKLVDSTDKADLRLIYLALAHMIKFRGHFLIEGDLNPDNSDVDKLFIQLVQTYNQLFEENPINASGVDAKAILSARLSKSRRLENLIAQLPGEKKNGLFGNLIALSLGLTPNFKSNFDLAEDAKLQLSKDTYDDDLDNLLAQIGDQYADLFLAAKNLSDAILLSDILRVNTEITKAPLSASMIKRYDEHHQDLTLLKALVRQQLPEKYKEIFFDQSKNGYAGYIDGGASQEEFYKFIKPILEKMDGTEELLVKLNREDLLRKQRTFDNGSIPHQIHLGELHAILRRQEDFYPFLKDNREKIEKILTFRIPYYVGPLARGNSRFAWMTRKSEETITPWNFEEVVDKGASAQSFIERMTNFDKNLPNEKVLPKHSLLYEYFTVYNELTKVKYVTEGMRKPAFLSGEQKKAIVDLLFKTNRKVTVKQLKEDYFKKIECFDSVEISGVEDRFNASLGTYHDLLKIIKDKDFLDNEENEDILEDIVLTLTLFEDREMIEERLKTYAHLFDDKVMKQLKRRRYTGWGRLSRKLINGIRDKQSGKTILDFLKSDGFANRNFMQLIHDDSLTFKEDIQKAQVSGQGDSLHEHIANLAGSPAIKKGILQTVKVVDELVKVMGRHKPENIVIEMARENQTTQKGQKNSRERMKRIEEGIKELGSQILKEHPVENTQLQNEKLYLYYLQNGRDMYVDQELDINRLSDYDVDHIVPQSFLKDDSIDNKVLTRSDKARGKSDNVPSEEVVKKMKNYWRQLLNAKLITQRKFDNLTKAERGGLSELDKAGFIKRQLVETRQITKHVAQILDSRMNTKYDENDKLIREVKVITLKSKLVSDFRKDFQFYKVREINNYHHAHDAYLNAVVGTALIKKYPKLESEFVYGDYKVYDVRKMIAKSEQEIGKATAKYFFYSNIMNFFKTEITLANGEIRKRPLIETNGETGEIVWDKGRDFATVRKVLSMPQVNIVKKTEVQTGGFSKESILPKRNSDKLIARKKDWDPKKYGGFDSPTVAYSVLVVAKVEKGKSKKLKSVKELLGITIMERSSFEKNPIDFLEAKGYKEVKKDLIIKLPKYSLFELENGRKRMLASAGELQKGNELALPSKYVNFLYLASHYEKLKGSPEDNEQKQLFVEQHKHYLDEIIEQISEFSKRVILADANLDKVLSAYNKHRDKPIREQAENIIHLFTLTNLGAPAAFKYFDTTIDRKRYTSTKEVLDATLIHQSITGLYETRIDLSQLGGDGGGSSGGGEAAAKGGTAPLEEEYRLFLEAPIQNVTLLEQWKREIPKVWAEINPPGLASTQAPIHVQLLSTALPVRVRQYPITLEAKRSLRETIRKFRAAGILRPVHSPWNTPLLPVRKSGTSEYRMVQDLREVNKRVETIHPTVPNPYTLLSLLPPDRIWYSVLDLKDAFFCIPLAPESQLIFAFEWADAEEGESGQLTWTRLPQGFKNSPTLFNEALNRDLQGFRLDHPSVSLLQYVDDLLIAADTQAACLSATRDLLMTLAELGYRVSGKKAQLCQEEVTYLGFKIHKGSRSLSNSRTQAILQIPVPKTKRQVREFLGTIGYCRLWIPGFAELAQPLYAATRPGNDPLVWGEKEEEAFQSLKLALTQPPALALPSLDKPFQLFVEETSGAAKGVLTQALGPWKRPVAYLSKRLDPVAAGWPRCLRAIAAAALLTREASKLTFGQDIEITSSHNLESLLRSPPDKWLTNARITQYQVLLLDPPRVRFKQTAALNPATLLPETDDTLPIHHCLDTLDSLTSTRPDLTDQPLAQAEATLFTDGSSYIRDGKRYAGAAVVTLDSVIWAEPLPIGTSAQKAELIALTKALEWSKDKSVNIYTDSRYAFATLHVHGMIYRERGWLTAGGKAIKNAPEILALLTAVWLPKRVAVMHCKGHQKDDAPTSTGNRRADEVAREVAIRPLSTQATISAGKRTADGSEFEKRTADGSEFESPKKKAKVE

SEQ ID NO: 1152 - protein, 2097 aa, synthetic construct
MPAAKRVKLDGGDKKYSIGLDIGTNSVGWAVITDEYKVPSKKFKVLGNTDRHSIKKNLIGALLFDSGETAEATRLKRTARRRYTRRKNRICYLQEIFSNEMAKVDDSFFHRLEESFLVEEDKKHERHPIFGNIVDEVAYHEKYPTIYHLRKKLVDSTDKADLRLIYLALAHMIKFRGHFLIEGDLNPDNSDVDKLFIQLVQTYNQLFEENPINASGVDAKAILSARLSKSRRLENLIAQLPGEKKNGLFGNLIALSLGLTPNFKSNFDLAEDAKLQLSKDTYDDDLDNLLAQIGDQYADLFLAAKNLSDAILLSDILRVNTEITKAPLSASMIKRYDEHHQDLTLLKALVRQQLPEKYKEIFFDQSKNGYAGYIDGGASQEEFYKFIKPILEKMDGTEELLVKLNREDLLRKQRTFDNGSIPHQIHLGELHAILRRQEDFYPFLKDNREKIEKILTFRIPYYVGPLARGNSRFAWMTRKSEETITPWNFEEVVDKGASAQSFIERMTNFDKNLPNEKVLPKHSLLYEYFTVYNELTKVKYVTEGMRKPAFLSGEQKKAIVDLLFKTNRKVTVKQLKEDYFKKIECFDSVEISGVEDRFNASLGTYHDLLKIIKDKDFLDNEENEDILEDIVLTLTLFEDREMIEERLKTYAHLFDDKVMKQLKRRRYTGWGRLSRKLINGIRDKQSGKTILDFLKSDGFANRNFMQLIHDDSLTFKEDIQKAQVSGQGDSLHEHIANLAGSPAIKKGILQTVKVVDELVKVMGRHKPENIVIEMARENQTTQKGQKNSRERMKRIEEGIKELGSQILKEHPVENTQLQNEKLYLYYLQNGRDMYVDQELDINRLSDYDVDHIVPQSFLKDDSIDNKVLTRSDKARGKSDNVPSEEVVKKMKNYWRQLLNAKLITQRKFDNLTKAERGGLSELDKAGFIKRQLVETRQITKHVAQILDSRMNTKYDENDKLIREVKVITLKSKLVSDFRKDFQFYKVREINNYHHAHDAYLNAVVGTALIKKYPKLESEFVYGDYKVYDVRKMIAKSEQEIGKATAKYFFYSNIMNFFKTEITLANGEIRKRPLIETNGETGEIVWDKGRDFATVRKVLSMPQVNIVKKTEVQTGGFSKESILPKRNSDKLIARKKDWDPKKYGGFDSPTVAYSVLVVAKVEKGKSKKLKSVKELLGITIMERSSFEKNPIDFLEAKGYKEVKKDLIIKLPKYSLFELENGRKRMLASAGELQKGNELALPSKYVNFLYLASHYEKLKGSPEDNEQKQLFVEQHKHYLDEIIEQISEFSKRVILADANLDKVLSAYNKHRDKPIREQAENIIHLFTLTNLGAPAAFKYFDTTIDRKRYTSTKEVLDATLIHQSITGLYETRIDLSQLGGDGGEAAAKEAAAKGGTAPLEEEYRLFLEAPIQNVTLLEQWKREIPKVWAEINPPGLASTQAPIHVQLLSTALPVRVRQYPITLEAKRSLRETIRKFRAAGILRPVHSPWNTPLLPVRKSGTSEYRMVQDLREVNKRVETIHPTVPNPYTLLSLLPPDRIWYSVLDLKDAFFCIPLAPESQLIFAFEWADAEEGESGQLTWTRLPQGFKNSPTLFNEALNRDLQGFRLDHPSVSLLQYVDDLLIAADTQAACLSATRDLLMTLAELGYRVSGKKAQLCQEEVTYLGFKIHKGSRSLSNSRTQAILQIPVPKTKRQVREFLGTIGYCRLWIPGFAELAQPLYAATRPGNDPLVWGEKEEEAFQSLKLALTQPPALALPSLDKPFQLFVEETSGAAKGVLTQALGPWKRPVAYLSKRLDPVAAGWPRCLRAIAAAALLTREASKLTFGQDIEITSSHNLESLLRSPPDKWLTNARITQYQVLLLDPPRVRFKQTAALNPATLLPETDDTLPIHHCLDTLDSLTSTRPDLTDQPLAQAEATLFTDGSSYIRDGKRYAGAAVVTLDSVIWAEPLPIGTSAQKAELIALTKALEWSKDKSVNIYTDSRYAFATLHVHGMIYRERGWLTAGGKAIKNAPEILALLTAVWLPKRVAVMHCKGHQKDDAPTSTGNRRADEVAREVAIRPLSTQATISAGKRTADGSEFEKRTADGSEFESPKKKAKVE

SEQ ID NO: 1153 - protein, 2096 aa, synthetic construct
MPAAKRVKLDGGDKKYSIGLDIGTNSVGWAVITDEYKVPSKKFKVLGNTDRHSIKKNLIGALLFDSGETAEATRLKRTARRRYTRRKNRICYLQEIFSNEMAKVDDSFFHRLEESFLVEEDKKHERHPIFGNIVDEVAYHEKYPTIYHLRKKLVDSTDKADLRLIYLALAHMIKFRGHFLIEGDLNPDNSDVDKLFIQLVQTYNQLFEENPINASGVDAKAILSARLSKSRRLENLIAQLPGEKKNGLFGNLIALSLGLTPNFKSNFDLAEDAKLQLSKDTYDDDLDNLLAQIGDQYADLFLAAKNLSDAILLSDILRVNTEITKAPLSASMIKRYDEHHQDLTLLKALVRQQLPEKYKEIFFDQSKNGYAGYIDGGASQEEFYKFIKPILEKMDGTEELLVKLNREDLLRKQRTFDNGSIPHQIHLGELHAILRRQEDFYPFLKDNREKIEKILTFRIPYYVGPLARGNSRFAWMTRKSEETITPWNFEEVVDKGASAQSFIERMTNFDKNLPNEKVLPKHSLLYEYFTVYNELTKVKYVTEGMRKPAFLSGEQKKAIVDLLFKTNRKVTVKQLKEDYFKKIECFDSVEISGVEDRFNASLGTYHDLLKIIKDKDFLDNEENEDILEDIVLTLTLFEDREMIEERLKTYAHLFDDKVMKQLKRRRYTGWGRLSRKLINGIRDKQSGKTILDFLKSDGFANRNFMQLIHDDSLTFKEDIQKAQVSGQGDSLHEHIANLAGSPAIKKGILQTVKVVDELVKVMGRHKPENIVIEMARENQTTQKGQKNSRERMKRIEEGIKELGSQILKEHPVENTQLQNEKLYLYYLQNGRDMYVDQELDINRLSDYDVDHIVPQSFLKDDSIDNKVLTRSDKARGKSDNVPSEEVVKKMKNYWRQLLNAKLITQRKFDNLTKAERGGLSELDKAGFIKRQLVETRQITKHVAQILDSRMNTKYDENDKLIREVKVITLKSKLVSDFRKDFQFYKVREINNYHHAHDAYLNAVVGTALIKKYPKLESEFVYGDYKVYDVRKMIAKSEQEIGKATAKYFFYSNIMNFFKTEITLANGEIRKRPLIETNGETGEIVWDKGRDFATVRKVLSMPQVNIVKKTEVQTGGFSKESILPKRNSDKLIARKKDWDPKKYGGFDSPTVAYSVLVVAKVEKGKSKKLKSVKELLGITIMERSSFEKNPIDFLEAKGYKEVKKDLIIKLPKYSLFELENGRKRMLASAGELQKGNELALPSKYVNFLYLASHYEKLKGSPEDNEQKQLFVEQHKHYLDEIIEQISEFSKRVILADANLDKVLSAYNKHRDKPIREQAENIIHLFTLTNLGAPAAFKYFDTTIDRKRYTSTKEVLDATLIHQSITGLYETRIDLSQLGGDGGGGSPAPGSSGGTAPLEEEYRLFLEAPIQNVTLLEQWKREIPKVWAEINPPGLASTQAPIHVQLLSTALPVRVRQYPITLEAKRSLRETIRKFRAAGILRPVHSPWNTPLLPVRKSGTSEYRMVQDLREVNKRVETIHPTVPNPYTLLSLLPPDRIWYSVLDLKDAFFCIPLAPESQLIFAFEWADAEEGESGQLTWTRLPQGFKNSPTLFNEALNRDLQGFRLDHPSVSLLQYVDDLLIAADTQAACLSATRDLLMTLAELGYRVSGKKAQLCQEEVTYLGFKIHKGSRSLSNSRTQAILQIPVPKTKRQVREFLGTIGYCRLWIPGFAELAQPLYAATRPGNDPLVWGEKEEEAFQSLKLALTQPPALALPSLDKPFQLFVEETSGAAKGVLTQALGPWKRPVAYLSKRLDPVAAGWPRCLRAIAAAALLTREASKLTFGQDIEITSSHNLESLLRSPPDKWLTNARITQYQVLLLDPPRVRFKQTAALNPATLLPETDDTLPIHHCLDTLDSLTSTRPDLTDQPLAQAEATLFTDGSSYIRDGKRYAGAAVVTLDSVIWAEPLPIGTSAQKAELIALTKALEWSKDKSVNIYTDSRYAFATLHVHGMIYRERGWLTAGGKAIKNAPEILALLTAVWLPKRVAVMHCKGHQKDDAPTSTGNRRADEVAREVAIRPLSTQATISAGKRTADGSEFEKRTADGSEFESPKKKAKVE

SEQ ID NO: 1154 - protein, 2098 aa, synthetic construct
MPAAKRVKLDGGDKKYSIGLDIGTNSVGWAVITDEYKVPSKKFKVLGNTDRHSIKKNLIGALLFDSGETAEATRLKRTARRRYTRRKNRICYLQEIFSNEMAKVDDSFFHRLEESFLVEEDKKHERHPIFGNIVDEVAYHEKYPTIYHLRKKLVDSTDKADLRLIYLALAHMIKFRGHFLIEGDLNPDNSDVDKLFIQLVQTYNQLFEENPINASGVDAKAILSARLSKSRRLENLIAQLPGEKKNGLFGNLIALSLGLTPNFKSNFDLAEDAKLQLSKDTYDDDLDNLLAQIGDQYADLFLAAKNLSDAILLSDILRVNTEITKAPLSASMIKRYDEHHQDLTLLKALVRQQLPEKYKEIFFDQSKNGYAGYIDGGASQEEFYKFIKPILEKMDGTEELLVKLNREDLLRKQRTFDNGSIPHQIHLGELHAILRRQEDFYPFLKDNREKIEKILTFRIPYYVGPLARGNSRFAWMTRKSEETITPWNFEEVVDKGASAQSFIERMTNFDKNLPNEKVLPKHSLLYEYFTVYNELTKVKYVTEGMRKPAFLSGEQKKAIVDLLFKTNRKVTVKQLKEDYFKKIECFDSVEISGVEDRFNASLGTYHDLLKIIKDKDFLDNEENEDILEDIVLTLTLFEDREMIEERLKTYAHLFDDKVMKQLKRRRYTGWGRLSRKLINGIRDKQSGKTILDFLKSDGFANRNFMQLIHDDSLTFKEDIQKAQVSGQGDSLHEHIANLAGSPAIKKGILQTVKVVDELVKVMGRHKPENIVIEMARENQTTQKGQKNSRERMKRIEEGIKELGSQILKEHPVENTQLQNEKLYLYYLQNGRDMYVDQELDINRLSDYDVDHIVPQSFLKDDSIDNKVLTRSDKARGKSDNVPSEEVVKKMKNYWRQLLNAKLITQRKFDNLTKAERGGLSELDKAGFIKRQLVETRQITKHVAQILDSRMNTKYDENDKLIREVKVITLKSKLVSDFRKDFQFYKVREINNYHHAHDAYLNAVVGTALIKKYPKLESEFVYGDYKVYDVRKMIAKSEQEIGKATAKYFFYSNIMNFFKTEITLANGEIRKRPLIETNGETGEIVWDKGRDFATVRKVLSMPQVNIVKKTEVQTGGFSKESILPKRNSDKLIARKKDWDPKKYGGFDSPTVAYSVLVVAKVEKGKSKKLKSVKELLGITIMERSSFEKNPIDFLEAKGYKEVKKDLIIKLPKYSLFELENGRKRMLASAGELQKGNELALPSKYVNFLYLASHYEKLKGSPEDNEQKQLFVEQHKHYLDEIIEQISEFSKRVILADANLDKVLSAYNKHRDKPIREQAENIIHLFTLTNLGAPAAFKYFDTTIDRKRYTSTKEVLDATLIHQSITGLYETRIDLSQLGGDGGGGGEAAAKGGSGGTAPLEEEYRLFLEAPIQNVTLLEQWKREIPKVWAEINPPGLASTQAPIHVQLLSTALPVRVRQYPITLEAKRSLRETIRKFRAAGILRPVHSPWNTPLLPVRKSGTSEYRMVQDLREVNKRVETIHPTVPNPYTLLSLLPPDRIWYSVLDLKDAFFCIPLAPESQLIFAFEWADAEEGESGQLTWTRLPQGFKNSPTLFNEALNRDLQGFRLDHPSVSLLQYVDDLLIAADTQAACLSATRDLLMTLAELGYRVSGKKAQLCQEEVTYLGFKIHKGSRSLSNSRTQAILQIPVPKTKRQVREFLGTIGYCRLWIPGFAELAQPLYAATRPGNDPLVWGEKEEEAFQSLKLALTQPPALALPSLDKPFQLFVEETSGAAKGVLTQALGPWKRPVAYLSKRLDPVAAGWPRCLRAIAAAALLTREASKLTFGQDIEITSSHNLESLLRSPPDKWLTNARITQYQVLLLDPPRVRFKQTAALNPATLLPETDDTLPIHHCLDTLDSLTSTRPDLTDQPLAQAEATLFTDGSSYIRDGKRYAGAAVVTLDSVIWAEPLPIGTSAQKAELIALTKALEWSKDKSVNIYTDSRYAFATLHVHGMIYRERGWLTAGGKAIKNAPEILALLTAVWLPKRVAVMHCKGHQKDDAPTSTGNRRADEVAREVAIRPLSTQATISAGKRTADGSEFEKRTADGSEFESPKKKAKVE

SEQ ID NO: 1155 - protein, 2098 aa, synthetic construct
MPAAKRVKLDGGDKKYSIGLDIGTNSVGWAVITDEYKVPSKKFKVLGNTDRHSIKKNLIGALLFDSGETAEATRLKRTARRRYTRRKNRICYLQEIFSNEMAKVDDSFFHRLEESFLVEEDKKHERHPIFGNIVDEVAYHEKYPTIYHLRKKLVDSTDKADLRLIYLALAHMIKFRGHFLIEGDLNPDNSDVDKLFIQLVQTYNQLFEENPINASGVDAKAILSARLSKSRRLENLIAQLPGEKKNGLFGNLIALSLGLTPNFKSNFDLAEDAKLQLSKDTYDDDLDNLLAQIGDQYADLFLAAKNLSDAILLSDILRVNTEITKAPLSASMIKRYDEHHQDLTLLKALVRQQLPEKYKEIFFDQSKNGYAGYIDGGASQEEFYKFIKPILEKMDGTEELLVKLNREDLLRKQRTFDNGSIPHQIHLGELHAILRRQEDFYPFLKDNREKIEKILTFRIPYYVGPLARGNSRFAWMTRKSEETITPWNFEEVVDKGASAQSFIERMTNFDKNLPNEKVLPKHSLLYEYFTVYNELTKVKYVTEGMRKPAFLSGEQKKAIVDLLFKTNRKVTVKQLKEDYFKKIECFDSVEISGVEDRFNASLGTYHDLLKIIKDKDFLDNEENEDILEDIVLTLTLFEDREMIEERLKTYAHLFDDKVMKQLKRRRYTGWGRLSRKLINGIRDKQSGKTILDFLKSDGFANRNFMQLIHDDSLTFKEDIQKAQVSGQGDSLHEHIANLAGSPAIKKGILQTVKVVDELVKVMGRHKPENIVIEMARENQTTQKGQKNSRERMKRIEEGIKELGSQILKEHPVENTQLQNEKLYLYYLQNGRDMYVDQELDINRLSDYDVDHIVPQSFLKDDSIDNKVLTRSDKARGKSDNVPSEEVVKKMKNYWRQLLNAKLITQRKFDNLTKAERGGLSELDKAGFIKRQLVETRQITKHVAQILDSRMNTKYDENDKLIREVKVITLKSKLVSDFRKDFQFYKVREINNYHHAHDAYLNAVVGTALIKKYPKLESEFVYGDYKVYDVRKMIAKSEQEIGKATAKYFFYSNIMNFFKTEITLANGEIRKRPLIETNGETGEIVWDKGRDFATVRKVLSMPQVNIVKKTEVQTGGFSKESILPKRNSDKLIARKKDWDPKKYGGFDSPTVAYSVLVVAKVEKGKSKKLKSVKELLGITIMERSSFEKNPIDFLEAKGYKEVKKDLIIKLPKYSLFELENGRKRMLASAGELQKGNELALPSKYVNFLYLASHYEKLKGSPEDNEQKQLFVEQHKHYLDEIIEQISEFSKRVILADANLDKVLSAYNKHRDKPIREQAENIIHLFTLTNLGAPAAFKYFDTTIDRKRYTSTKEVLDATLIHQSITGLYETRIDLSQLGGDGGGGGEAAAKPAPGGTAPLEEEYRLFLEAPIQNVTLLEQWKREIPKVWAEINPPGLASTQAPIHVQLLSTALPVRVRQYPITLEAKRSLRETIRKFRAAGILRPVHSPWNTPLLPVRKSGTSEYRMVQDLREVNKRVETIHPTVPNPYTLLSLLPPDRIWYSVLDLKDAFFCIPLAPESQLIFAFEWADAEEGESGQLTWTRLPQGFKNSPTLFNEALNRDLQGFRLDHPSVSLLQYVDDLLIAADTQAACLSATRDLLMTLAELGYRVSGKKAQLCQEEVTYLGFKIHKGSRSLSNSRTQAILQIPVPKTKRQVREFLGTIGYCRLWIPGFAELAQPLYAATRPGNDPLVWGEKEEEAFQSLKLALTQPPALALPSLDKPFQLFVEETSGAAKGVLTQALGPWKRPVAYLSKRLDPVAAGWPRCLRAIAAAALLTREASKLTFGQDIEITSSHNLESLLRSPPDKWLTNARITQYQVLLLDPPRVRFKQTAALNPATLLPETDDTLPIHHCLDTLDSLTSTRPDLTDQPLAQAEATLFTDGSSYIRDGKRYAGAAVVTLDSVIWAEPLPIGTSAQKAELIALTKALEWSKDKSVNIYTDSRYAFATLHVHGMIYRERGWLTAGGKAIKNAPEILALLTAVWLPKRVAVMHCKGHQKDDAPTSTGNRRADEVAREVAIRPLSTQATISAGKRTADGSEFEKRTADGSEFESPKKKAKVE

SEQ ID NO: 1156 - protein, 2098 aa, synthetic construct
MPAAKRVKLDGGDKKYSIGLDIGTNSVGWAVITDEYKVPSKKFKVLGNTDRHSIKKNLIGALLFDSGETAEATRLKRTARRRYTRRKNRICYLQEIFSNEMAKVDDSFFHRLEESFLVEEDKKHERHPIFGNIVDEVAYHEKYPTIYHLRKKLVDSTDKADLRLIYLALAHMIKFRGHFLIEGDLNPDNSDVDKLFIQLVQTYNQLFEENPINASGVDAKAILSARLSKSRRLENLIAQLPGEKKNGLFGNLIALSLGLTPNFKSNFDLAEDAKLQLSKDTYDDDLDNLLAQIGDQYADLFLAAKNLSDAILLSDILRVNTEITKAPLSASMIKRYDEHHQDLTLLKALVRQQLPEKYKEIFFDQSKNGYAGYIDGGASQEEFYKFIKPILEKMDGTEELLVKLNREDLLRKQRTFDNGSIPHQIHLGELHAILRRQEDFYPFLKDNREKIEKILTFRIPYYVGPLARGNSRFAWMTRKSEETITPWNFEEVVDKGASAQSFIERMTNFDKNLPNEKVLPKHSLLYEYFTVYNELTKVKYVTEGMRKPAFLSGEQKKAIVDLLFKTNRKVTVKQLKEDYFKKIECFDSVEISGVEDRFNASLGTYHDLLKIIKDKDFLDNEENEDILEDIVLTLTLFEDREMIEERLKTYAHLFDDKVMKQLKRRRYTGWGRLSRKLINGIRDKQSGKTILDFLKSDGFANRNFMQLIHDDSLTFKEDIQKAQVSGQGDSLHEHIANLAGSPAIKKGILQTVKVVDELVKVMGRHKPENIVIEMARENQTTQKGQKNSRERMKRIEEGIKELGSQILKEHPVENTQLQNEKLYLYYLQNGRDMYVDQELDINRLSDYDVDHIVPQSFLKDDSIDNKVLTRSDKARGKSDNVPSEEVVKKMKNYWRQLLNAKLITQRKFDNLTKAERGGLSELDKAGFIKRQLVETRQITKHVAQILDSRMNTKYDENDKLIREVKVITLKSKLVSDFRKDFQFYKVREINNYHHAHDAYLNAVVGTALIKKYPKLESEFVYGDYKVYDVRKMIAKSEQEIGKATAKYFFYSNIMNFFKTEITLANGEIRKRPLIETNGETGEIVWDKGRDFATVRKVLSMPQVNIVKKTEVQTGGFSKESILPKRNSDKLIARKKDWDPKKYGGFDSPTVAYSVLVVAKVEKGKSKKLKSVKELLGITIMERSSFEKNPIDFLEAKGYKEVKKDLIIKLPKYSLFELENGRKRMLASAGELQKGNELALPSKYVNFLYLASHYEKLKGSPEDNEQKQLFVEQHKHYLDEIIEQISEFSKRVILADANLDKVLSAYNKHRDKPIREQAENIIHLFTLTNLGAPAAFKYFDTTIDRKRYTSTKEVLDATLIHQSITGLYETRIDLSQLGGDGGEAAAKPAPGGSGGTAPLEEEYRLFLEAPIQNVTLLEQWKREIPKVWAEINPPGLASTQAPIHVQLLSTALPVRVRQYPITLEAKRSLRETIRKFRAAGILRPVHSPWNTPLLPVRKSGTSEYRMVQDLREVNKRVETIHPTVPNPYTLLSLLPPDRIWYSVLDLKDAFFCIPLAPESQLIFAFEWADAEEGESGQLTWTRLPQGFKNSPTLFNEALNRDLQGFRLDHPSVSLLQYVDDLLIAADTQAACLSATRDLLMTLAELGYRVSGKKAQLCQEEVTYLGFKIHKGSRSLSNSRTQAILQIPVPKTKRQVREFLGTIGYCRLWIPGFAELAQPLYAATRPGNDPLVWGEKEEEAFQSLKLALTQPPALALPSLDKPFQLFVEETSGAAKGVLTQALGPWKRPVAYLSKRLDPVAAGWPRCLRAIAAAALLTREASKLTFGQDIEITSSHNLESLLRSPPDKWLTNARITQYQVLLLDPPRVRFKQTAALNPATLLPETDDTLPIHHCLDTLDSLTSTRPDLTDQPLAQAEATLFTDGSSYIRDGKRYAGAAVVTLDSVIWAEPLPIGTSAQKAELIALTKALEWSKDKSVNIYTDSRYAFATLHVHGMIYRERGWLTAGGKAIKNAPEILALLTAVWLPKRVAVMHCKGHQKDDAPTSTGNRRADEVAREVAIRPLSTQATISAGKRTADGSEFEKRTADGSEFESPKKKAKVE

SEQ ID NO: 1157 - protein, 2098 aa, synthetic construct
MPAAKRVKLDGGDKKYSIGLDIGTNSVGWAVITDEYKVPSKKFKVLGNTDRHSIKKNLIGALLFDSGETAEATRLKRTARRRYTRRKNRICYLQEIFSNEMAKVDDSFFHRLEESFLVEEDKKHERHPIFGNIVDEVAYHEKYPTIYHLRKKLVDSTDKADLRLIYLALAHMIKFRGHFLIEGDLNPDNSDVDKLFIQLVQTYNQLFEENPINASGVDAKAILSARLSKSRRLENLIAQLPGEKKNGLFGNLIALSLGLTPNFKSNFDLAEDAKLQLSKDTYDDDLDNLLAQIGDQYADLFLAAKNLSDAILLSDILRVNTEITKAPLSASMIKRYDEHHQDLTLLKALVRQQLPEKYKEIFFDQSKNGYAGYIDGGASQEEFYKFIKPILEKMDGTEELLVKLNREDLLRKQRTFDNGSIPHQIHLGELHAILRRQEDFYPFLKDNREKIEKILTFRIPYYVGPLARGNSRFAWMTRKSEETITPWNFEEVVDKGASAQSFIERMTNFDKNLPNEKVLPKHSLLYEYFTVYNELTKVKYVTEGMRKPAFLSGEQKKAIVDLLFKTNRKVTVKQLKEDYFKKIECFDSVEISGVEDRFNASLGTYHDLLKIIKDKDFLDNEENEDILEDIVLTLTLFEDREMIEERLKTYAHLFDDKVMKQLKRRRYTGWGRLSRKLINGIRDKQSGKTILDFLKSDGFANRNFMQLIHDDSLTFKEDIQKAQVSGQGDSLHEHIANLAGSPAIKKGILQTVKVVDELVKVMGRHKPENIVIEMARENQTTQKGQKNSRERMKRIEEGIKELGSQILKEHPVENTQLQNEKLYLYYLQNGRDMYVDQELDINRLSDYDVDHIVPQSFLKDDSIDNKVLTRSDKARGKSDNVPSEEVVKKMKNYWRQLLNAKLITQRKFDNLTKAERGGLSELDKAGFIKRQLVETRQITKHVAQILDSRMNTKYDENDKLIREVKVITLKSKLVSDFRKDFQFYKVREINNYHHAHDAYLNAVVGTALIKKYPKLESEFVYGDYKVYDVRKMIAKSEQEIGKATAKYFFYSNIMNFFKTEITLANGEIRKRPLIETNGETGEIVWDKGRDFATVRKVLSMPQVNIVKKTEVQTGGFSKESILPKRNSDKLIARKKDWDPKKYGGFDSPTVAYSVLVVAKVEKGKSKKLKSVKELLGITIMERSSFEKNPIDFLEAKGYKEVKKDLIIKLPKYSLFELENGRKRMLASAGELQKGNELALPSKYVNFLYLASHYEKLKGSPEDNEQKQLFVEQHKHYLDEIIEQISEFSKRVILADANLDKVLSAYNKHRDKPIREQAENIIHLFTLTNLGAPAAFKYFDTTIDRKRYTSTKEVLDATLIHQSITGLYETRIDLSQLGGDGGEAAAKGGGGGSGGTAPLEEEYRLFLEAPIQNVTLLEQWKREIPKVWAEINPPGLASTQAPIHVQLLSTALPVRVRQYPITLEAKRSLRETIRKFRAAGILRPVHSPWNTPLLPVRKSGTSEYRMVQDLREVNKRVETIHPTVPNPYTLLSLLPPDRIWYSVLDLKDAFFCIPLAPESQLIFAFEWADAEEGESGQLTWTRLPQGFKNSPTLFNEALNRDLQGFRLDHPSVSLLQYVDDLLIAADTQAACLSATRDLLMTLAELGYRVSGKKAQLCQEEVTYLGFKIHKGSRSLSNSRTQAILQIPVPKTKRQVREFLGTIGYCRLWIPGFAELAQPLYAATRPGNDPLVWGEKEEEAFQSLKLALTQPPALALPSLDKPFQLFVEETSGAAKGVLTQALGPWKRPVAYLSKRLDPVAAGWPRCLRAIAAAALLTREASKLTFGQDIEITSSHNLESLLRSPPDKWLTNARITQYQVLLLDPPRVRFKQTAALNPATLLPETDDTLPIHHCLDTLDSLTSTRPDLTDQPLAQAEATLFTDGSSYIRDGKRYAGAAVVTLDSVIWAEPLPIGTSAQKAELIALTKALEWSKDKSVNIYTDSRYAFATLHVHGMIYRERGWLTAGGKAIKNAPEILALLTAVWLPKRVAVMHCKGHQKDDAPTSTGNRRADEVAREVAIRPLSTQATISAGKRTADGSEFEKRTADGSEFESPKKKAKVE

SEQ ID NO: 1158 - protein, 2102 aa, synthetic construct
MPAAKRVKLDGGDKKYSIGLDIGTNSVGWAVITDEYKVPSKKFKVLGNTDRHSIKKNLIGALLFDSGETAEATRLKRTARRRYTRRKNRICYLQEIFSNEMAKVDDSFFHRLEESFLVEEDKKHERHPIFGNIVDEVAYHEKYPTIYHLRKKLVDSTDKADLRLIYLALAHMIKFRGHFLIEGDLNPDNSDVDKLFIQLVQTYNQLFEENPINASGVDAKAILSARLSKSRRLENLIAQLPGEKKNGLFGNLIALSLGLTPNFKSNFDLAEDAKLQLSKDTYDDDLDNLLAQIGDQYADLFLAAKNLSDAILLSDILRVNTEITKAPLSASMIKRYDEHHQDLTLLKALVRQQLPEKYKEIFFDQSKNGYAGYIDGGASQEEFYKFIKPILEKMDGTEELLVKLNREDLLRKQRTFDNGSIPHQIHLGELHAILRRQEDFYPFLKDNREKIEKILTFRIPYYVGPLARGNSRFAWMTRKSEETITPWNFEEVVDKGASAQSFIERMTNFDKNLPNEKVLPKHSLLYEYFTVYNELTKVKYVTEGMRKPAFLSGEQKKAIVDLLFKTNRKVTVKQLKEDYFKKIECFDSVEISGVEDRFNASLGTYHDLLKIIKDKDFLDNEENEDILEDIVLTLTLFEDREMIEERLKTYAHLFDDKVMKQLKRRRYTGWGRLSRKLINGIRDKQSGKTILDFLKSDGFANRNFMQLIHDDSLTFKEDIQKAQVSGQGDSLHEHIANLAGSPAIKKGILQTVKVVDELVKVMGRHKPENIVIEMARENQTTQKGQKNSRERMKRIEEGIKELGSQILKEHPVENTQLQNEKLYLYYLQNGRDMYVDQELDINRLSDYDVDHIVPQSFLKDDSIDNKVLTRSDKARGKSDNVPSEEVVKKMKNYWRQLLNAKLITQRKFDNLTKAERGGLSELDKAGFIKRQLVETRQITKHVAQILDSRMNTKYDENDKLIREVKVITLKSKLVSDFRKDFQFYKVREINNYHHAHDAYLNAVVGTALIKKYPKLESEFVYGDYKVYDVRKMIAKSEQEIGKATAKYFFYSNIMNFFKTEITLANGEIRKRPLIETNGETGEIVWDKGRDFATVRKVLSMPQVNIVKKTEVQTGGFSKESILPKRNSDKLIARKKDWDPKKYGGFDSPTVAYSVLVVAKVEKGKSKKLKSVKELLGITIMERSSFEKNPIDFLEAKGYKEVKKDLIIKLPKYSLFELENGRKRMLASAGELQKGNELALPSKYVNFLYLASHYEKLKGSPEDNEQKQLFVEQHKHYLDEIIEQISEFSKRVILADANLDKVLSAYNKHRDKPIREQAENIIHLFTLTNLGAPAAFKYFDTTIDRKRYTSTKEVLDATLIHQSITGLYETRIDLSQLGGDGGGGGGSEAAAKGGGGSGGTAPLEEEYRLFLEAPIQNVTLLEQWKREIPKVWAEINPPGLASTQAPIHVQLLSTALPVRVRQYPITLEAKRSLRETIRKFRAAGILRPVHSPWNTPLLPVRKSGTSEYRMVQDLREVNKRVETIHPTVPNPYTLLSLLPPDRIWYSVLDLKDAFFCIPLAPESQLIFAFEWADAEEGESGQLTWTRLPQGFKNSPTLFNEALNRDLQGFRLDHPSVSLLQYVDDLLIAADTQAACLSATRDLLMTLAELGYRVSGKKAQLCQEEVTYLGFKIHKGSRSLSNSRTQAILQIPVPKTKRQVREFLGTIGYCRLWIPGFAELAQPLYAATRPGNDPLVWGEKEEEAFQSLKLALTQPPALALPSLDKPFQLFVEETSGAAKGVLTQALGPWKRPVAYLSKRLDPVAAGWPRCLRAIAAAALLTREASKLTFGQDIEITSSHNLESLLRSPPDKWLTNARITQYQVLLLDPPRVRFKQTAALNPATLLPETDDTLPIHHCLDTLDSLTSTRPDLTDQPLAQAEATLFTDGSSYIRDGKRYAGAAVVTLDSVIWAEPLPIGTSAQKAELIALTKALEWSKDKSVNIYTDSRYAFATLHVHGMIYRERGWLTAGGKAIKNAPEILALLTAVWLPKRVAVMHCKGHQKDDAPTSTGNRRADEVAREVAIRPLSTQATISAGKRTADGSEFEKRTADGSEFESPKKKAKVE

SEQ ID NO: 1159 - protein, 2096 aa, synthetic construct
MPAAKRVKLDGGDKKYSIGLDIGTNSVGWAVITDEYKVPSKKFKVLGNTDRHSIKKNLIGALLFDSGETAEATRLKRTARRRYTRRKNRICYLQEIFSNEMAKVDDSFFHRLEESFLVEEDKKHERHPIFGNIVDEVAYHEKYPTIYHLRKKLVDSTDKADLRLIYLALAHMIKFRGHFLIEGDLNPDNSDVDKLFIQLVQTYNQLFEENPINASGVDAKAILSARLSKSRRLENLIAQLPGEKKNGLFGNLIALSLGLTPNFKSNFDLAEDAKLQLSKDTYDDDLDNLLAQIGDQYADLFLAAKNLSDAILLSDILRVNTEITKAPLSASMIKRYDEHHQDLTLLKALVRQQLPEKYKEIFFDQSKNGYAGYIDGGASQEEFYKFIKPILEKMDGTEELLVKLNREDLLRKQRTFDNGSIPHQIHLGELHAILRRQEDFYPFLKDNREKIEKILTFRIPYYVGPLARGNSRFAWMTRKSEETITPWNFEEVVDKGASAQSFIERMTNFDKNLPNEKVLPKHSLLYEYFTVYNELTKVKYVTEGMRKPAFLSGEQKKAIVDLLFKTNRKVTVKQLKEDYFKKIECFDSVEISGVEDRFNASLGTYHDLLKIIKDKDFLDNEENEDILEDIVLTLTLFEDREMIEERLKTYAHLFDDKVMKQLKRRRYTGWGRLSRKLINGIRDKQSGKTILDFLKSDGFANRNFMQLIHDDSLTFKEDIQKAQVSGQGDSLHEHIANLAGSPAIKKGILQTVKVVDELVKVMGRHKPENIVIEMARENQTTQKGQKNSRERMKRIEEGIKELGSQILKEHPVENTQLQNEKLYLYYLQNGRDMYVDQELDINRLSDYDVDHIVPQSFLKDDSIDNKVLTRSDKARGKSDNVPSEEVVKKMKNYWRQLLNAKLITQRKFDNLTKAERGGLSELDKAGFIKRQLVETRQITKHVAQILDSRMNTKYDENDKLIREVKVITLKSKLVSDFRKDFQFYKVREINNYHHAHDAYLNAVVGTALIKKYPKLESEFVYGDYKVYDVRKMIAKSEQEIGKATAKYFFYSNIMNFFKTEITLANGEIRKRPLIETNGETGEIVWDKGRDFATVRKVLSMPQVNIVKKTEVQTGGFSKESILPKRNSDKLIARKKDWDPKKYGGFDSPTVAYSVLVVAKVEKGKSKKLKSVKELLGITIMERSSFEKNPIDFLEAKGYKEVKKDLIIKLPKYSLFELENGRKRMLASAGELQKGNELALPSKYVNFLYLASHYEKLKGSPEDNEQKQLFVEQHKHYLDEIIEQISEFSKRVILADANLDKVLSAYNKHRDKPIREQAENIIHLFTLTNLGAPAAFKYFDTTIDRKRYTSTKEVLDATLIHQSITGLYETRIDLSQLGGDGGPAPGGGGGSGGTAPLEEEYRLFLEAPIQNVTLLEQWKREIPKVWAEINPPGLASTQAPIHVQLLSTALPVRVRQYPITLEAKRSLRETIRKFRAAGILRPVHSPWNTPLLPVRKSGTSEYRMVQDLREVNKRVETIHPTVPNPYTLLSLLPPDRIWYSVLDLKDAFFCIPLAPESQLIFAFEWADAEEGESGQLTWTRLPQGFKNSPTLFNEALNRDLQGFRLDHPSVSLLQYVDDLLIAADTQAACLSATRDLLMTLAELGYRVSGKKAQLCQEEVTYLGFKIHKGSRSLSNSRTQAILQIPVPKTKRQVREFLGTIGYCRLWIPGFAELAQPLYAATRPGNDPLVWGEKEEEAFQSLKLALTQPPALALPSLDKPFQLFVEETSGAAKGVLTQALGPWKRPVAYLSKRLDPVAAGWPRCLRAIAAAALLTREASKLTFGQDIEITSSHNLESLLRSPPDKWLTNARITQYQVLLLDPPRVRFKQTAALNPATLLPETDDTLPIHHCLDTLDSLTSTRPDLTDQPLAQAEATLFTDGSSYIRDGKRYAGAAVVTLDSVIWAEPLPIGTSAQKAELIALTKALEWSKDKSVNIYTDSRYAFATLHVHGMIYRERGWLTAGGKAIKNAPEILALLTAVWLPKRVAVMHCKGHQKDDAPTSTGNRRADEVAREVAIRPLSTQATISAGKRTADGSEFEKRTADGSEFESPKKKAKVE

SEQ ID NO: 1160 - protein, 2098 aa, synthetic construct
MPAAKRVKLDGGDKKYSIGLDIGTNSVGWAVITDEYKVPSKKFKVLGNTDRHSIKKNLIGALLFDSGETAEATRLKRTARRRYTRRKNRICYLQEIFSNEMAKVDDSFFHRLEESFLVEEDKKHERHPIFGNIVDEVAYHEKYPTIYHLRKKLVDSTDKADLRLIYLALAHMIKFRGHFLIEGDLNPDNSDVDKLFIQLVQTYNQLFEENPINASGVDAKAILSARLSKSRRLENLIAQLPGEKKNGLFGNLIALSLGLTPNFKSNFDLAEDAKLQLSKDTYDDDLDNLLAQIGDQYADLFLAAKNLSDAILLSDILRVNTEITKAPLSASMIKRYDEHHQDLTLLKALVRQQLPEKYKEIFFDQSKNGYAGYIDGGASQEEFYKFIKPILEKMDGTEELLVKLNREDLLRKQRTFDNGSIPHQIHLGELHAILRRQEDFYPFLKDNREKIEKILTFRIPYYVGPLARGNSRFAWMTRKSEETITPWNFEEVVDKGASAQSFIERMTNFDKNLPNEKVLPKHSLLYEYFTVYNELTKVKYVTEGMRKPAFLSGEQKKAIVDLLFKTNRKVTVKQLKEDYFKKIECFDSVEISGVEDRFNASLGTYHDLLKIIKDKDFLDNEENEDILEDIVLTLTLFEDREMIEERLKTYAHLFDDKVMKQLKRRRYTGWGRLSRKLINGIRDKQSGKTILDFLKSDGFANRNFMQLIHDDSLTFKEDIQKAQVSGQGDSLHEHIANLAGSPAIKKGILQTVKVVDELVKVMGRHKPENIVIEMARENQTTQKGQKNSRERMKRIEEGIKELGSQILKEHPVENTQLQNEKLYLYYLQNGRDMYVDQELDINRLSDYDVDHIVPQSFLKDDSIDNKVLTRSDKARGKSDNVPSEEVVKKMKNYWRQLLNAKLITQRKFDNLTKAERGGLSELDKAGFIKRQLVETRQITKHVAQILDSRMNTKYDENDKLIREVKVITLKSKLVSDFRKDFQFYKVREINNYHHAHDAYLNAVVGTALIKKYPKLESEFVYGDYKVYDVRKMIAKSEQEIGKATAKYFFYSNIMNFFKTEITLANGEIRKRPLIETNGETGEIVWDKGRDFATVRKVLSMPQVNIVKKTEVQTGGFSKESILPKRNSDKLIARKKDWDPKKYGGFDSPTVAYSVLVVAKVEKGKSKKLKSVKELLGITIMERSSFEKNPIDFLEAKGYKEVKKDLIIKLPKYSLFELENGRKRMLASAGELQKGNELALPSKYVNFLYLASHYEKLKGSPEDNEQKQLFVEQHKHYLDEIIEQISEFSKRVILADANLDKVLSAYNKHRDKPIREQAENIIHLFTLTNLGAPAAFKYFDTTIDRKRYTSTKEVLDATLIHQSITGLYETRIDLSQLGGDGGGGSPAPEAAAKGGTAPLEEEYRLFLEAPIQNVTLLEQWKREIPKVWAEINPPGLASTQAPIHVQLLSTALPVRVRQYPITLEAKRSLRETIRKFRAAGILRPVHSPWNTPLLPVRKSGTSEYRMVQDLREVNKRVETIHPTVPNPYTLLSLLPPDRIWYSVLDLKDAFFCIPLAPESQLIFAFEWADAEEGESGQLTWTRLPQGFKNSPTLFNEALNRDLQGFRLDHPSVSLLQYVDDLLIAADTQAACLSATRDLLMTLAELGYRVSGKKAQLCQEEVTYLGFKIHKGSRSLSNSRTQAILQIPVPKTKRQVREFLGTIGYCRLWIPGFAELAQPLYAATRPGNDPLVWGEKEEEAFQSLKLALTQPPALALPSLDKPFQLFVEETSGAAKGVLTQALGPWKRPVAYLSKRLDPVAAGWPRCLRAIAAAALLTREASKLTFGQDIEITSSHNLESLLRSPPDKWLTNARITQYQVLLLDPPRVRFKQTAALNPATLLPETDDTLPIHHCLDTLDSLTSTRPDLTDQPLAQAEATLFTDGSSYIRDGKRYAGAAVVTLDSVIWAEPLPIGTSAQKAELIALTKALEWSKDKSVNIYTDSRYAFATLHVHGMIYRERGWLTAGGKAIKNAPEILALLTAVWLPKRVAVMHCKGHQKDDAPTSTGNRRADEVAREVAIRPLSTQATISAGKRTADGSEFEKRTADGSEFESPKKKAKVE

SEQ ID NO: 1161 - protein, 2098 aa, synthetic construct
MPAAKRVKLDGGDKKYSIGLDIGTNSVGWAVITDEYKVPSKKFKVLGNTDRHSIKKNLIGALLFDSGETAEATRLKRTARRRYTRRKNRICYLQEIFSNEMAKVDDSFFHRLEESFLVEEDKKHERHPIFGNIVDEVAYHEKYPTIYHLRKKLVDSTDKADLRLIYLALAHMIKFRGHFLIEGDLNPDNSDVDKLFIQLVQTYNQLFEENPINASGVDAKAILSARLSKSRRLENLIAQLPGEKKNGLFGNLIALSLGLTPNFKSNFDLAEDAKLQLSKDTYDDDLDNLLAQIGDQYADLFLAAKNLSDAILLSDILRVNTEITKAPLSASMIKRYDEHHQDLTLLKALVRQQLPEKYKEIFFDQSKNGYAGYIDGGASQEEFYKFIKPILEKMDGTEELLVKLNREDLLRKQRTFDNGSIPHQIHLGELHAILRRQEDFYPFLKDNREKIEKILTFRIPYYVGPLARGNSRFAWMTRKSEETITPWNFEEVVDKGASAQSFIERMTNFDKNLPNEKVLPKHSLLYEYFTVYNELTKVKYVTEGMRKPAFLSGEQKKAIVDLLFKTNRKVTVKQLKEDYFKKIECFDSVEISGVEDRFNASLGTYHDLLKIIKDKDFLDNEENEDILEDIVLTLTLFEDREMIEERLKTYAHLFDDKVMKQLKRRRYTGWGRLSRKLINGIRDKQSGKTILDFLKSDGFANRNFMQLIHDDSLTFKEDIQKAQVSGQGDSLHEHIANLAGSPAIKKGILQTVKVVDELVKVMGRHKPENIVIEMARENQTTQKGQKNSRERMKRIEEGIKELGSQILKEHPVENTQLQNEKLYLYYLQNGRDMYVDQELDINRLSDYDVDHIVPQSFLKDDSIDNKVLTRSDKARGKSDNVPSEEVVKKMKNYWRQLLNAKLITQRKFDNLTKAERGGLSELDKAGFIKRQLVETRQITKHVAQILDSRMNTKYDENDKLIREVKVITLKSKLVSDFRKDFQFYKVREINNYHHAHDAYLNAVVGTALIKKYPKLESEFVYGDYKVYDVRKMIAKSEQEIGKATAKYFFYSNIMNFFKTEITLANGEIRKRPLIETNGETGEIVWDKGRDFATVRKVLSMPQVNIVKKTEVQTGGFSKESILPKRNSDKLIARKKDWDPKKYGGFDSPTVAYSVLVVAKVEKGKSKKLKSVKELLGITIMERSSFEKNPIDFLEAKGYKEVKKDLIIKLPKYSLFELENGRKRMLASAGELQKGNELALPSKYVNFLYLASHYEKLKGSPEDNEQKQLFVEQHKHYLDEIIEQISEFSKRVILADANLDKVLSAYNKHRDKPIREQAENIIHLFTLTNLGAPAAFKYFDTTIDRKRYTSTKEVLDATLIHQSITGLYETRIDLSQLGGDGGPAPEAAAKGGSGGTAPLEEEYRLFLEAPIQNVTLLEQWKREIPKVWAEINPPGLASTQAPIHVQLLSTALPVRVRQYPITLEAKRSLRETIRKFRAAGILRPVHSPWNTPLLPVRKSGTSEYRMVQDLREVNKRVETIHPTVPNPYTLLSLLPPDRIWYSVLDLKDAFFCIPLAPESQLIFAFEWADAEEGESGQLTWTRLPQGFKNSPTLFNEALNRDLQGFRLDHPSVSLLQYVDDLLIAADTQAACLSATRDLLMTLAELGYRVSGKKAQLCQEEVTYLGFKIHKGSRSLSNSRTQAILQIPVPKTKRQVREFLGTIGYCRLWIPGFAELAQPLYAATRPGNDPLVWGEKEEEAFQSLKLALTQPPALALPSLDKPFQLFVEETSGAAKGVLTQALGPWKRPVAYLSKRLDPVAAGWPRCLRAIAAAALLTREASKLTFGQDIEITSSHNLESLLRSPPDKWLTNARITQYQVLLLDPPRVRFKQTAALNPATLLPETDDTLPIHHCLDTLDSLTSTRPDLTDQPLAQAEATLFTDGSSYIRDGKRYAGAAVVTLDSVIWAEPLPIGTSAQKAELIALTKALEWSKDKSVNIYTDSRYAFATLHVHGMIYRERGWLTAGGKAIKNAPEILALLTAVWLPKRVAVMHCKGHQKDDAPTSTGNRRADEVAREVAIRPLSTQATISAGKRTADGSEFEKRTADGSEFESPKKKAKVE

SEQ ID NO: 1162 - protein, 2098 aa, synthetic construct
MPAAKRVKLDGGDKKYSIGLDIGTNSVGWAVITDEYKVPSKKFKVLGNTDRHSIKKNLIGALLFDSGETAEATRLKRTARRRYTRRKNRICYLQEIFSNEMAKVDDSFFHRLEESFLVEEDKKHERHPIFGNIVDEVAYHEKYPTIYHLRKKLVDSTDKADLRLIYLALAHMIKFRGHFLIEGDLNPDNSDVDKLFIQLVQTYNQLFEENPINASGVDAKAILSARLSKSRRLENLIAQLPGEKKNGLFGNLIALSLGLTPNFKSNFDLAEDAKLQLSKDTYDDDLDNLLAQIGDQYADLFLAAKNLSDAILLSDILRVNTEITKAPLSASMIKRYDEHHQDLTLLKALVRQQLPEKYKEIFFDQSKNGYAGYIDGGASQEEFYKFIKPILEKMDGTEELLVKLNREDLLRKQRTFDNGSIPHQIHLGELHAILRRQEDFYPFLKDNREKIEKILTFRIPYYVGPLARGNSRFAWMTRKSEETITPWNFEEVVDKGASAQSFIERMTNFDKNLPNEKVLPKHSLLYEYFTVYNELTKVKYVTEGMRKPAFLSGEQKKAIVDLLFKTNRKVTVKQLKEDYFKKIECFDSVEISGVEDRFNASLGTYHDLLKIIKDKDFLDNEENEDILEDIVLTLTLFEDREMIEERLKTYAHLFDDKVMKQLKRRRYTGWGRLSRKLINGIRDKQSGKTILDFLKSDGFANRNFMQLIHDDSLTFKEDIQKAQVSGQGDSLHEHIANLAGSPAIKKGILQTVKVVDELVKVMGRHKPENIVIEMARENQTTQKGQKNSRERMKRIEEGIKELGSQILKEHPVENTQLQNEKLYLYYLQNGRDMYVDQELDINRLSDYDVDHIVPQSFLKDDSIDNKVLTRSDKARGKSDNVPSEEVVKKMKNYWRQLLNAKLITQRKFDNLTKAERGGLSELDKAGFIKRQLVETRQITKHVAQILDSRMNTKYDENDKLIREVKVITLKSKLVSDFRKDFQFYKVREINNYHHAHDAYLNAVVGTALIKKYPKLESEFVYGDYKVYDVRKMIAKSEQEIGKATAKYFFYSNIMNFFKTEITLANGEIRKRPLIETNGETGEIVWDKGRDFATVRKVLSMPQVNIVKKTEVQTGGFSKESILPKRNSDKLIARKKDWDPKKYGGFDSPTVAYSVLVVAKVEKGKSKKLKSVKELLGITIMERSSFEKNPIDFLEAKGYKEVKKDLIIKLPKYSLFELENGRKRMLASAGELQKGNELALPSKYVNFLYLASHYEKLKGSPEDNEQKQLFVEQHKHYLDEIIEQISEFSKRVILADANLDKVLSAYNKHRDKPIREQAENIIHLFTLTNLGAPAAFKYFDTTIDRKRYTSTKEVLDATLIHQSITGLYETRIDLSQLGGDGGGSSEAAAKGGGGGTAPLEEEYRLFLEAPIQNVTLLEQWKREIPKVWAEINPPGLASTQAPIHVQLLSTALPVRVRQYPITLEAKRSLRETIRKFRAAGILRPVHSPWNTPLLPVRKSGTSEYRMVQDLREVNKRVETIHPTVPNPYTLLSLLPPDRIWYSVLDLKDAFFCIPLAPESQLIFAFEWADAEEGESGQLTWTRLPQGFKNSPTLFNEALNRDLQGFRLDHPSVSLLQYVDDLLIAADTQAACLSATRDLLMTLAELGYRVSGKKAQLCQEEVTYLGFKIHKGSRSLSNSRTQAILQIPVPKTKRQVREFLGTIGYCRLWIPGFAELAQPLYAATRPGNDPLVWGEKEEEAFQSLKLALTQPPALALPSLDKPFQLFVEETSGAAKGVLTQALGPWKRPVAYLSKRLDPVAAGWPRCLRAIAAAALLTREASKLTFGQDIEITSSHNLESLLRSPPDKWLTNARITQYQVLLLDPPRVRFKQTAALNPATLLPETDDTLPIHHCLDTLDSLTSTRPDLTDQPLAQAEATLFTDGSSYIRDGKRYAGAAVVTLDSVIWAEPLPIGTSAQKAELIALTKALEWSKDKSVNIYTDSRYAFATLHVHGMIYRERGWLTAGGKAIKNAPEILALLTAVWLPKRVAVMHCKGHQKDDAPTSTGNRRADEVAREVAIRPLSTQATISAGKRTADGSEFEKRTADGSEFESPKKKAKVE

SEQ ID NO: 1163 - protein, 2096 aa, synthetic construct
MPAAKRVKLDGGDKKYSIGLDIGTNSVGWAVITDEYKVPSKKFKVLGNTDRHSIKKNLIGALLFDSGETAEATRLKRTARRRYTRRKNRICYLQEIFSNEMAKVDDSFFHRLEESFLVEEDKKHERHPIFGNIVDEVAYHEKYPTIYHLRKKLVDSTDKADLRLIYLALAHMIKFRGHFLIEGDLNPDNSDVDKLFIQLVQTYNQLFEENPINASGVDAKAILSARLSKSRRLENLIAQLPGEKKNGLFGNLIALSLGLTPNFKSNFDLAEDAKLQLSKDTYDDDLDNLLAQIGDQYADLFLAAKNLSDAILLSDILRVNTEITKAPLSASMIKRYDEHHQDLTLLKALVRQQLPEKYKEIFFDQSKNGYAGYIDGGASQEEFYKFIKPILEKMDGTEELLVKLNREDLLRKQRTFDNGSIPHQIHLGELHAILRRQEDFYPFLKDNREKIEKILTFRIPYYVGPLARGNSRFAWMTRKSEETITPWNFEEVVDKGASAQSFIERMTNFDKNLPNEKVLPKHSLLYEYFTVYNELTKVKYVTEGMRKPAFLSGEQKKAIVDLLFKTNRKVTVKQLKEDYFKKIECFDSVEISGVEDRFNASLGTYHDLLKIIKDKDFLDNEENEDILEDIVLTLTLFEDREMIEERLKTYAHLFDDKVMKQLKRRRYTGWGRLSRKLINGIRDKQSGKTILDFLKSDGFANRNFMQLIHDDSLTFKEDIQKAQVSGQGDSLHEHIANLAGSPAIKKGILQTVKVVDELVKVMGRHKPENIVIEMARENQTTQKGQKNSRERMKRIEEGIKELGSQILKEHPVENTQLQNEKLYLYYLQNGRDMYVDQELDINRLSDYDVDHIVPQSFLKDDSIDNKVLTRSDKARGKSDNVPSEEVVKKMKNYWRQLLNAKLITQRKFDNLTKAERGGLSELDKAGFIKRQLVETRQITKHVAQILDSRMNTKYDENDKLIREVKVITLKSKLVSDFRKDFQFYKVREINNYHHAHDAYLNAVVGTALIKKYPKLESEFVYGDYKVYDVRKMIAKSEQEIGKATAKYFFYSNIMNFFKTEITLANGEIRKRPLIETNGETGEIVWDKGRDFATVRKVLSMPQVNIVKKTEVQTGGFSKESILPKRNSDKLIARKKDWDPKKYGGFDSPTVAYSVLVVAKVEKGKSKKLKSVKELLGITIMERSSFEKNPIDFLEAKGYKEVKKDLIIKLPKYSLFELENGRKRMLASAGELQKGNELALPSKYVNFLYLASHYEKLKGSPEDNEQKQLFVEQHKHYLDEIIEQISEFSKRVILADANLDKVLSAYNKHRDKPIREQAENIIHLFTLTNLGAPAAFKYFDTTIDRKRYTSTKEVLDATLIHQSITGLYETRIDLSQLGGDGGGGGGGSPAPGGTAPLEEEYRLFLEAPIQNVTLLEQWKREIPKVWAEINPPGLASTQAPIHVQLLSTALPVRVRQYPITLEAKRSLRETIRKFRAAGILRPVHSPWNTPLLPVRKSGTSEYRMVQDLREVNKRVETIHPTVPNPYTLLSLLPPDRIWYSVLDLKDAFFCIPLAPESQLIFAFEWADAEEGESGQLTWTRLPQGFKNSPTLFNEALNRDLQGFRLDHPSVSLLQYVDDLLIAADTQAACLSATRDLLMTLAELGYRVSGKKAQLCQEEVTYLGFKIHKGSRSLSNSRTQAILQIPVPKTKRQVREFLGTIGYCRLWIPGFAELAQPLYAATRPGNDPLVWGEKEEEAFQSLKLALTQPPALALPSLDKPFQLFVEETSGAAKGVLTQALGPWKRPVAYLSKRLDPVAAGWPRCLRAIAAAALLTREASKLTFGQDIEITSSHNLESLLRSPPDKWLTNARITQYQVLLLDPPRVRFKQTAALNPATLLPETDDTLPIHHCLDTLDSLTSTRPDLTDQPLAQAEATLFTDGSSYIRDGKRYAGAAVVTLDSVIWAEPLPIGTSAQKAELIALTKALEWSKDKSVNIYTDSRYAFATLHVHGMIYRERGWLTAGGKAIKNAPEILALLTAVWLPKRVAVMHCKGHQKDDAPTSTGNRRADEVAREVAIRPLSTQATISAGKRTADGSEFEKRTADGSEFESPKKKAKVE

SEQ ID NO: 1164 - protein, 2098 aa, synthetic construct
MPAAKRVKLDGGDKKYSIGLDIGTNSVGWAVITDEYKVPSKKFKVLGNTDRHSIKKNLIGALLFDSGETAEATRLKRTARRRYTRRKNRICYLQEIFSNEMAKVDDSFFHRLEESFLVEEDKKHERHPIFGNIVDEVAYHEKYPTIYHLRKKLVDSTDKADLRLIYLALAHMIKFRGHFLIEGDLNPDNSDVDKLFIQLVQTYNQLFEENPINASGVDAKAILSARLSKSRRLENLIAQLPGEKKNGLFGNLIALSLGLTPNFKSNFDLAEDAKLQLSKDTYDDDLDNLLAQIGDQYADLFLAAKNLSDAILLSDILRVNTEITKAPLSASMIKRYDEHHQDLTLLKALVRQQLPEKYKEIFFDQSKNGYAGYIDGGASQEEFYKFIKPILEKMDGTEELLVKLNREDLLRKQRTFDNGSIPHQIHLGELHAILRRQEDFYPFLKDNREKIEKILTFRIPYYVGPLARGNSRFAWMTRKSEETITPWNFEEVVDKGASAQSFIERMTNFDKNLPNEKVLPKHSLLYEYFTVYNELTKVKYVTEGMRKPAFLSGEQKKAIVDLLFKTNRKVTVKQLKEDYFKKIECFDSVEISGVEDRFNASLGTYHDLLKIIKDKDFLDNEENEDILEDIVLTLTLFEDREMIEERLKTYAHLFDDKVMKQLKRRRYTGWGRLSRKLINGIRDKQSGKTILDFLKSDGFANRNFMQLIHDDSLTFKEDIQKAQVSGQGDSLHEHIANLAGSPAIKKGILQTVKVVDELVKVMGRHKPENIVIEMARENQTTQKGQKNSRERMKRIEEGIKELGSQILKEHPVENTQLQNEKLYLYYLQNGRDMYVDQELDINRLSDYDVDHIVPQSFLKDDSIDNKVLTRSDKARGKSDNVPSEEVVKKMKNYWRQLLNAKLITQRKFDNLTKAERGGLSELDKAGFIKRQLVETRQITKHVAQILDSRMNTKYDENDKLIREVKVITLKSKLVSDFRKDFQFYKVREINNYHHAHDAYLNAVVGTALIKKYPKLESEFVYGDYKVYDVRKMIAKSEQEIGKATAKYFFYSNIMNFFKTEITLANGEIRKRPLIETNGETGEIVWDKGRDFATVRKVLSMPQVNIVKKTEVQTGGFSKESILPKRNSDKLIARKKDWDPKKYGGFDSPTVAYSVLVVAKVEKGKSKKLKSVKELLGITIMERSSFEKNPIDFLEAKGYKEVKKDLIIKLPKYSLFELENGRKRMLASAGELQKGNELALPSKYVNFLYLASHYEKLKGSPEDNEQKQLFVEQHKHYLDEIIEQISEFSKRVILADANLDKVLSAYNKHRDKPIREQAENIIHLFTLTNLGAPAAFKYFDTTIDRKRYTSTKEVLDATLIHQSITGLYETRIDLSQLGGDGGGSSPAPEAAAKGGTAPLEEEYRLFLEAPIQNVTLLEQWKREIPKVWAEINPPGLASTQAPIHVQLLSTALPVRVRQYPITLEAKRSLRETIRKFRAAGILRPVHSPWNTPLLPVRKSGTSEYRMVQDLREVNKRVETIHPTVPNPYTLLSLLPPDRIWYSVLDLKDAFFCIPLAPESQLIFAFEWADAEEGESGQLTWTRLPQGFKNSPTLFNEALNRDLQGFRLDHPSVSLLQYVDDLLIAADTQAACLSATRDLLMTLAELGYRVSGKKAQLCQEEVTYLGFKIHKGSRSLSNSRTQAILQIPVPKTKRQVREFLGTIGYCRLWIPGFAELAQPLYAATRPGNDPLVWGEKEEEAFQSLKLALTQPPALALPSLDKPFQLFVEETSGAAKGVLTQALGPWKRPVAYLSKRLDPVAAGWPRCLRAIAAAALLTREASKLTFGQDIEITSSHNLESLLRSPPDKWLTNARITQYQVLLLDPPRVRFKQTAALNPATLLPETDDTLPIHHCLDTLDSLTSTRPDLTDQPLAQAEATLFTDGSSYIRDGKRYAGAAVVTLDSVIWAEPLPIGTSAQKAELIALTKALEWSKDKSVNIYTDSRYAFATLHVHGMIYRERGWLTAGGKAIKNAPEILALLTAVWLPKRVAVMHCKGHQKDDAPTSTGNRRADEVAREVAIRPLSTQATISAGKRTADGSEFEKRTADGSEFESPKKKAKVE

SEQ ID NO: 1165 - protein, 2096 aa, synthetic construct
MPAAKRVKLDGGDKKYSIGLDIGTNSVGWAVITDEYKVPSKKFKVLGNTDRHSIKKNLIGALLFDSGETAEATRLKRTARRRYTRRKNRICYLQEIFSNEMAKVDDSFFHRLEESFLVEEDKKHERHPIFGNIVDEVAYHEKYPTIYHLRKKLVDSTDKADLRLIYLALAHMIKFRGHFLIEGDLNPDNSDVDKLFIQLVQTYNQLFEENPINASGVDAKAILSARLSKSRRLENLIAQLPGEKKNGLFGNLIALSLGLTPNFKSNFDLAEDAKLQLSKDTYDDDLDNLLAQIGDQYADLFLAAKNLSDAILLSDILRVNTEITKAPLSASMIKRYDEHHQDLTLLKALVRQQLPEKYKEIFFDQSKNGYAGYIDGGASQEEFYKFIKPILEKMDGTEELLVKLNREDLLRKQRTFDNGSIPHQIHLGELHAILRRQEDFYPFLKDNREKIEKILTFRIPYYVGPLARGNSRFAWMTRKSEETITPWNFEEVVDKGASAQSFIERMTNFDKNLPNEKVLPKHSLLYEYFTVYNELTKVKYVTEGMRKPAFLSGEQKKAIVDLLFKTNRKVTVKQLKEDYFKKIECFDSVEISGVEDRFNASLGTYHDLLKIIKDKDFLDNEENEDILEDIVLTLTLFEDREMIEERLKTYAHLFDDKVMKQLKRRRYTGWGRLSRKLINGIRDKQSGKTILDFLKSDGFANRNFMQLIHDDSLTFKEDIQKAQVSGQGDSLHEHIANLAGSPAIKKGILQTVKVVDELVKVMGRHKPENIVIEMARENQTTQKGQKNSRERMKRIEEGIKELGSQILKEHPVENTQLQNEKLYLYYLQNGRDMYVDQELDINRLSDYDVDHIVPQSFLKDDSIDNKVLTRSDKARGKSDNVPSEEVVKKMKNYWRQLLNAKLITQRKFDNLTKAERGGLSELDKAGFIKRQLVETRQITKHVAQILDSRMNTKYDENDKLIREVKVITLKSKLVSDFRKDFQFYKVREINNYHHAHDAYLNAVVGTALIKKYPKLESEFVYGDYKVYDVRKMIAKSEQEIGKATAKYFFYSNIMNFFKTEITLANGEIRKRPLIETNGETGEIVWDKGRDFATVRKVLSMPQVNIVKKTEVQTGGFSKESILPKRNSDKLIARKKDWDPKKYGGFDSPTVAYSVLVVAKVEKGKSKKLKSVKELLGITIMERSSFEKNPIDFLEAKGYKEVKKDLIIKLPKYSLFELENGRKRMLASAGELQKGNELALPSKYVNFLYLASHYEKLKGSPEDNEQKQLFVEQHKHYLDEIIEQISEFSKRVILADANLDKVLSAYNKHRDKPIREQAENIIHLFTLTNLGAPAAFKYFDTTIDRKRYTSTKEVLDATLIHQSITGLYETRIDLSQLGGDGGGSSGGSPAPGGTAPLEEEYRLFLEAPIQNVTLLEQWKREIPKVWAEINPPGLASTQAPIHVQLLSTALPVRVRQYPITLEAKRSLRETIRKFRAAGILRPVHSPWNTPLLPVRKSGTSEYRMVQDLREVNKRVETIHPTVPNPYTLLSLLPPDRIWYSVLDLKDAFFCIPLAPESQLIFAFEWADAEEGESGQLTWTRLPQGFKNSPTLFNEALNRDLQGFRLDHPSVSLLQYVDDLLIAADTQAACLSATRDLLMTLAELGYRVSGKKAQLCQEEVTYLGFKIHKGSRSLSNSRTQAILQIPVPKTKRQVREFLGTIGYCRLWIPGFAELAQPLYAATRPGNDPLVWGEKEEEAFQSLKLALTQPPALALPSLDKPFQLFVEETSGAAKGVLTQALGPWKRPVAYLSKRLDPVAAGWPRCLRAIAAAALLTREASKLTFGQDIEITSSHNLESLLRSPPDKWLTNARITQYQVLLLDPPRVRFKQTAALNPATLLPETDDTLPIHHCLDTLDSLTSTRPDLTDQPLAQAEATLFTDGSSYIRDGKRYAGAAVVTLDSVIWAEPLPIGTSAQKAELIALTKALEWSKDKSVNIYTDSRYAFATLHVHGMIYRERGWLTAGGKAIKNAPEILALLTAVWLPKRVAVMHCKGHQKDDAPTSTGNRRADEVAREVAIRPLSTQATISAGKRTADGSEFEKRTADGSEFESPKKKAKVE

SEQ ID NO: 1166 - protein, 2093 aa, synthetic construct
MPAAKRVKLDGGDKKYSIGLDIGTNSVGWAVITDEYKVPSKKFKVLGNTDRHSIKKNLIGALLFDSGETAEATRLKRTARRRYTRRKNRICYLQEIFSNEMAKVDDSFFHRLEESFLVEEDKKHERHPIFGNIVDEVAYHEKYPTIYHLRKKLVDSTDKADLRLIYLALAHMIKFRGHFLIEGDLNPDNSDVDKLFIQLVQTYNQLFEENPINASGVDAKAILSARLSKSRRLENLIAQLPGEKKNGLFGNLIALSLGLTPNFKSNFDLAEDAKLQLSKDTYDDDLDNLLAQIGDQYADLFLAAKNLSDAILLSDILRVNTEITKAPLSASMIKRYDEHHQDLTLLKALVRQQLPEKYKEIFFDQSKNGYAGYIDGGASQEEFYKFIKPILEKMDGTEELLVKLNREDLLRKQRTFDNGSIPHQIHLGELHAILRRQEDFYPFLKDNREKIEKILTFRIPYYVGPLARGNSRFAWMTRKSEETITPWNFEEVVDKGASAQSFIERMTNFDKNLPNEKVLPKHSLLYEYFTVYNELTKVKYVTEGMRKPAFLSGEQKKAIVDLLFKTNRKVTVKQLKEDYFKKIECFDSVEISGVEDRFNASLGTYHDLLKIIKDKDFLDNEENEDILEDIVLTLTLFEDREMIEERLKTYAHLFDDKVMKQLKRRRYTGWGRLSRKLINGIRDKQSGKTILDFLKSDGFANRNFMQLIHDDSLTFKEDIQKAQVSGQGDSLHEHIANLAGSPAIKKGILQTVKVVDELVKVMGRHKPENIVIEMARENQTTQKGQKNSRERMKRIEEGIKELGSQILKEHPVENTQLQNEKLYLYYLQNGRDMYVDQELDINRLSDYDVDHIVPQSFLKDDSIDNKVLTRSDKARGKSDNVPSEEVVKKMKNYWRQLLNAKLITQRKFDNLTKAERGGLSELDKAGFIKRQLVETRQITKHVAQILDSRMNTKYDENDKLIREVKVITLKSKLVSDFRKDFQFYKVREINNYHHAHDAYLNAVVGTALIKKYPKLESEFVYGDYKVYDVRKMIAKSEQEIGKATAKYFFYSNIMNFFKTEITLANGEIRKRPLIETNGETGEIVWDKGRDFATVRKVLSMPQVNIVKKTEVQTGGFSKESILPKRNSDKLIARKKDWDPKKYGGFDSPTVAYSVLVVAKVEKGKSKKLKSVKELLGITIMERSSFEKNPIDFLEAKGYKEVKKDLIIKLPKYSLFELENGRKRMLASAGELQKGNELALPSKYVNFLYLASHYEKLKGSPEDNEQKQLFVEQHKHYLDEIIEQISEFSKRVILADANLDKVLSAYNKHRDKPIREQAENIIHLFTLTNLGAPAAFKYFDTTIDRKRYTSTKEVLDATLIHQSITGLYETRIDLSQLGGDGGGGSGSSGGTAPLEEEYRLFLEAPIQNVTLLEQWKREIPKVWAEINPPGLASTQAPIHVQLLSTALPVRVRQYPITLEAKRSLRETIRKFRAAGILRPVHSPWNTPLLPVRKSGTSEYRMVQDLREVNKRVETIHPTVPNPYTLLSLLPPDRIWYSVLDLKDAFFCIPLAPESQLIFAFEWADAEEGESGQLTWTRLPQGFKNSPTLFNEALNRDLQGFRLDHPSVSLLQYVDDLLIAADTQAACLSATRDLLMTLAELGYRVSGKKAQLCQEEVTYLGFKIHKGSRSLSNSRTQAILQIPVPKTKRQVREFLGTIGYCRLWIPGFAELAQPLYAATRPGNDPLVWGEKEEEAFQSLKLALTQPPALALPSLDKPFQLFVEETSGAAKGVLTQALGPWKRPVAYLSKRLDPVAAGWPRCLRAIAAAALLTREASKLTFGQDIEITSSHNLESLLRSPPDKWLTNARITQYQVLLLDPPRVRFKQTAALNPATLLPETDDTLPIHHCLDTLDSLTSTRPDLTDQPLAQAEATLFTDGSSYIRDGKRYAGAAVVTLDSVIWAEPLPIGTSAQKAELIALTKALEWSKDKSVNIYTDSRYAFATLHVHGMIYRERGWLTAGGKAIKNAPEILALLTAVWLPKRVAVMHCKGHQKDDAPTSTGNRRADEVAREVAIRPLSTQATISAGKRTADGSEFEKRTADGSEFESPKKKAKVE

SEQ ID NO: 1167 - protein, 2098 aa, synthetic construct
MPAAKRVKLDGGDKKYSIGLDIGTNSVGWAVITDEYKVPSKKFKVLGNTDRHSIKKNLIGALLFDSGETAEATRLKRTARRRYTRRKNRICYLQEIFSNEMAKVDDSFFHRLEESFLVEEDKKHERHPIFGNIVDEVAYHEKYPTIYHLRKKLVDSTDKADLRLIYLALAHMIKFRGHFLIEGDLNPDNSDVDKLFIQLVQTYNQLFEENPINASGVDAKAILSARLSKSRRLENLIAQLPGEKKNGLFGNLIALSLGLTPNFKSNFDLAEDAKLQLSKDTYDDDLDNLLAQIGDQYADLFLAAKNLSDAILLSDILRVNTEITKAPLSASMIKRYDEHHQDLTLLKALVRQQLPEKYKEIFFDQSKNGYAGYIDGGASQEEFYKFIKPILEKMDGTEELLVKLNREDLLRKQRTFDNGSIPHQIHLGELHAILRRQEDFYPFLKDNREKIEKILTFRIPYYVGPLARGNSRFAWMTRKSEETITPWNFEEVVDKGASAQSFIERMTNFDKNLPNEKVLPKHSLLYEYFTVYNELTKVKYVTEGMRKPAFLSGEQKKAIVDLLFKTNRKVTVKQLKEDYFKKIECFDSVEISGVEDRFNASLGTYHDLLKIIKDKDFLDNEENEDILEDIVLTLTLFEDREMIEERLKTYAHLFDDKVMKQLKRRRYTGWGRLSRKLINGIRDKQSGKTILDFLKSDGFANRNFMQLIHDDSLTFKEDIQKAQVSGQGDSLHEHIANLAGSPAIKKGILQTVKVVDELVKVMGRHKPENIVIEMARENQTTQKGQKNSRERMKRIEEGIKELGSQILKEHPVENTQLQNEKLYLYYLQNGRDMYVDQELDINRLSDYDVDHIVPQSFLKDDSIDNKVLTRSDKARGKSDNVPSEEVVKKMKNYWRQLLNAKLITQRKFDNLTKAERGGLSELDKAGFIKRQLVETRQITKHVAQILDSRMNTKYDENDKLIREVKVITLKSKLVSDFRKDFQFYKVREINNYHHAHDAYLNAVVGTALIKKYPKLESEFVYGDYKVYDVRKMIAKSEQEIGKATAKYFFYSNIMNFFKTEITLANGEIRKRPLIETNGETGEIVWDKGRDFATVRKVLSMPQVNIVKKTEVQTGGFSKESILPKRNSDKLIARKKDWDPKKYGGFDSPTVAYSVLVVAKVEKGKSKKLKSVKELLGITIMERSSFEKNPIDFLEAKGYKEVKKDLIIKLPKYSLFELENGRKRMLASAGELQKGNELALPSKYVNFLYLASHYEKLKGSPEDNEQKQLFVEQHKHYLDEIIEQISEFSKRVILADANLDKVLSAYNKHRDKPIREQAENIIHLFTLTNLGAPAAFKYFDTTIDRKRYTSTKEVLDATLIHQSITGLYETRIDLSQLGGDGGEAAAKPAPGGGGGTAPLEEEYRLFLEAPIQNVTLLEQWKREIPKVWAEINPPGLASTQAPIHVQLLSTALPVRVRQYPITLEAKRSLRETIRKFRAAGILRPVHSPWNTPLLPVRKSGTSEYRMVQDLREVNKRVETIHPTVPNPYTLLSLLPPDRIWYSVLDLKDAFFCIPLAPESQLIFAFEWADAEEGESGQLTWTRLPQGFKNSPTLFNEALNRDLQGFRLDHPSVSLLQYVDDLLIAADTQAACLSATRDLLMTLAELGYRVSGKKAQLCQEEVTYLGFKIHKGSRSLSNSRTQAILQIPVPKTKRQVREFLGTIGYCRLWIPGFAELAQPLYAATRPGNDPLVWGEKEEEAFQSLKLALTQPPALALPSLDKPFQLFVEETSGAAKGVLTQALGPWKRPVAYLSKRLDPVAAGWPRCLRAIAAAALLTREASKLTFGQDIEITSSHNLESLLRSPPDKWLTNARITQYQVLLLDPPRVRFKQTAALNPATLLPETDDTLPIHHCLDTLDSLTSTRPDLTDQPLAQAEATLFTDGSSYIRDGKRYAGAAVVTLDSVIWAEPLPIGTSAQKAELIALTKALEWSKDKSVNIYTDSRYAFATLHVHGMIYRERGWLTAGGKAIKNAPEILALLTAVWLPKRVAVMHCKGHQKDDAPTSTGNRRADEVAREVAIRPLSTQATISAGKRTADGSEFEKRTADGSEFESPKKKAKVE

SEQ ID NO: 1168 - protein, 2093 aa, synthetic construct
MPAAKRVKLDGGDKKYSIGLDIGTNSVGWAVITDEYKVPSKKFKVLGNTDRHSIKKNLIGALLFDSGETAEATRLKRTARRRYTRRKNRICYLQEIFSNEMAKVDDSFFHRLEESFLVEEDKKHERHPIFGNIVDEVAYHEKYPTIYHLRKKLVDSTDKADLRLIYLALAHMIKFRGHFLIEGDLNPDNSDVDKLFIQLVQTYNQLFEENPINASGVDAKAILSARLSKSRRLENLIAQLPGEKKNGLFGNLIALSLGLTPNFKSNFDLAEDAKLQLSKDTYDDDLDNLLAQIGDQYADLFLAAKNLSDAILLSDILRVNTEITKAPLSASMIKRYDEHHQDLTLLKALVRQQLPEKYKEIFFDQSKNGYAGYIDGGASQEEFYKFIKPILEKMDGTEELLVKLNREDLLRKQRTFDNGSIPHQIHLGELHAILRRQEDFYPFLKDNREKIEKILTFRIPYYVGPLARGNSRFAWMTRKSEETITPWNFEEVVDKGASAQSFIERMTNFDKNLPNEKVLPKHSLLYEYFTVYNELTKVKYVTEGMRKPAFLSGEQKKAIVDLLFKTNRKVTVKQLKEDYFKKIECFDSVEISGVEDRFNASLGTYHDLLKIIKDKDFLDNEENEDILEDIVLTLTLFEDREMIEERLKTYAHLFDDKVMKQLKRRRYTGWGRLSRKLINGIRDKQSGKTILDFLKSDGFANRNFMQLIHDDSLTFKEDIQKAQVSGQGDSLHEHIANLAGSPAIKKGILQTVKVVDELVKVMGRHKPENIVIEMARENQTTQKGQKNSRERMKRIEEGIKELGSQILKEHPVENTQLQNEKLYLYYLQNGRDMYVDQELDINRLSDYDVDHIVPQSFLKDDSIDNKVLTRSDKARGKSDNVPSEEVVKKMKNYWRQLLNAKLITQRKFDNLTKAERGGLSELDKAGFIKRQLVETRQITKHVAQILDSRMNTKYDENDKLIREVKVITLKSKLVSDFRKDFQFYKVREINNYHHAHDAYLNAVVGTALIKKYPKLESEFVYGDYKVYDVRKMIAKSEQEIGKATAKYFFYSNIMNFFKTEITLANGEIRKRPLIETNGETGEIVWDKGRDFATVRKVLSMPQVNIVKKTEVQTGGFSKESILPKRNSDKLIARKKDWDPKKYGGFDSPTVAYSVLVVAKVEKGKSKKLKSVKELLGITIMERSSFEKNPIDFLEAKGYKEVKKDLIIKLPKYSLFELENGRKRMLASAGELQKGNELALPSKYVNFLYLASHYEKLKGSPEDNEQKQLFVEQHKHYLDEIIEQISEFSKRVILADANLDKVLSAYNKHRDKPIREQAENIIHLFTLTNLGAPAAFKYFDTTIDRKRYTSTKEVLDATLIHQSITGLYETRIDLSQLGGDGGGGGGGSPAPGGTLQLEEEYRLFEPESTQKQEMDIWLKNFPQAWAETGGMGTAHCQAPVLIQLKATATPISIRQYPMPHEAYQGIKPHIRRMLDQGILKPCQSPWNTPLLPVKKPGTEDYRPVQDLREVNKRVEDIHPTVPNPYNLLSTLPPSHPWYTVLDLKDAFFCLRLHSESQLLFAFEWRDPEIGLSGQLTWTRLPQGFKNSPTLFNEALHSDLADFRVRYPALVLLQYVDDLLLAAATRTECLEGTKALLETLGNKGYRASAKKAQICLQEVTYLGYSLKDGQRWLTKARKEAILSIPVPKNSRQVREFLGTAGYCRLWIPGFAELAAPLYPLTRPGTLFQWGTEQQLAFEDIKKALLSSPALGLPDITKPFELFIDENSGFAKGVLVQKLGPWKRPVAYLSKKLDTVASGWPPCLRMVAAIAILVKDAGKLTLGQPLTILTSHPVEALVRQPPNKWLSNARMTHYQAMLLDAERVHFGPTVSLNPATLLPLPSGGNHHDCLQILAETHGTRPDLTDQPLPDADLTWYTDGSSFIRNGEREAGAAVTTESEVIWAAPLPPGTSAQRAELIALTQALKMAEGKKLTVYTDSRYAFATTHVHGEIYRRRGWLTSEGKEIKNKNEILALLEALFLPKRLSIIHCPGHQKGDSPQAKGNRLADDTAKKAATETHSSLTVLPAGKRTADGSEFEKRTADGSEFESPKKKAKVE

SEQ ID NO: 1169 - protein, 2117 aa, synthetic construct
MPAAKRVKLDGGDKKYSIGLDIGTNSVGWAVITDEYKVPSKKFKVLGNTDRHSIKKNLIGALLFDSGETAEATRLKRTARRRYTRRKNRICYLQEIFSNEMAKVDDSFFHRLEESFLVEEDKKHERHPIFGNIVDEVAYHEKYPTIYHLRKKLVDSTDKADLRLIYLALAHMIKFRGHFLIEGDLNPDNSDVDKLFIQLVQTYNQLFEENPINASGVDAKAILSARLSKSRRLENLIAQLPGEKKNGLFGNLIALSLGLTPNFKSNFDLAEDAKLQLSKDTYDDDLDNLLAQIGDQYADLFLAAKNLSDAILLSDILRVNTEITKAPLSASMIKRYDEHHQDLTLLKALVRQQLPEKYKEIFFDQSKNGYAGYIDGGASQEEFYKFIKPILEKMDGTEELLVKLNREDLLRKQRTFDNGSIPHQIHLGELHAILRRQEDFYPFLKDNREKIEKILTFRIPYYVGPLARGNSRFAWMTRKSEETITPWNFEEVVDKGASAQSFIERMTNFDKNLPNEKVLPKHSLLYEYFTVYNELTKVKYVTEGMRKPAFLSGEQKKAIVDLLFKTNRKVTVKQLKEDYFKKIECFDSVEISGVEDRFNASLGTYHDLLKIIKDKDFLDNEENEDILEDIVLTLTLFEDREMIEERLKTYAHLFDDKVMKQLKRRRYTGWGRLSRKLINGIRDKQSGKTILDFLKSDGFANRNFMQLIHDDSLTFKEDIQKAQVSGQGDSLHEHIANLAGSPAIKKGILQTVKVVDELVKVMGRHKPENIVIEMARENQTTQKGQKNSRERMKRIEEGIKELGSQILKEHPVENTQLQNEKLYLYYLQNGRDMYVDQELDINRLSDYDVDHIVPQSFLKDDSIDNKVLTRSDKARGKSDNVPSEEVVKKMKNYWRQLLNAKLITQRKFDNLTKAERGGLSELDKAGFIKRQLVETRQITKHVAQILDSRMNTKYDENDKLIREVKVITLKSKLVSDFRKDFQFYKVREINNYHHAHDAYLNAVVGTALIKKYPKLESEFVYGDYKVYDVRKMIAKSEQEIGKATAKYFFYSNIMNFFKTEITLANGEIRKRPLIETNGETGEIVWDKGRDFATVRKVLSMPQVNIVKKTEVQTGGFSKESILPKRNSDKLIARKKDWDPKKYGGFDSPTVAYSVLVVAKVEKGKSKKLKSVKELLGITIMERSSFEKNPIDFLEAKGYKEVKKDLIIKLPKYSLFELENGRKRMLASAGELQKGNELALPSKYVNFLYLASHYEKLKGSPEDNEQKQLFVEQHKHYLDEIIEQISEFSKRVILADANLDKVLSAYNKHRDKPIREQAENIIHLFTLTNLGAPAAFKYFDTTIDRKRYTSTKEVLDATLIHQSITGLYETRIDLSQLGGDGGSGGSSGGSSGSETPGTSESATPESSGGSSGGSSGGTLQLEEEYRLFEPESTQKQEMDIWLKNFPQAWAETGGMGTAHCQAPVLIQLKATATPISIRQYPMPHEAYQGIKPHIRRMLDQGILKPCQSPWNTPLLPVKKPGTEDYRPVQDLREVNKRVEDIHPTVPNPYNLLSTLPPSHPWYTVLDLKDAFFCLRLHSESQLLFAFEWRDPEIGLSGQLTWTRLPQGFKNSPTLFNEALHSDLADFRVRYPALVLLQYVDDLLLAAATRTECLEGTKALLETLGNKGYRASAKKAQICLQEVTYLGYSLKDGQRWLTKARKEAILSIPVPKNSRQVREFLGTAGYCRLWIPGFAELAAPLYPLTRPGTLFQWGTEQQLAFEDIKKALLSSPALGLPDITKPFELFIDENSGFAKGVLVQKLGPWKRPVAYLSKKLDTVASGWPPCLRMVAAIAILVKDAGKLTLGQPLTILTSHPVEALVRQPPNKWLSNARMTHYQAMLLDAERVHFGPTVSLNPATLLPLPSGGNHHDCLQILAETHGTRPDLTDQPLPDADLTWYTDGSSFIRNGEREAGAAVTTESEVIWAAPLPPGTSAQRAELIALTQALKMAEGKKLTVYTDSRYAFATTHVHGEIYRRRGWLTSEGKEIKNKNEILALLEALFLPKRLSIIHCPGHQKGDSPQAKGNRLADDTAKKAATETHSSLTVLPAGKRTADGSEFEKRTADGSEFESPKKKAKVE

SEQ ID NO: 1170 - protein, 2130 aa, synthetic construct
MPAAKRVKLDGGDKKYSIGLDIGTNSVGWAVITDEYKVPSKKFKVLGNTDRHSIKKNLIGALLFDSGETAEATRLKRTARRRYTRRKNRICYLQEIFSNEMAKVDDSFFHRLEESFLVEEDKKHERHPIFGNIVDEVAYHEKYPTIYHLRKKLVDSTDKADLRLIYLALAHMIKFRGHFLIEGDLNPDNSDVDKLFIQLVQTYNQLFEENPINASGVDAKAILSARLSKSRRLENLIAQLPGEKKNGLFGNLIALSLGLTPNFKSNFDLAEDAKLQLSKDTYDDDLDNLLAQIGDQYADLFLAAKNLSDAILLSDILRVNTEITKAPLSASMIKRYDEHHQDLTLLKALVRQQLPEKYKEIFFDQSKNGYAGYIDGGASQEEFYKFIKPILEKMDGTEELLVKLNREDLLRKQRTFDNGSIPHQIHLGELHAILRRQEDFYPFLKDNREKIEKILTFRIPYYVGPLARGNSRFAWMTRKSEETITPWNFEEVVDKGASAQSFIERMTNFDKNLPNEKVLPKHSLLYEYFTVYNELTKVKYVTEGMRKPAFLSGEQKKAIVDLLFKTNRKVTVKQLKEDYFKKIECFDSVEISGVEDRFNASLGTYHDLLKIIKDKDFLDNEENEDILEDIVLTLTLFEDREMIEERLKTYAHLFDDKVMKQLKRRRYTGWGRLSRKLINGIRDKQSGKTILDFLKSDGFANRNFMQLIHDDSLTFKEDIQKAQVSGQGDSLHEHIANLAGSPAIKKGILQTVKVVDELVKVMGRHKPENIVIEMARENQTTQKGQKNSRERMKRIEEGIKELGSQILKEHPVENTQLQNEKLYLYYLQNGRDMYVDQELDINRLSDYDVDHIVPQSFLKDDSIDNKVLTRSDKARGKSDNVPSEEVVKKMKNYWRQLLNAKLITQRKFDNLTKAERGGLSELDKAGFIKRQLVETRQITKHVAQILDSRMNTKYDENDKLIREVKVITLKSKLVSDFRKDFQFYKVREINNYHHAHDAYLNAVVGTALIKKYPKLESEFVYGDYKVYDVRKMIAKSEQEIGKATAKYFFYSNIMNFFKTEITLANGEIRKRPLIETNGETGEIVWDKGRDFATVRKVLSMPQVNIVKKTEVQTGGFSKESILPKRNSDKLIARKKDWDPKKYGGFDSPTVAYSVLVVAKVEKGKSKKLKSVKELLGITIMERSSFEKNPIDFLEAKGYKEVKKDLIIKLPKYSLFELENGRKRMLASAGELQKGNELALPSKYVNFLYLASHYEKLKGSPEDNEQKQLFVEQHKHYLDEIIEQISEFSKRVILADANLDKVLSAYNKHRDKPIREQAENIIHLFTLTNLGAPAAFKYFDTTIDRKRYTSTKEVLDATLIHQSITGLYETRIDLSQLGGDGGAEAAAKEAAAKEAAAKEAAAKALEAEAAAKEAAAKEAAAKEAAAKAGGTLQLEEEYRLFEPESTQKQEMDIWLKNFPQAWAETGGMGTAHCQAPVLIQLKATATPISIRQYPMPHEAYQGIKPHIRRMLDQGILKPCQSPWNTPLLPVKKPGTEDYRPVQDLREVNKRVEDIHPTVPNPYNLLSTLPPSHPWYTVLDLKDAFFCLRLHSESQLLFAFEWRDPEIGLSGQLTWTRLPQGFKNSPTLFNEALHSDLADFRVRYPALVLLQYVDDLLLAAATRTECLEGTKALLETLGNKGYRASAKKAQICLQEVTYLGYSLKDGQRWLTKARKEAILSIPVPKNSRQVREFLGTAGYCRLWIPGFAELAAPLYPLTRPGTLFQWGTEQQLAFEDIKKALLSSPALGLPDITKPFELFIDENSGFAKGVLVQKLGPWKRPVAYLSKKLDTVASGWPPCLRMVAAIAILVKDAGKLTLGQPLTILTSHPVEALVRQPPNKWLSNARMTHYQAMLLDAERVHFGPTVSLNPATLLPLPSGGNHHDCLQILAETHGTRPDLTDQPLPDADLTWYTDGSSFIRNGEREAGAAVTTESEVIWAAPLPPGTSAQRAELIALTQALKMAEGKKLTVYTDSRYAFATTHVHGEIYRRRGWLTSEGKEIKNKNEILALLEALFLPKRLSIIHCPGHQKGDSPQAKGNRLADDTAKKAATETHSSLTVLPAGKRTADGSEFEKRTADGSEFESPKKKAKVE

SEQ ID NO: 1171 - protein, 2114 aa, synthetic construct
MPAAKRVKLDGGDKKYSIGLDIGTNSVGWAVITDEYKVPSKKFKVLGNTDRHSIKKNLIGALLFDSGETAEATRLKRTARRRYTRRKNRICYLQEIFSNEMAKVDDSFFHRLEESFLVEEDKKHERHPIFGNIVDEVAYHEKYPTIYHLRKKLVDSTDKADLRLIYLALAHMIKFRGHFLIEGDLNPDNSDVDKLFIQLVQTYNQLFEENPINASGVDAKAILSARLSKSRRLENLIAQLPGEKKNGLFGNLIALSLGLTPNFKSNFDLAEDAKLQLSKDTYDDDLDNLLAQIGDQYADLFLAAKNLSDAILLSDILRVNTEITKAPLSASMIKRYDEHHQDLTLLKALVRQQLPEKYKEIFFDQSKNGYAGYIDGGASQEEFYKFIKPILEKMDGTEELLVKLNREDLLRKQRTFDNGSIPHQIHLGELHAILRRQEDFYPFLKDNREKIEKILTFRIPYYVGPLARGNSRFAWMTRKSEETITPWNFEEVVDKGASAQSFIERMTNFDKNLPNEKVLPKHSLLYEYFTVYNELTKVKYVTEGMRKPAFLSGEQKKAIVDLLFKTNRKVTVKQLKEDYFKKIECFDSVEISGVEDRFNASLGTYHDLLKIIKDKDFLDNEENEDILEDIVLTLTLFEDREMIEERLKTYAHLFDDKVMKQLKRRRYTGWGRLSRKLINGIRDKQSGKTILDFLKSDGFANRNFMQLIHDDSLTFKEDIQKAQVSGQGDSLHEHIANLAGSPAIKKGILQTVKVVDELVKVMGRHKPENIVIEMARENQTTQKGQKNSRERMKRIEEGIKELGSQILKEHPVENTQLQNEKLYLYYLQNGRDMYVDQELDINRLSDYDVDHIVPQSFLKDDSIDNKVLTRSDKARGKSDNVPSEEVVKKMKNYWRQLLNAKLITQRKFDNLTKAERGGLSELDKAGFIKRQLVETRQITKHVAQILDSRMNTKYDENDKLIREVKVITLKSKLVSDFRKDFQFYKVREINNYHHAHDAYLNAVVGTALIKKYPKLESEFVYGDYKVYDVRKMIAKSEQEIGKATAKYFFYSNIMNFFKTEITLANGEIRKRPLIETNGETGEIVWDKGRDFATVRKVLSMPQVNIVKKTEVQTGGFSKESILPKRNSDKLIARKKDWDPKKYGGFDSPTVAYSVLVVAKVEKGKSKKLKSVKELLGITIMERSSFEKNPIDFLEAKGYKEVKKDLIIKLPKYSLFELENGRKRMLASAGELQKGNELALPSKYVNFLYLASHYEKLKGSPEDNEQKQLFVEQHKHYLDEIIEQISEFSKRVILADANLDKVLSAYNKHRDKPIREQAENIIHLFTLTNLGAPAAFKYFDTTIDRKRYTSTKEVLDATLIHQSITGLYETRIDLSQLGGDGGEAAAKEAAAKEAAAKEAAAKEAAAKEAAAKGGTLQLEEEYRLFEPESTQKQEMDIWLKNFPQAWAETGGMGTAHCQAPVLIQLKATATPISIRQYPMPHEAYQGIKPHIRRMLDQGILKPCQSPWNTPLLPVKKPGTEDYRPVQDLREVNKRVEDIHPTVPNPYNLLSTLPPSHPWYTVLDLKDAFFCLRLHSESQLLFAFEWRDPEIGLSGQLTWTRLPQGFKNSPTLFNEALHSDLADFRVRYPALVLLQYVDDLLLAAATRTECLEGTKALLETLGNKGYRASAKKAQICLQEVTYLGYSLKDGQRWLTKARKEAILSIPVPKNSRQVREFLGTAGYCRLWIPGFAELAAPLYPLTRPGTLFQWGTEQQLAFEDIKKALLSSPALGLPDITKPFELFIDENSGFAKGVLVQKLGPWKRPVAYLSKKLDTVASGWPPCLRMVAAIAILVKDAGKLTLGQPLTILTSHPVEALVRQPPNKWLSNARMTHYQAMLLDAERVHFGPTVSLNPATLLPLPSGGNHHDCLQILAETHGTRPDLTDQPLPDADLTWYTDGSSFIRNGEREAGAAVTTESEVIWAAPLPPGTSAQRAELIALTQALKMAEGKKLTVYTDSRYAFATTHVHGEIYRRRGWLTSEGKEIKNKNEILALLEALFLPKRLSIIHCPGHQKGDSPQAKGNRLADDTAKKAATETHSSLTVLPAGKRTADGSEFEKRTADGSEFESPKKKAKVE

SEQ ID NO: 1172 - protein, 2092 aa, synthetic construct
MPAAKRVKLDGGDKKYSIGLDIGTNSVGWAVITDEYKVPSKKFKVLGNTDRHSIKKNLIGALLFDSGETAEATRLKRTARRRYTRRKNRICYLQEIFSNEMAKVDDSFFHRLEESFLVEEDKKHERHPIFGNIVDEVAYHEKYPTIYHLRKKLVDSTDKADLRLIYLALAHMIKFRGHFLIEGDLNPDNSDVDKLFIQLVQTYNQLFEENPINASGVDAKAILSARLSKSRRLENLIAQLPGEKKNGLFGNLIALSLGLTPNFKSNFDLAEDAKLQLSKDTYDDDLDNLLAQIGDQYADLFLAAKNLSDAILLSDILRVNTEITKAPLSASMIKRYDEHHQDLTLLKALVRQQLPEKYKEIFFDQSKNGYAGYIDGGASQEEFYKFIKPILEKMDGTEELLVKLNREDLLRKQRTFDNGSIPHQIHLGELHAILRRQEDFYPFLKDNREKIEKILTFRIPYYVGPLARGNSRFAWMTRKSEETITPWNFEEVVDKGASAQSFIERMTNFDKNLPNEKVLPKHSLLYEYFTVYNELTKVKYVTEGMRKPAFLSGEQKKAIVDLLFKTNRKVTVKQLKEDYFKKIECFDSVEISGVEDRFNASLGTYHDLLKIIKDKDFLDNEENEDILEDIVLTLTLFEDREMIEERLKTYAHLFDDKVMKQLKRRRYTGWGRLSRKLINGIRDKQSGKTILDFLKSDGFANRNFMQLIHDDSLTFKEDIQKAQVSGQGDSLHEHIANLAGSPAIKKGILQTVKVVDELVKVMGRHKPENIVIEMARENQTTQKGQKNSRERMKRIEEGIKELGSQILKEHPVENTQLQNEKLYLYYLQNGRDMYVDQELDINRLSDYDVDHIVPQSFLKDDSIDNKVLTRSDKARGKSDNVPSEEVVKKMKNYWRQLLNAKLITQRKFDNLTKAERGGLSELDKAGFIKRQLVETRQITKHVAQILDSRMNTKYDENDKLIREVKVITLKSKLVSDFRKDFQFYKVREINNYHHAHDAYLNAVVGTALIKKYPKLESEFVYGDYKVYDVRKMIAKSEQEIGKATAKYFFYSNIMNFFKTEITLANGEIRKRPLIETNGETGEIVWDKGRDFATVRKVLSMPQVNIVKKTEVQTGGFSKESILPKRNSDKLIARKKDWDPKKYGGFDSPTVAYSVLVVAKVEKGKSKKLKSVKELLGITIMERSSFEKNPIDFLEAKGYKEVKKDLIIKLPKYSLFELENGRKRMLASAGELQKGNELALPSKYVNFLYLASHYEKLKGSPEDNEQKQLFVEQHKHYLDEIIEQISEFSKRVILADANLDKVLSAYNKHRDKPIREQAENIIHLFTLTNLGAPAAFKYFDTTIDRKRYTSTKEVLDATLIHQSITGLYETRIDLSQLGGDGGEAAAKGGSGGTLQLEEEYRLFEPESTQKQEMDIWLKNFPQAWAETGGMGTAHCQAPVLIQLKATATPISIRQYPMPHEAYQGIKPHIRRMLDQGILKPCQSPWNTPLLPVKKPGTEDYRPVQDLREVNKRVEDIHPTVPNPYNLLSTLPPSHPWYTVLDLKDAFFCLRLHSESQLLFAFEWRDPEIGLSGQLTWTRLPQGFKNSPTLFNEALHSDLADFRVRYPALVLLQYVDDLLLAAATRTECLEGTKALLETLGNKGYRASAKKAQICLQEVTYLGYSLKDGQRWLTKARKEAILSIPVPKNSRQVREFLGTAGYCRLWIPGFAELAAPLYPLTRPGTLFQWGTEQQLAFEDIKKALLSSPALGLPDITKPFELFIDENSGFAKGVLVQKLGPWKRPVAYLSKKLDTVASGWPPCLRMVAAIAILVKDAGKLTLGQPLTILTSHPVEALVRQPPNKWLSNARMTHYQAMLLDAERVHFGPTVSLNPATLLPLPSGGNHHDCLQILAETHGTRPDLTDQPLPDADLTWYTDGSSFIRNGEREAGAAVTTESEVIWAAPLPPGTSAQRAELIALTQALKMAEGKKLTVYTDSRYAFATTHVHGEIYRRRGWLTSEGKEIKNKNEILALLEALFLPKRLSIIHCPGHQKGDSPQAKGNRLADDTAKKAATETHSSLTVLPAGKRTADGSEFEKRTADGSEFESPKKKAKVE

SEQ ID NO: 1173 - protein, 2095 aa, synthetic construct
MPAAKRVKLDGGDKKYSIGLDIGTNSVGWAVITDEYKVPSKKFKVLGNTDRHSIKKNLIGALLFDSGETAEATRLKRTARRRYTRRKNRICYLQEIFSNEMAKVDDSFFHRLEESFLVEEDKKHERHPIFGNIVDEVAYHEKYPTIYHLRKKLVDSTDKADLRLIYLALAHMIKFRGHFLIEGDLNPDNSDVDKLFIQLVQTYNQLFEENPINASGVDAKAILSARLSKSRRLENLIAQLPGEKKNGLFGNLIALSLGLTPNFKSNFDLAEDAKLQLSKDTYDDDLDNLLAQIGDQYADLFLAAKNLSDAILLSDILRVNTEITKAPLSASMIKRYDEHHQDLTLLKALVRQQLPEKYKEIFFDQSKNGYAGYIDGGASQEEFYKFIKPILEKMDGTEELLVKLNREDLLRKQRTFDNGSIPHQIHLGELHAILRRQEDFYPFLKDNREKIEKILTFRIPYYVGPLARGNSRFAWMTRKSEETITPWNFEEVVDKGASAQSFIERMTNFDKNLPNEKVLPKHSLLYEYFTVYNELTKVKYVTEGMRKPAFLSGEQKKAIVDLLFKTNRKVTVKQLKEDYFKKIECFDSVEISGVEDRFNASLGTYHDLLKIIKDKDFLDNEENEDILEDIVLTLTLFEDREMIEERLKTYAHLFDDKVMKQLKRRRYTGWGRLSRKLINGIRDKQSGKTILDFLKSDGFANRNFMQLIHDDSLTFKEDIQKAQVSGQGDSLHEHIANLAGSPAIKKGILQTVKVVDELVKVMGRHKPENIVIEMARENQTTQKGQKNSRERMKRIEEGIKELGSQILKEHPVENTQLQNEKLYLYYLQNGRDMYVDQELDINRLSDYDVDHIVPQSFLKDDSIDNKVLTRSDKARGKSDNVPSEEVVKKMKNYWRQLLNAKLITQRKFDNLTKAERGGLSELDKAGFIKRQLVETRQITKHVAQILDSRMNTKYDENDKLIREVKVITLKSKLVSDFRKDFQFYKVREINNYHHAHDAYLNAVVGTALIKKYPKLESEFVYGDYKVYDVRKMIAKSEQEIGKATAKYFFYSNIMNFFKTEITLANGEIRKRPLIETNGETGEIVWDKGRDFATVRKVLSMPQVNIVKKTEVQTGGFSKESILPKRNSDKLIARKKDWDPKKYGGFDSPTVAYSVLVVAKVEKGKSKKLKSVKELLGITIMERSSFEKNPIDFLEAKGYKEVKKDLIIKLPKYSLFELENGRKRMLASAGELQKGNELALPSKYVNFLYLASHYEKLKGSPEDNEQKQLFVEQHKHYLDEIIEQISEFSKRVILADANLDKVLSAYNKHRDKPIREQAENIIHLFTLTNLGAPAAFKYFDTTIDRKRYTSTKEVLDATLIHQSITGLYETRIDLSQLGGDGGPAPAPAPAPAPGGTLQLEEEYRLFEPESTQKQEMDIWLKNFPQAWAETGGMGTAHCQAPVLIQLKATATPISIRQYPMPHEAYQGIKPHIRRMLDQGILKPCQSPWNTPLLPVKKPGTEDYRPVQDLREVNKRVEDIHPTVPNPYNLLSTLPPSHPWYTVLDLKDAFFCLRLHSESQLLFAFEWRDPEIGLSGQLTWTRLPQGFKNSPTLFNEALHSDLADFRVRYPALVLLQYVDDLLLAAATRTECLEGTKALLETLGNKGYRASAKKAQICLQEVTYLGYSLKDGQRWLTKARKEAILSIPVPKNSRQVREFLGTAGYCRLWIPGFAELAAPLYPLTRPGTLFQWGTEQQLAFEDIKKALLSSPALGLPDITKPFELFIDENSGFAKGVLVQKLGPWKRPVAYLSKKLDTVASGWPPCLRMVAAIAILVKDAGKLTLGQPLTILTSHPVEALVRQPPNKWLSNARMTHYQAMLLDAERVHFGPTVSLNPATLLPLPSGGNHHDCLQILAETHGTRPDLTDQPLPDADLTWYTDGSSFIRNGEREAGAAVTTESEVIWAAPLPPGTSAQRAELIALTQALKMAEGKKLTVYTDSRYAFATTHVHGEIYRRRGWLTSEGKEIKNKNEILALLEALFLPKRLSIIHCPGHQKGDSPQAKGNRLADDTAKKAATETHSSLTVLPAGKRTADGSEFEKRTADGSEFESPKKKAKVE

SEQ ID NO: 1174 - protein, 2099 aa, synthetic construct
MPAAKRVKLDGGDKKYSIGLDIGTNSVGWAVITDEYKVPSKKFKVLGNTDRHSIKKNLIGALLFDSGETAEATRLKRTARRRYTRRKNRICYLQEIFSNEMAKVDDSFFHRLEESFLVEEDKKHERHPIFGNIVDEVAYHEKYPTIYHLRKKLVDSTDKADLRLIYLALAHMIKFRGHFLIEGDLNPDNSDVDKLFIQLVQTYNQLFEENPINASGVDAKAILSARLSKSRRLENLIAQLPGEKKNGLFGNLIALSLGLTPNFKSNFDLAEDAKLQLSKDTYDDDLDNLLAQIGDQYADLFLAAKNLSDAILLSDILRVNTEITKAPLSASMIKRYDEHHQDLTLLKALVRQQLPEKYKEIFFDQSKNGYAGYIDGGASQEEFYKFIKPILEKMDGTEELLVKLNREDLLRKQRTFDNGSIPHQIHLGELHAILRRQEDFYPFLKDNREKIEKILTFRIPYYVGPLARGNSRFAWMTRKSEETITPWNFEEVVDKGASAQSFIERMTNFDKNLPNEKVLPKHSLLYEYFTVYNELTKVKYVTEGMRKPAFLSGEQKKAIVDLLFKTNRKVTVKQLKEDYFKKIECFDSVEISGVEDRFNASLGTYHDLLKIIKDKDFLDNEENEDILEDIVLTLTLFEDREMIEERLKTYAHLFDDKVMKQLKRRRYTGWGRLSRKLINGIRDKQSGKTILDFLKSDGFANRNFMQLIHDDSLTFKEDIQKAQVSGQGDSLHEHIANLAGSPAIKKGILQTVKVVDELVKVMGRHKPENIVIEMARENQTTQKGQKNSRERMKRIEEGIKELGSQILKEHPVENTQLQNEKLYLYYLQNGRDMYVDQELDINRLSDYDVDHIVPQSFLKDDSIDNKVLTRSDKARGKSDNVPSEEVVKKMKNYWRQLLNAKLITQRKFDNLTKAERGGLSELDKAGFIKRQLVETRQITKHVAQILDSRMNTKYDENDKLIREVKVITLKSKLVSDFRKDFQFYKVREINNYHHAHDAYLNAVVGTALIKKYPKLESEFVYGDYKVYDVRKMIAKSEQEIGKATAKYFFYSNIMNFFKTEITLANGEIRKRPLIETNGETGEIVWDKGRDFATVRKVLSMPQVNIVKKTEVQTGGFSKESILPKRNSDKLIARKKDWDPKKYGGFDSPTVAYSVLVVAKVEKGKSKKLKSVKELLGITIMERSSFEKNPIDFLEAKGYKEVKKDLIIKLPKYSLFELENGRKRMLASAGELQKGNELALPSKYVNFLYLASHYEKLKGSPEDNEQKQLFVEQHKHYLDEIIEQISEFSKRVILADANLDKVLSAYNKHRDKPIREQAENIIHLFTLTNLGAPAAFKYFDTTIDRKRYTSTKEVLDATLIHQSITGLYETRIDLSQLGGDGGGGGGSGGGGSGGGGSGGTLQLEEEYRLFEPESTQKQEMDIWLKNFPQAWAETGGMGTAHCQAPVLIQLKATATPISIRQYPMPHEAYQGIKPHIRRMLDQGILKPCQSPWNTPLLPVKKPGTEDYRPVQDLREVNKRVEDIHPTVPNPYNLLSTLPPSHPWYTVLDLKDAFFCLRLHSESQLLFAFEWRDPEIGLSGQLTWTRLPQGFKNSPTLFNEALHSDLADFRVRYPALVLLQYVDDLLLAAATRTECLEGTKALLETLGNKGYRASAKKAQICLQEVTYLGYSLKDGQRWLTKARKEAILSIPVPKNSRQVREFLGTAGYCRLWIPGFAELAAPLYPLTRPGTLFQWGTEQQLAFEDIKKALLSSPALGLPDITKPFELFIDENSGFAKGVLVQKLGPWKRPVAYLSKKLDTVASGWPPCLRMVAAIAILVKDAGKLTLGQPLTILTSHPVEALVRQPPNKWLSNARMTHYQAMLLDAERVHFGPTVSLNPATLLPLPSGGNHHDCLQILAETHGTRPDLTDQPLPDADLTWYTDGSSFIRNGEREAGAAVTTESEVIWAAPLPPGTSAQRAELIALTQALKMAEGKKLTVYTDSRYAFATTHVHGEIYRRRGWLTSEGKEIKNKNEILALLEALFLPKRLSIIHCPGHQKGDSPQAKGNRLADDTAKKAATETHSSLTVLPAGKRTADGSEFEKRTADGSEFESPKKKAKVE

SEQ ID NO: 1175 - protein, 2109 aa, synthetic construct
MPAAKRVKLDGGDKKYSIGLDIGTNSVGWAVITDEYKVPSKKFKVLGNTDRHSIKKNLIGALLFDSGETAEATRLKRTARRRYTRRKNRICYLQEIFSNEMAKVDDSFFHRLEESFLVEEDKKHERHPIFGNIVDEVAYHEKYPTIYHLRKKLVDSTDKADLRLIYLALAHMIKFRGHFLIEGDLNPDNSDVDKLFIQLVQTYNQLFEENPINASGVDAKAILSARLSKSRRLENLIAQLPGEKKNGLFGNLIALSLGLTPNFKSNFDLAEDAKLQLSKDTYDDDLDNLLAQIGDQYADLFLAAKNLSDAILLSDILRVNTEITKAPLSASMIKRYDEHHQDLTLLKALVRQQLPEKYKEIFFDQSKNGYAGYIDGGASQEEFYKFIKPILEKMDGTEELLVKLNREDLLRKQRTFDNGSIPHQIHLGELHAILRRQEDFYPFLKDNREKIEKILTFRIPYYVGPLARGNSRFAWMTRKSEETITPWNFEEVVDKGASAQSFIERMTNFDKNLPNEKVLPKHSLLYEYFTVYNELTKVKYVTEGMRKPAFLSGEQKKAIVDLLFKTNRKVTVKQLKEDYFKKIECFDSVEISGVEDRFNASLGTYHDLLKIIKDKDFLDNEENEDILEDIVLTLTLFEDREMIEERLKTYAHLFDDKVMKQLKRRRYTGWGRLSRKLINGIRDKQSGKTILDFLKSDGFANRNFMQLIHDDSLTFKEDIQKAQVSGQGDSLHEHIANLAGSPAIKKGILQTVKVVDELVKVMGRHKPENIVIEMARENQTTQKGQKNSRERMKRIEEGIKELGSQILKEHPVENTQLQNEKLYLYYLQNGRDMYVDQELDINRLSDYDVDHIVPQSFLKDDSIDNKVLTRSDKARGKSDNVPSEEVVKKMKNYWRQLLNAKLITQRKFDNLTKAERGGLSELDKAGFIKRQLVETRQITKHVAQILDSRMNTKYDENDKLIREVKVITLKSKLVSDFRKDFQFYKVREINNYHHAHDAYLNAVVGTALIKKYPKLESEFVYGDYKVYDVRKMIAKSEQEIGKATAKYFFYSNIMNFFKTEITLANGEIRKRPLIETNGETGEIVWDKGRDFATVRKVLSMPQVNIVKKTEVQTGGFSKESILPKRNSDKLIARKKDWDPKKYGGFDSPTVAYSVLVVAKVEKGKSKKLKSVKELLGITIMERSSFEKNPIDFLEAKGYKEVKKDLIIKLPKYSLFELENGRKRMLASAGELQKGNELALPSKYVNFLYLASHYEKLKGSPEDNEQKQLFVEQHKHYLDEIIEQISEFSKRVILADANLDKVLSAYNKHRDKPIREQAENIIHLFTLTNLGAPAAFKYFDTTIDRKRYTSTKEVLDATLIHQSITGLYETRIDLSQLGGDGGEAAAKEAAAKEAAAKEAAAKEAAAKGGTLQLEEEYRLFEPESTQKQEMDIWLKNFPQAWAETGGMGTAHCQAPVLIQLKATATPISIRQYPMPHEAYQGIKPHIRRMLDQGILKPCQSPWNTPLLPVKKPGTEDYRPVQDLREVNKRVEDIHPTVPNPYNLLSTLPPSHPWYTVLDLKDAFFCLRLHSESQLLFAFEWRDPEIGLSGQLTWTRLPQGFKNSPTLFNEALHSDLADFRVRYPALVLLQYVDDLLLAAATRTECLEGTKALLETLGNKGYRASAKKAQICLQEVTYLGYSLKDGQRWLTKARKEAILSIPVPKNSRQVREFLGTAGYCRLWIPGFAELAAPLYPLTRPGTLFQWGTEQQLAFEDIKKALLSSPALGLPDITKPFELFIDENSGFAKGVLVQKLGPWKRPVAYLSKKLDTVASGWPPCLRMVAAIAILVKDAGKLTLGQPLTILTSHPVEALVRQPPNKWLSNARMTHYQAMLLDAERVHFGPTVSLNPATLLPLPSGGNHHDCLQILAETHGTRPDLTDQPLPDADLTWYTDGSSFIRNGEREAGAAVTTESEVIWAAPLPPGTSAQRAELIALTQALKMAEGKKLTVYTDSRYAFATTHVHGEIYRRRGWLTSEGKEIKNKNEILALLEALFLPKRLSIIHCPGHQKGDSPQAKGNRLADDTAKKAATETHSSLTVLPAGKRTADGSEFEKRTADGSEFESPKKKAKVE

SEQ ID NO: 1176 - protein, 2095 aa, synthetic construct
MPAAKRVKLDGGDKKYSIGLDIGTNSVGWAVITDEYKVPSKKFKVLGNTDRHSIKKNLIGALLFDSGETAEATRLKRTARRRYTRRKNRICYLQEIFSNEMAKVDDSFFHRLEESFLVEEDKKHERHPIFGNIVDEVAYHEKYPTIYHLRKKLVDSTDKADLRLIYLALAHMIKFRGHFLIEGDLNPDNSDVDKLFIQLVQTYNQLFEENPINASGVDAKAILSARLSKSRRLENLIAQLPGEKKNGLFGNLIALSLGLTPNFKSNFDLAEDAKLQLSKDTYDDDLDNLLAQIGDQYADLFLAAKNLSDAILLSDILRVNTEITKAPLSASMIKRYDEHHQDLTLLKALVRQQLPEKYKEIFFDQSKNGYAGYIDGGASQEEFYKFIKPILEKMDGTEELLVKLNREDLLRKQRTFDNGSIPHQIHLGELHAILRRQEDFYPFLKDNREKIEKILTFRIPYYVGPLARGNSRFAWMTRKSEETITPWNFEEVVDKGASAQSFIERMTNFDKNLPNEKVLPKHSLLYEYFTVYNELTKVKYVTEGMRKPAFLSGEQKKAIVDLLFKTNRKVTVKQLKEDYFKKIECFDSVEISGVEDRFNASLGTYHDLLKIIKDKDFLDNEENEDILEDIVLTLTLFEDREMIEERLKTYAHLFDDKVMKQLKRRRYTGWGRLSRKLINGIRDKQSGKTILDFLKSDGFANRNFMQLIHDDSLTFKEDIQKAQVSGQGDSLHEHIANLAGSPAIKKGILQTVKVVDELVKVMGRHKPENIVIEMARENQTTQKGQKNSRERMKRIEEGIKELGSQILKEHPVENTQLQNEKLYLYYLQNGRDMYVDQELDINRLSDYDVDHIVPQSFLKDDSIDNKVLTRSDKARGKSDNVPSEEVVKKMKNYWRQLLNAKLITQRKFDNLTKAERGGLSELDKAGFIKRQLVETRQITKHVAQILDSRMNTKYDENDKLIREVKVITLKSKLVSDFRKDFQFYKVREINNYHHAHDAYLNAVVGTALIKKYPKLESEFVYGDYKVYDVRKMIAKSEQEIGKATAKYFFYSNIMNFFKTEITLANGEIRKRPLIETNGETGEIVWDKGRDFATVRKVLSMPQVNIVKKTEVQTGGFSKESILPKRNSDKLIARKKDWDPKKYGGFDSPTVAYSVLVVAKVEKGKSKKLKSVKELLGITIMERSSFEKNPIDFLEAKGYKEVKKDLIIKLPKYSLFELENGRKRMLASAGELQKGNELALPSKYVNFLYLASHYEKLKGSPEDNEQKQLFVEQHKHYLDEIIEQISEFSKRVILADANLDKVLSAYNKHRDKPIREQAENIIHLFTLTNLGAPAAFKYFDTTIDRKRYTSTKEVLDATLIHQSITGLYETRIDLSQLGGDGGGGSPAPEAAAKGGTLQLEEEYRLFEPESTQKQEMDIWLKNFPQAWAETGGMGTAHCQAPVLIQLKATATPISIRQYPMPHEAYQGIKPHIRRMLDQGILKPCQSPWNTPLLPVKKPGTEDYRPVQDLREVNKRVEDIHPTVPNPYNLLSTLPPSHPWYTVLDLKDAFFCLRLHSESQLLFAFEWRDPEIGLSGQLTWTRLPQGFKNSPTLFNEALHSDLADFRVRYPALVLLQYVDDLLLAAATRTECLEGTKALLETLGNKGYRASAKKAQICLQEVTYLGYSLKDGQRWLTKARKEAILSIPVPKNSRQVREFLGTAGYCRLWIPGFAELAAPLYPLTRPGTLFQWGTEQQLAFEDIKKALLSSPALGLPDITKPFELFIDENSGFAKGVLVQKLGPWKRPVAYLSKKLDTVASGWPPCLRMVAAIAILVKDAGKLTLGQPLTILTSHPVEALVRQPPNKWLSNARMTHYQAMLLDAERVHFGPTVSLNPATLLPLPSGGNHHDCLQILAETHGTRPDLTDQPLPDADLTWYTDGSSFIRNGEREAGAAVTTESEVIWAAPLPPGTSAQRAELIALTQALKMAEGKKLTVYTDSRYAFATTHVHGEIYRRRGWLTSEGKEIKNKNEILALLEALFLPKRLSIIHCPGHQKGDSPQAKGNRLADDTAKKAATETHSSLTVLPAGKRTADGSEFEKRTADGSEFESPKKKAKVE

SEQ ID NO: 1177 - protein, 2102 aa, synthetic construct
MPAAKRVKLDGGDKKYSIGLDIGTNSVGWAVITDEYKVPSKKFKVLGNTDRHSIKKNLIGALLFDSGETAEATRLKRTARRRYTRRKNRICYLQEIFSNEMAKVDDSFFHRLEESFLVEEDKKHERHPIFGNIVDEVAYHEKYPTIYHLRKKLVDSTDKADLRLIYLALAHMIKFRGHFLIEGDLNPDNSDVDKLFIQLVQTYNQLFEENPINASGVDAKAILSARLSKSRRLENLIAQLPGEKKNGLFGNLIALSLGLTPNFKSNFDLAEDAKLQLSKDTYDDDLDNLLAQIGDQYADLFLAAKNLSDAILLSDILRVNTEITKAPLSASMIKRYDEHHQDLTLLKALVRQQLPEKYKEIFFDQSKNGYAGYIDGGASQEEFYKFIKPILEKMDGTEELLVKLNREDLLRKQRTFDNGSIPHQIHLGELHAILRRQEDFYPFLKDNREKIEKILTFRIPYYVGPLARGNSRFAWMTRKSEETITPWNFEEVVDKGASAQSFIERMTNFDKNLPNEKVLPKHSLLYEYFTVYNELTKVKYVTEGMRKPAFLSGEQKKAIVDLLFKTNRKVTVKQLKEDYFKKIECFDSVEISGVEDRFNASLGTYHDLLKIIKDKDFLDNEENEDILEDIVLTLTLFEDREMIEERLKTYAHLFDDKVMKQLKRRRYTGWGRLSRKLINGIRDKQSGKTILDFLKSDGFANRNFMQLIHDDSLTFKEDIQKAQVSGQGDSLHEHIANLAGSPAIKKGILQTVKVVDELVKVMGRHKPENIVIEMARENQTTQKGQKNSRERMKRIEEGIKELGSQILKEHPVENTQLQNEKLYLYYLQNGRDMYVDQELDINRLSDYDVDHIVPQSFLKDDSIDNKVLTRSDKARGKSDNVPSEEVVKKMKNYWRQLLNAKLITQRKFDNLTKAERGGLSELDKAGFIKRQLVETRQITKHVAQILDSRMNTKYDENDKLIREVKVITLKSKLVSDFRKDFQFYKVREINNYHHAHDAYLNAVVGTALIKKYPKLESEFVYGDYKVYDVRKMIAKSEQEIGKATAKYFFYSNIMNFFKTEITLANGEIRKRPLIETNGETGEIVWDKGRDFATVRKVLSMPQVNIVKKTEVQTGGFSKESILPKRNSDKLIARKKDWDPKKYGGFDSPTVAYSVLVVAKVEKGKSKKLKSVKELLGITIMERSSFEKNPIDFLEAKGYKEVKKDLIIKLPKYSLFELENGRKRMLASAGELQKGNELALPSKYVNFLYLASHYEKLKGSPEDNEQKQLFVEQHKHYLDEIIEQISEFSKRVILADANLDKVLSAYNKHRDKPIREQAENIIHLFTLTNLGAPAAFKYFDTTIDRKRYTSTKEVLDATLIHQSITGLYETRIDLSQLGGDGGGGSGGSGGSGGSGGSGGSGGTLQLEEEYRLFEPESTQKQEMDIWLKNFPQAWAETGGMGTAHCQAPVLIQLKATATPISIRQYPMPHEAYQGIKPHIRRMLDQGILKPCQSPWNTPLLPVKKPGTEDYRPVQDLREVNKRVEDIHPTVPNPYNLLSTLPPSHPWYTVLDLKDAFFCLRLHSESQLLFAFEWRDPEIGLSGQLTWTRLPQGFKNSPTLFNEALHSDLADFRVRYPALVLLQYVDDLLLAAATRTECLEGTKALLETLGNKGYRASAKKAQICLQEVTYLGYSLKDGQRWLTKARKEAILSIPVPKNSRQVREFLGTAGYCRLWIPGFAELAAPLYPLTRPGTLFQWGTEQQLAFEDIKKALLSSPALGLPDITKPFELFIDENSGFAKGVLVQKLGPWKRPVAYLSKKLDTVASGWPPCLRMVAAIAILVKDAGKLTLGQPLTILTSHPVEALVRQPPNKWLSNARMTHYQAMLLDAERVHFGPTVSLNPATLLPLPSGGNHHDCLQILAETHGTRPDLTDQPLPDADLTWYTDGSSFIRNGEREAGAAVTTESEVIWAAPLPPGTSAQRAELIALTQALKMAEGKKLTVYTDSRYAFATTHVHGEIYRRRGWLTSEGKEIKNKNEILALLEALFLPKRLSIIHCPGHQKGDSPQAKGNRLADDTAKKAATETHSSLTVLPAGKRTADGSEFEKRTADGSEFESPKKKAKVE

SEQ ID NO: 1178 - protein, 2095 aa, synthetic construct
MPAAKRVKLDGGDKKYSIGLDIGTNSVGWAVITDEYKVPSKKFKVLGNTDRHSIKKNLIGALLFDSGETAEATRLKRTARRRYTRRKNRICYLQEIFSNEMAKVDDSFFHRLEESFLVEEDKKHERHPIFGNIVDEVAYHEKYPTIYHLRKKLVDSTDKADLRLIYLALAHMIKFRGHFLIEGDLNPDNSDVDKLFIQLVQTYNQLFEENPINASGVDAKAILSARLSKSRRLENLIAQLPGEKKNGLFGNLIALSLGLTPNFKSNFDLAEDAKLQLSKDTYDDDLDNLLAQIGDQYADLFLAAKNLSDAILLSDILRVNTEITKAPLSASMIKRYDEHHQDLTLLKALVRQQLPEKYKEIFFDQSKNGYAGYIDGGASQEEFYKFIKPILEKMDGTEELLVKLNREDLLRKQRTFDNGSIPHQIHLGELHAILRRQEDFYPFLKDNREKIEKILTFRIPYYVGPLARGNSRFAWMTRKSEETITPWNFEEVVDKGASAQSFIERMTNFDKNLPNEKVLPKHSLLYEYFTVYNELTKVKYVTEGMRKPAFLSGEQKKAIVDLLFKTNRKVTVKQLKEDYFKKIECFDSVEISGVEDRFNASLGTYHDLLKIIKDKDFLDNEENEDILEDIVLTLTLFEDREMIEERLKTYAHLFDDKVMKQLKRRRYTGWGRLSRKLINGIRDKQSGKTILDFLKSDGFANRNFMQLIHDDSLTFKEDIQKAQVSGQGDSLHEHIANLAGSPAIKKGILQTVKVVDELVKVMGRHKPENIVIEMARENQTTQKGQKNSRERMKRIEEGIKELGSQILKEHPVENTQLQNEKLYLYYLQNGRDMYVDQELDINRLSDYDVDHIVPQSFLKDDSIDNKVLTRSDKARGKSDNVPSEEVVKKMKNYWRQLLNAKLITQRKFDNLTKAERGGLSELDKAGFIKRQLVETRQITKHVAQILDSRMNTKYDENDKLIREVKVITLKSKLVSDFRKDFQFYKVREINNYHHAHDAYLNAVVGTALIKKYPKLESEFVYGDYKVYDVRKMIAKSEQEIGKATAKYFFYSNIMNFFKTEITLANGEIRKRPLIETNGETGEIVWDKGRDFATVRKVLSMPQVNIVKKTEVQTGGFSKESILPKRNSDKLIARKKDWDPKKYGGFDSPTVAYSVLVVAKVEKGKSKKLKSVKELLGITIMERSSFEKNPIDFLEAKGYKEVKKDLIIKLPKYSLFELENGRKRMLASAGELQKGNELALPSKYVNFLYLASHYEKLKGSPEDNEQKQLFVEQHKHYLDEIIEQISEFSKRVILADANLDKVLSAYNKHRDKPIREQAENIIHLFTLTNLGAPAAFKYFDTTIDRKRYTSTKEVLDATLIHQSITGLYETRIDLSQLGGDGGEAAAKGGSGSSGGTLQLEEEYRLFEPESTQKQEMDIWLKNFPQAWAETGGMGTAHCQAPVLIQLKATATPISIRQYPMPHEAYQGIKPHIRRMLDQGILKPCQSPWNTPLLPVKKPGTEDYRPVQDLREVNKRVEDIHPTVPNPYNLLSTLPPSHPWYTVLDLKDAFFCLRLHSESQLLFAFEWRDPEIGLSGQLTWTRLPQGFKNSPTLFNEALHSDLADFRVRYPALVLLQYVDDLLLAAATRTECLEGTKALLETLGNKGYRASAKKAQICLQEVTYLGYSLKDGQRWLTKARKEAILSIPVPKNSRQVREFLGTAGYCRLWIPGFAELAAPLYPLTRPGTLFQWGTEQQLAFEDIKKALLSSPALGLPDITKPFELFIDENSGFAKGVLVQKLGPWKRPVAYLSKKLDTVASGWPPCLRMVAAIAILVKDAGKLTLGQPLTILTSHPVEALVRQPPNKWLSNARMTHYQAMLLDAERVHFGPTVSLNPATLLPLPSGGNHHDCLQILAETHGTRPDLTDQPLPDADLTWYTDGSSFIRNGEREAGAAVTTESEVIWAAPLPPGTSAQRAELIALTQALKMAEGKKLTVYTDSRYAFATTHVHGEIYRRRGWLTSEGKEIKNKNEILALLEALFLPKRLSIIHCPGHQKGDSPQAKGNRLADDTAKKAATETHSSLTVLPAGKRTADGSEFEKRTADGSEFESPKKKAKVE

SEQ ID NO: 1179 - protein, 2095 aa, synthetic construct
MPAAKRVKLDGGDKKYSIGLDIGTNSVGWAVITDEYKVPSKKFKVLGNTDRHSIKKNLIGALLFDSGETAEATRLKRTARRRYTRRKNRICYLQEIFSNEMAKVDDSFFHRLEESFLVEEDKKHERHPIFGNIVDEVAYHEKYPTIYHLRKKLVDSTDKADLRLIYLALAHMIKFRGHFLIEGDLNPDNSDVDKLFIQLVQTYNQLFEENPINASGVDAKAILSARLSKSRRLENLIAQLPGEKKNGLFGNLIALSLGLTPNFKSNFDLAEDAKLQLSKDTYDDDLDNLLAQIGDQYADLFLAAKNLSDAILLSDILRVNTEITKAPLSASMIKRYDEHHQDLTLLKALVRQQLPEKYKEIFFDQSKNGYAGYIDGGASQEEFYKFIKPILEKMDGTEELLVKLNREDLLRKQRTFDNGSIPHQIHLGELHAILRRQEDFYPFLKDNREKIEKILTFRIPYYVGPLARGNSRFAWMTRKSEETITPWNFEEVVDKGASAQSFIERMTNFDKNLPNEKVLPKHSLLYEYFTVYNELTKVKYVTEGMRKPAFLSGEQKKAIVDLLFKTNRKVTVKQLKEDYFKKIECFDSVEISGVEDRFNASLGTYHDLLKIIKDKDFLDNEENEDILEDIVLTLTLFEDREMIEERLKTYAHLFDDKVMKQLKRRRYTGWGRLSRKLINGIRDKQSGKTILDFLKSDGFANRNFMQLIHDDSLTFKEDIQKAQVSGQGDSLHEHIANLAGSPAIKKGILQTVKVVDELVKVMGRHKPENIVIEMARENQTTQKGQKNSRERMKRIEEGIKELGSQILKEHPVENTQLQNEKLYLYYLQNGRDMYVDQELDINRLSDYDVDHIVPQSFLKDDSIDNKVLTRSDKARGKSDNVPSEEVVKKMKNYWRQLLNAKLITQRKFDNLTKAERGGLSELDKAGFIKRQLVETRQITKHVAQILDSRMNTKYDENDKLIREVKVITLKSKLVSDFRKDFQFYKVREINNYHHAHDAYLNAVVGTALIKKYPKLESEFVYGDYKVYDVRKMIAKSEQEIGKATAKYFFYSNIMNFFKTEITLANGEIRKRPLIETNGETGEIVWDKGRDFATVRKVLSMPQVNIVKKTEVQTGGFSKESILPKRNSDKLIARKKDWDPKKYGGFDSPTVAYSVLVVAKVEKGKSKKLKSVKELLGITIMERSSFEKNPIDFLEAKGYKEVKKDLIIKLPKYSLFELENGRKRMLASAGELQKGNELALPSKYVNFLYLASHYEKLKGSPEDNEQKQLFVEQHKHYLDEIIEQISEFSKRVILADANLDKVLSAYNKHRDKPIREQAENIIHLFTLTNLGAPAAFKYFDTTIDRKRYTSTKEVLDATLIHQSITGLYETRIDLSQLGGDGGGGGEAAAKPAPGGTLQLEEEYRLFEPESTQKQEMDIWLKNFPQAWAETGGMGTAHCQAPVLIQLKATATPISIRQYPMPHEAYQGIKPHIRRMLDQGILKPCQSPWNTPLLPVKKPGTEDYRPVQDLREVNKRVEDIHPTVPNPYNLLSTLPPSHPWYTVLDLKDAFFCLRLHSESQLLFAFEWRDPEIGLSGQLTWTRLPQGFKNSPTLFNEALHSDLADFRVRYPALVLLQYVDDLLLAAATRTECLEGTKALLETLGNKGYRASAKKAQICLQEVTYLGYSLKDGQRWLTKARKEAILSIPVPKNSRQVREFLGTAGYCRLWIPGFAELAAPLYPLTRPGTLFQWGTEQQLAFEDIKKALLSSPALGLPDITKPFELFIDENSGFAKGVLVQKLGPWKRPVAYLSKKLDTVASGWPPCLRMVAAIAILVKDAGKLTLGQPLTILTSHPVEALVRQPPNKWLSNARMTHYQAMLLDAERVHFGPTVSLNPATLLPLPSGGNHHDCLQILAETHGTRPDLTDQPLPDADLTWYTDGSSFIRNGEREAGAAVTTESEVIWAAPLPPGTSAQRAELIALTQALKMAEGKKLTVYTDSRYAFATTHVHGEIYRRRGWLTSEGKEIKNKNEILALLEALFLPKRLSIIHCPGHQKGDSPQAKGNRLADDTAKKAATETHSSLTVLPAGKRTADGSEFEKRTADGSEFESPKKKAKVE

SEQ ID NO: 1180 - protein, 2094 aa, synthetic construct
MPAAKRVKLDGGDKKYSIGLDIGTNSVGWAVITDEYKVPSKKFKVLGNTDRHSIKKNLIGALLFDSGETAEATRLKRTARRRYTRRKNRICYLQEIFSNEMAKVDDSFFHRLEESFLVEEDKKHERHPIFGNIVDEVAYHEKYPTIYHLRKKLVDSTDKADLRLIYLALAHMIKFRGHFLIEGDLNPDNSDVDKLFIQLVQTYNQLFEENPINASGVDAKAILSARLSKSRRLENLIAQLPGEKKNGLFGNLIALSLGLTPNFKSNFDLAEDAKLQLSKDTYDDDLDNLLAQIGDQYADLFLAAKNLSDAILLSDILRVNTEITKAPLSASMIKRYDEHHQDLTLLKALVRQQLPEKYKEIFFDQSKNGYAGYIDGGASQEEFYKFIKPILEKMDGTEELLVKLNREDLLRKQRTFDNGSIPHQIHLGELHAILRRQEDFYPFLKDNREKIEKILTFRIPYYVGPLARGNSRFAWMTRKSEETITPWNFEEVVDKGASAQSFIERMTNFDKNLPNEKVLPKHSLLYEYFTVYNELTKVKYVTEGMRKPAFLSGEQKKAIVDLLFKTNRKVTVKQLKEDYFKKIECFDSVEISGVEDRFNASLGTYHDLLKIIKDKDFLDNEENEDILEDIVLTLTLFEDREMIEERLKTYAHLFDDKVMKQLKRRRYTGWGRLSRKLINGIRDKQSGKTILDFLKSDGFANRNFMQLIHDDSLTFKEDIQKAQVSGQGDSLHEHIANLAGSPAIKKGILQTVKVVDELVKVMGRHKPENIVIEMARENQTTQKGQKNSRERMKRIEEGIKELGSQILKEHPVENTQLQNEKLYLYYLQNGRDMYVDQELDINRLSDYDVDHIVPQSFLKDDSIDNKVLTRSDKARGKSDNVPSEEVVKKMKNYWRQLLNAKLITQRKFDNLTKAERGGLSELDKAGFIKRQLVETRQITKHVAQILDSRMNTKYDENDKLIREVKVITLKSKLVSDFRKDFQFYKVREINNYHHAHDAYLNAVVGTALIKKYPKLESEFVYGDYKVYDVRKMIAKSEQEIGKATAKYFFYSNIMNFFKTEITLANGEIRKRPLIETNGETGEIVWDKGRDFATVRKVLSMPQVNIVKKTEVQTGGFSKESILPKRNSDKLIARKKDWDPKKYGGFDSPTVAYSVLVVAKVEKGKSKKLKSVKELLGITIMERSSFEKNPIDFLEAKGYKEVKKDLIIKLPKYSLFELENGRKRMLASAGELQKGNELALPSKYVNFLYLASHYEKLKGSPEDNEQKQLFVEQHKHYLDEIIEQISEFSKRVILADANLDKVLSAYNKHRDKPIREQAENIIHLFTLTNLGAPAAFKYFDTTIDRKRYTSTKEVLDATLIHQSITGLYETRIDLSQLGGDGGGGGGSGGGGSGGTLQLEEEYRLFEPESTQKQEMDIWLKNFPQAWAETGGMGTAHCQAPVLIQLKATATPISIRQYPMPHEAYQGIKPHIRRMLDQGILKPCQSPWNTPLLPVKKPGTEDYRPVQDLREVNKRVEDIHPTVPNPYNLLSTLPPSHPWYTVLDLKDAFFCLRLHSESQLLFAFEWRDPEIGLSGQLTWTRLPQGFKNSPTLFNEALHSDLADFRVRYPALVLLQYVDDLLLAAATRTECLEGTKALLETLGNKGYRASAKKAQICLQEVTYLGYSLKDGQRWLTKARKEAILSIPVPKNSRQVREFLGTAGYCRLWIPGFAELAAPLYPLTRPGTLFQWGTEQQLAFEDIKKALLSSPALGLPDITKPFELFIDENSGFAKGVLVQKLGPWKRPVAYLSKKLDTVASGWPPCLRMVAAIAILVKDAGKLTLGQPLTILTSHPVEALVRQPPNKWLSNARMTHYQAMLLDAERVHFGPTVSLNPATLLPLPSGGNHHDCLQILAETHGTRPDLTDQPLPDADLTWYTDGSSFIRNGEREAGAAVTTESEVIWAAPLPPGTSAQRAELIALTQALKMAEGKKLTVYTDSRYAFATTHVHGEIYRRRGWLTSEGKEIKNKNEILALLEALFLPKRLSIIHCPGHQKGDSPQAKGNRLADDTAKKAATETHSSLTVLPAGKRTADGSEFEKRTADGSEFESPKKKAKVE

SEQ ID NO: 1181 - protein, 2091 aa, synthetic construct
MPAAKRVKLDGGDKKYSIGLDIGTNSVGWAVITDEYKVPSKKFKVLGNTDRHSIKKNLIGALLFDSGETAEATRLKRTARRRYTRRKNRICYLQEIFSNEMAKVDDSFFHRLEESFLVEEDKKHERHPIFGNIVDEVAYHEKYPTIYHLRKKLVDSTDKADLRLIYLALAHMIKFRGHFLIEGDLNPDNSDVDKLFIQLVQTYNQLFEENPINASGVDAKAILSARLSKSRRLENLIAQLPGEKKNGLFGNLIALSLGLTPNFKSNFDLAEDAKLQLSKDTYDDDLDNLLAQIGDQYADLFLAAKNLSDAILLSDILRVNTEITKAPLSASMIKRYDEHHQDLTLLKALVRQQLPEKYKEIFFDQSKNGYAGYIDGGASQEEFYKFIKPILEKMDGTEELLVKLNREDLLRKQRTFDNGSIPHQIHLGELHAILRRQEDFYPFLKDNREKIEKILTFRIPYYVGPLARGNSRFAWMTRKSEETITPWNFEEVVDKGASAQSFIERMTNFDKNLPNEKVLPKHSLLYEYFTVYNELTKVKYVTEGMRKPAFLSGEQKKAIVDLLFKTNRKVTVKQLKEDYFKKIECFDSVEISGVEDRFNASLGTYHDLLKIIKDKDFLDNEENEDILEDIVLTLTLFEDREMIEERLKTYAHLFDDKVMKQLKRRRYTGWGRLSRKLINGIRDKQSGKTILDFLKSDGFANRNFMQLIHDDSLTFKEDIQKAQVSGQGDSLHEHIANLAGSPAIKKGILQTVKVVDELVKVMGRHKPENIVIEMARENQTTQKGQKNSRERMKRIEEGIKELGSQILKEHPVENTQLQNEKLYLYYLQNGRDMYVDQELDINRLSDYDVDHIVPQSFLKDDSIDNKVLTRSDKARGKSDNVPSEEVVKKMKNYWRQLLNAKLITQRKFDNLTKAERGGLSELDKAGFIKRQLVETRQITKHVAQILDSRMNTKYDENDKLIREVKVITLKSKLVSDFRKDFQFYKVREINNYHHAHDAYLNAVVGTALIKKYPKLESEFVYGDYKVYDVRKMIAKSEQEIGKATAKYFFYSNIMNFFKTEITLANGEIRKRPLIETNGETGEIVWDKGRDFATVRKVLSMPQVNIVKKTEVQTGGFSKESILPKRNSDKLIARKKDWDPKKYGGFDSPTVAYSVLVVAKVEKGKSKKLKSVKELLGITIMERSSFEKNPIDFLEAKGYKEVKKDLIIKLPKYSLFELENGRKRMLASAGELQKGNELALPSKYVNFLYLASHYEKLKGSPEDNEQKQLFVEQHKHYLDEIIEQISEFSKRVILADANLDKVLSAYNKHRDKPIREQAENIIHLFTLTNLGAPAAFKYFDTTIDRKRYTSTKEVLDATLIHQSITGLYETRIDLSQLGGDGGGGGGGGGGGTLQLEEEYRLFEPESTQKQEMDIWLKNFPQAWAETGGMGTAHCQAPVLIQLKATATPISIRQYPMPHEAYQGIKPHIRRMLDQGILKPCQSPWNTPLLPVKKPGTEDYRPVQDLREVNKRVEDIHPTVPNPYNLLSTLPPSHPWYTVLDLKDAFFCLRLHSESQLLFAFEWRDPEIGLSGQLTWTRLPQGFKNSPTLFNEALHSDLADFRVRYPALVLLQYVDDLLLAAATRTECLEGTKALLETLGNKGYRASAKKAQICLQEVTYLGYSLKDGQRWLTKARKEAILSIPVPKNSRQVREFLGTAGYCRLWIPGFAELAAPLYPLTRPGTLFQWGTEQQLAFEDIKKALLSSPALGLPDITKPFELFIDENSGFAKGVLVQKLGPWKRPVAYLSKKLDTVASGWPPCLRMVAAIAILVKDAGKLTLGQPLTILTSHPVEALVRQPPNKWLSNARMTHYQAMLLDAERVHFGPTVSLNPATLLPLPSGGNHHDCLQILAETHGTRPDLTDQPLPDADLTWYTDGSSFIRNGEREAGAAVTTESEVIWAAPLPPGTSAQRAELIALTQALKMAEGKKLTVYTDSRYAFATTHVHGEIYRRRGWLTSEGKEIKNKNEILALLEALFLPKRLSIIHCPGHQKGDSPQAKGNRLADDTAKKAATETHSSLTVLPAGKRTADGSEFEKRTADGSEFESPKKKAKVE

SEQ ID NO: 1182 - protein, 2093 aa, synthetic construct
MPAAKRVKLDGGDKKYSIGLDIGTNSVGWAVITDEYKVPSKKFKVLGNTDRHSIKKNLIGALLFDSGETAEATRLKRTARRRYTRRKNRICYLQEIFSNEMAKVDDSFFHRLEESFLVEEDKKHERHPIFGNIVDEVAYHEKYPTIYHLRKKLVDSTDKADLRLIYLALAHMIKFRGHFLIEGDLNPDNSDVDKLFIQLVQTYNQLFEENPINASGVDAKAILSARLSKSRRLENLIAQLPGEKKNGLFGNLIALSLGLTPNFKSNFDLAEDAKLQLSKDTYDDDLDNLLAQIGDQYADLFLAAKNLSDAILLSDILRVNTEITKAPLSASMIKRYDEHHQDLTLLKALVRQQLPEKYKEIFFDQSKNGYAGYIDGGASQEEFYKFIKPILEKMDGTEELLVKLNREDLLRKQRTFDNGSIPHQIHLGELHAILRRQEDFYPFLKDNREKIEKILTFRIPYYVGPLARGNSRFAWMTRKSEETITPWNFEEVVDKGASAQSFIERMTNFDKNLPNEKVLPKHSLLYEYFTVYNELTKVKYVTEGMRKPAFLSGEQKKAIVDLLFKTNRKVTVKQLKEDYFKKIECFDSVEISGVEDRFNASLGTYHDLLKIIKDKDFLDNEENEDILEDIVLTLTLFEDREMIEERLKTYAHLFDDKVMKQLKRRRYTGWGRLSRKLINGIRDKQSGKTILDFLKSDGFANRNFMQLIHDDSLTFKEDIQKAQVSGQGDSLHEHIANLAGSPAIKKGILQTVKVVDELVKVMGRHKPENIVIEMARENQTTQKGQKNSRERMKRIEEGIKELGSQILKEHPVENTQLQNEKLYLYYLQNGRDMYVDQELDINRLSDYDVDHIVPQSFLKDDSIDNKVLTRSDKARGKSDNVPSEEVVKKMKNYWRQLLNAKLITQRKFDNLTKAERGGLSELDKAGFIKRQLVETRQITKHVAQILDSRMNTKYDENDKLIREVKVITLKSKLVSDFRKDFQFYKVREINNYHHAHDAYLNAVVGTALIKKYPKLESEFVYGDYKVYDVRKMIAKSEQEIGKATAKYFFYSNIMNFFKTEITLANGEIRKRPLIETNGETGEIVWDKGRDFATVRKVLSMPQVNIVKKTEVQTGGFSKESILPKRNSDKLIARKKDWDPKKYGGFDSPTVAYSVLVVAKVEKGKSKKLKSVKELLGITIMERSSFEKNPIDFLEAKGYKEVKKDLIIKLPKYSLFELENGRKRMLASAGELQKGNELALPSKYVNFLYLASHYEKLKGSPEDNEQKQLFVEQHKHYLDEIIEQISEFSKRVILADANLDKVLSAYNKHRDKPIREQAENIIHLFTLTNLGAPAAFKYFDTTIDRKRYTSTKEVLDATLIHQSITGLYETRIDLSQLGGDGGGGGPAPGGSGGTLQLEEEYRLFEPESTQKQEMDIWLKNFPQAWAETGGMGTAHCQAPVLIQLKATATPISIRQYPMPHEAYQGIKPHIRRMLDQGILKPCQSPWNTPLLPVKKPGTEDYRPVQDLREVNKRVEDIHPTVPNPYNLLSTLPPSHPWYTVLDLKDAFFCLRLHSESQLLFAFEWRDPEIGLSGQLTWTRLPQGFKNSPTLFNEALHSDLADFRVRYPALVLLQYVDDLLLAAATRTECLEGTKALLETLGNKGYRASAKKAQICLQEVTYLGYSLKDGQRWLTKARKEAILSIPVPKNSRQVREFLGTAGYCRLWIPGFAELAAPLYPLTRPGTLFQWGTEQQLAFEDIKKALLSSPALGLPDITKPFELFIDENSGFAKGVLVQKLGPWKRPVAYLSKKLDTVASGWPPCLRMVAAIAILVKDAGKLTLGQPLTILTSHPVEALVRQPPNKWLSNARMTHYQAMLLDAERVHFGPTVSLNPATLLPLPSGGNHHDCLQILAETHGTRPDLTDQPLPDADLTWYTDGSSFIRNGEREAGAAVTTESEVIWAAPLPPGTSAQRAELIALTQALKMAEGKKLTVYTDSRYAFATTHVHGEIYRRRGWLTSEGKEIKNKNEILALLEALFLPKRLSIIHCPGHQKGDSPQAKGNRLADDTAKKAATETHSSLTVLPAGKRTADGSEFEKRTADGSEFESPKKKAKVE

SEQ ID NO: 1183 - protein, 2089 aa, synthetic construct
MPAAKRVKLDGGDKKYSIGLDIGTNSVGWAVITDEYKVPSKKFKVLGNTDRHSIKKNLIGALLFDSGETAEATRLKRTARRRYTRRKNRICYLQEIFSNEMAKVDDSFFHRLEESFLVEEDKKHERHPIFGNIVDEVAYHEKYPTIYHLRKKLVDSTDKADLRLIYLALAHMIKFRGHFLIEGDLNPDNSDVDKLFIQLVQTYNQLFEENPINASGVDAKAILSARLSKSRRLENLIAQLPGEKKNGLFGNLIALSLGLTPNFKSNFDLAEDAKLQLSKDTYDDDLDNLLAQIGDQYADLFLAAKNLSDAILLSDILRVNTEITKAPLSASMIKRYDEHHQDLTLLKALVRQQLPEKYKEIFFDQSKNGYAGYIDGGASQEEFYKFIKPILEKMDGTEELLVKLNREDLLRKQRTFDNGSIPHQIHLGELHAILRRQEDFYPFLKDNREKIEKILTFRIPYYVGPLARGNSRFAWMTRKSEETITPWNFEEVVDKGASAQSFIERMTNFDKNLPNEKVLPKHSLLYEYFTVYNELTKVKYVTEGMRKPAFLSGEQKKAIVDLLFKTNRKVTVKQLKEDYFKKIECFDSVEISGVEDRFNASLGTYHDLLKIIKDKDFLDNEENEDILEDIVLTLTLFEDREMIEERLKTYAHLFDDKVMKQLKRRRYTGWGRLSRKLINGIRDKQSGKTILDFLKSDGFANRNFMQLIHDDSLTFKEDIQKAQVSGQGDSLHEHIANLAGSPAIKKGILQTVKVVDELVKVMGRHKPENIVIEMARENQTTQKGQKNSRERMKRIEEGIKELGSQILKEHPVENTQLQNEKLYLYYLQNGRDMYVDQELDINRLSDYDVDHIVPQSFLKDDSIDNKVLTRSDKARGKSDNVPSEEVVKKMKNYWRQLLNAKLITQRKFDNLTKAERGGLSELDKAGFIKRQLVETRQITKHVAQILDSRMNTKYDENDKLIREVKVITLKSKLVSDFRKDFQFYKVREINNYHHAHDAYLNAVVGTALIKKYPKLESEFVYGDYKVYDVRKMIAKSEQEIGKATAKYFFYSNIMNFFKTEITLANGEIRKRPLIETNGETGEIVWDKGRDFATVRKVLSMPQVNIVKKTEVQTGGFSKESILPKRNSDKLIARKKDWDPKKYGGFDSPTVAYSVLVVAKVEKGKSKKLKSVKELLGITIMERSSFEKNPIDFLEAKGYKEVKKDLIIKLPKYSLFELENGRKRMLASAGELQKGNELALPSKYVNFLYLASHYEKLKGSPEDNEQKQLFVEQHKHYLDEIIEQISEFSKRVILADANLDKVLSAYNKHRDKPIREQAENIIHLFTLTNLGAPAAFKYFDTTIDRKRYTSTKEVLDATLIHQSITGLYETRIDLSQLGGDGGEAAAKGGTLQLEEEYRLFEPESTQKQEMDIWLKNFPQAWAETGGMGTAHCQAPVLIQLKATATPISIRQYPMPHEAYQGIKPHIRRMLDQGILKPCQSPWNTPLLPVKKPGTEDYRPVQDLREVNKRVEDIHPTVPNPYNLLSTLPPSHPWYTVLDLKDAFFCLRLHSESQLLFAFEWRDPEIGLSGQLTWTRLPQGFKNSPTLFNEALHSDLADFRVRYPALVLLQYVDDLLLAAATRTECLEGTKALLETLGNKGYRASAKKAQICLQEVTYLGYSLKDGQRWLTKARKEAILSIPVPKNSRQVREFLGTAGYCRLWIPGFAELAAPLYPLTRPGTLFQWGTEQQLAFEDIKKALLSSPALGLPDITKPFELFIDENSGFAKGVLVQKLGPWKRPVAYLSKKLDTVASGWPPCLRMVAAIAILVKDAGKLTLGQPLTILTSHPVEALVRQPPNKWLSNARMTHYQAMLLDAERVHFGPTVSLNPATLLPLPSGGNHHDCLQILAETHGTRPDLTDQPLPDADLTWYTDGSSFIRNGEREAGAAVTTESEVIWAAPLPPGTSAQRAELIALTQALKMAEGKKLTVYTDSRYAFATTHVHGEIYRRRGWLTSEGKEIKNKNEILALLEALFLPKRLSIIHCPGHQKGDSPQAKGNRLADDTAKKAATETHSSLTVLPAGKRTADGSEFEKRTADGSEFESPKKKAKVE

SEQ ID NO: 1184 - protein, 2090 aa, synthetic construct
MPAAKRVKLDGGDKKYSIGLDIGTNSVGWAVITDEYKVPSKKFKVLGNTDRHSIKKNLIGALLFDSGETAEATRLKRTARRRYTRRKNRICYLQEIFSNEMAKVDDSFFHRLEESFLVEEDKKHERHPIFGNIVDEVAYHEKYPTIYHLRKKLVDSTDKADLRLIYLALAHMIKFRGHFLIEGDLNPDNSDVDKLFIQLVQTYNQLFEENPINASGVDAKAILSARLSKSRRLENLIAQLPGEKKNGLFGNLIALSLGLTPNFKSNFDLAEDAKLQLSKDTYDDDLDNLLAQIGDQYADLFLAAKNLSDAILLSDILRVNTEITKAPLSASMIKRYDEHHQDLTLLKALVRQQLPEKYKEIFFDQSKNGYAGYIDGGASQEEFYKFIKPILEKMDGTEELLVKLNREDLLRKQRTFDNGSIPHQIHLGELHAILRRQEDFYPFLKDNREKIEKILTFRIPYYVGPLARGNSRFAWMTRKSEETITPWNFEEVVDKGASAQSFIERMTNFDKNLPNEKVLPKHSLLYEYFTVYNELTKVKYVTEGMRKPAFLSGEQKKAIVDLLFKTNRKVTVKQLKEDYFKKIECFDSVEISGVEDRFNASLGTYHDLLKIIKDKDFLDNEENEDILEDIVLTLTLFEDREMIEERLKTYAHLFDDKVMKQLKRRRYTGWGRLSRKLINGIRDKQSGKTILDFLKSDGFANRNFMQLIHDDSLTFKEDIQKAQVSGQGDSLHEHIANLAGSPAIKKGILQTVKVVDELVKVMGRHKPENIVIEMARENQTTQKGQKNSRERMKRIEEGIKELGSQILKEHPVENTQLQNEKLYLYYLQNGRDMYVDQELDINRLSDYDVDHIVPQSFLKDDSIDNKVLTRSDKARGKSDNVPSEEVVKKMKNYWRQLLNAKLITQRKFDNLTKAERGGLSELDKAGFIKRQLVETRQITKHVAQILDSRMNTKYDENDKLIREVKVITLKSKLVSDFRKDFQFYKVREINNYHHAHDAYLNAVVGTALIKKYPKLESEFVYGDYKVYDVRKMIAKSEQEIGKATAKYFFYSNIMNFFKTEITLANGEIRKRPLIETNGETGEIVWDKGRDFATVRKVLSMPQVNIVKKTEVQTGGFSKESILPKRNSDKLIARKKDWDPKKYGGFDSPTVAYSVLVVAKVEKGKSKKLKSVKELLGITIMERSSFEKNPIDFLEAKGYKEVKKDLIIKLPKYSLFELENGRKRMLASAGELQKGNELALPSKYVNFLYLASHYEKLKGSPEDNEQKQLFVEQHKHYLDEIIEQISEFSKRVILADANLDKVLSAYNKHRDKPIREQAENIIHLFTLTNLGAPAAFKYFDTTIDRKRYTSTKEVLDATLIHQSITGLYETRIDLSQLGGDGGGGSGGGGGTLQLEEEYRLFEPESTQKQEMDIWLKNFPQAWAETGGMGTAHCQAPVLIQLKATATPISIRQYPMPHEAYQGIKPHIRRMLDQGILKPCQSPWNTPLLPVKKPGTEDYRPVQDLREVNKRVEDIHPTVPNPYNLLSTLPPSHPWYTVLDLKDAFFCLRLHSESQLLFAFEWRDPEIGLSGQLTWTRLPQGFKNSPTLFNEALHSDLADFRVRYPALVLLQYVDDLLLAAATRTECLEGTKALLETLGNKGYRASAKKAQICLQEVTYLGYSLKDGQRWLTKARKEAILSIPVPKNSRQVREFLGTAGYCRLWIPGFAELAAPLYPLTRPGTLFQWGTEQQLAFEDIKKALLSSPALGLPDITKPFELFIDENSGFAKGVLVQKLGPWKRPVAYLSKKLDTVASGWPPCLRMVAAIAILVKDAGKLTLGQPLTILTSHPVEALVRQPPNKWLSNARMTHYQAMLLDAERVHFGPTVSLNPATLLPLPSGGNHHDCLQILAETHGTRPDLTDQPLPDADLTWYTDGSSFIRNGEREAGAAVTTESEVIWAAPLPPGTSAQRAELIALTQALKMAEGKKLTVYTDSRYAFATTHVHGEIYRRRGWLTSEGKEIKNKNEILALLEALFLPKRLSIIHCPGHQKGDSPQAKGNRLADDTAKKAATETHSSLTVLPAGKRTADGSEFEKRTADGSEFESPKKKAKVE

SEQ ID NO: 1185 - protein, 2095 aa, synthetic construct
MPAAKRVKLDGGDKKYSIGLDIGTNSVGWAVITDEYKVPSKKFKVLGNTDRHSIKKNLIGALLFDSGETAEATRLKRTARRRYTRRKNRICYLQEIFSNEMAKVDDSFFHRLEESFLVEEDKKHERHPIFGNIVDEVAYHEKYPTIYHLRKKLVDSTDKADLRLIYLALAHMIKFRGHFLIEGDLNPDNSDVDKLFIQLVQTYNQLFEENPINASGVDAKAILSARLSKSRRLENLIAQLPGEKKNGLFGNLIALSLGLTPNFKSNFDLAEDAKLQLSKDTYDDDLDNLLAQIGDQYADLFLAAKNLSDAILLSDILRVNTEITKAPLSASMIKRYDEHHQDLTLLKALVRQQLPEKYKEIFFDQSKNGYAGYIDGGASQEEFYKFIKPILEKMDGTEELLVKLNREDLLRKQRTFDNGSIPHQIHLGELHAILRRQEDFYPFLKDNREKIEKILTFRIPYYVGPLARGNSRFAWMTRKSEETITPWNFEEVVDKGASAQSFIERMTNFDKNLPNEKVLPKHSLLYEYFTVYNELTKVKYVTEGMRKPAFLSGEQKKAIVDLLFKTNRKVTVKQLKEDYFKKIECFDSVEISGVEDRFNASLGTYHDLLKIIKDKDFLDNEENEDILEDIVLTLTLFEDREMIEERLKTYAHLFDDKVMKQLKRRRYTGWGRLSRKLINGIRDKQSGKTILDFLKSDGFANRNFMQLIHDDSLTFKEDIQKAQVSGQGDSLHEHIANLAGSPAIKKGILQTVKVVDELVKVMGRHKPENIVIEMARENQTTQKGQKNSRERMKRIEEGIKELGSQILKEHPVENTQLQNEKLYLYYLQNGRDMYVDQELDINRLSDYDVDHIVPQSFLKDDSIDNKVLTRSDKARGKSDNVPSEEVVKKMKNYWRQLLNAKLITQRKFDNLTKAERGGLSELDKAGFIKRQLVETRQITKHVAQILDSRMNTKYDENDKLIREVKVITLKSKLVSDFRKDFQFYKVREINNYHHAHDAYLNAVVGTALIKKYPKLESEFVYGDYKVYDVRKMIAKSEQEIGKATAKYFFYSNIMNFFKTEITLANGEIRKRPLIETNGETGEIVWDKGRDFATVRKVLSMPQVNIVKKTEVQTGGFSKESILPKRNSDKLIARKKDWDPKKYGGFDSPTVAYSVLVVAKVEKGKSKKLKSVKELLGITIMERSSFEKNPIDFLEAKGYKEVKKDLIIKLPKYSLFELENGRKRMLASAGELQKGNELALPSKYVNFLYLASHYEKLKGSPEDNEQKQLFVEQHKHYLDEIIEQISEFSKRVILADANLDKVLSAYNKHRDKPIREQAENIIHLFTLTNLGAPAAFKYFDTTIDRKRYTSTKEVLDATLIHQSITGLYETRIDLSQLGGDGGEAAAKPAPGGGGGTLQLEEEYRLFEPESTQKQEMDIWLKNFPQAWAETGGMGTAHCQAPVLIQLKATATPISIRQYPMPHEAYQGIKPHIRRMLDQGILKPCQSPWNTPLLPVKKPGTEDYRPVQDLREVNKRVEDIHPTVPNPYNLLSTLPPSHPWYTVLDLKDAFFCLRLHSESQLLFAFEWRDPEIGLSGQLTWTRLPQGFKNSPTLFNEALHSDLADFRVRYPALVLLQYVDDLLLAAATRTECLEGTKALLETLGNKGYRASAKKAQICLQEVTYLGYSLKDGQRWLTKARKEAILSIPVPKNSRQVREFLGTAGYCRLWIPGFAELAAPLYPLTRPGTLFQWGTEQQLAFEDIKKALLSSPALGLPDITKPFELFIDENSGFAKGVLVQKLGPWKRPVAYLSKKLDTVASGWPPCLRMVAAIAILVKDAGKLTLGQPLTILTSHPVEALVRQPPNKWLSNARMTHYQAMLLDAERVHFGPTVSLNPATLLPLPSGGNHHDCLQILAETHGTRPDLTDQPLPDADLTWYTDGSSFIRNGEREAGAAVTTESEVIWAAPLPPGTSAQRAELIALTQALKMAEGKKLTVYTDSRYAFATTHVHGEIYRRRGWLTSEGKEIKNKNEILALLEALFLPKRLSIIHCPGHQKGDSPQAKGNRLADDTAKKAATETHSSLTVLPAGKRTADGSEFEKRTADGSEFESPKKKAKVE

SEQ ID NO: 1186 - protein, 2095 aa, synthetic construct
MPAAKRVKLDGGDKKYSIGLDIGTNSVGWAVITDEYKVPSKKFKVLGNTDRHSIKKNLIGALLFDSGETAEATRLKRTARRRYTRRKNRICYLQEIFSNEMAKVDDSFFHRLEESFLVEEDKKHERHPIFGNIVDEVAYHEKYPTIYHLRKKLVDSTDKADLRLIYLALAHMIKFRGHFLIEGDLNPDNSDVDKLFIQLVQTYNQLFEENPINASGVDAKAILSARLSKSRRLENLIAQLPGEKKNGLFGNLIALSLGLTPNFKSNFDLAEDAKLQLSKDTYDDDLDNLLAQIGDQYADLFLAAKNLSDAILLSDILRVNTEITKAPLSASMIKRYDEHHQDLTLLKALVRQQLPEKYKEIFFDQSKNGYAGYIDGGASQEEFYKFIKPILEKMDGTEELLVKLNREDLLRKQRTFDNGSIPHQIHLGELHAILRRQEDFYPFLKDNREKIEKILTFRIPYYVGPLARGNSRFAWMTRKSEETITPWNFEEVVDKGASAQSFIERMTNFDKNLPNEKVLPKHSLLYEYFTVYNELTKVKYVTEGMRKPAFLSGEQKKAIVDLLFKTNRKVTVKQLKEDYFKKIECFDSVEISGVEDRFNASLGTYHDLLKIIKDKDFLDNEENEDILEDIVLTLTLFEDREMIEERLKTYAHLFDDKVMKQLKRRRYTGWGRLSRKLINGIRDKQSGKTILDFLKSDGFANRNFMQLIHDDSLTFKEDIQKAQVSGQGDSLHEHIANLAGSPAIKKGILQTVKVVDELVKVMGRHKPENIVIEMARENQTTQKGQKNSRERMKRIEEGIKELGSQILKEHPVENTQLQNEKLYLYYLQNGRDMYVDQELDINRLSDYDVDHIVPQSFLKDDSIDNKVLTRSDKARGKSDNVPSEEVVKKMKNYWRQLLNAKLITQRKFDNLTKAERGGLSELDKAGFIKRQLVETRQITKHVAQILDSRMNTKYDENDKLIREVKVITLKSKLVSDFRKDFQFYKVREINNYHHAHDAYLNAVVGTALIKKYPKLESEFVYGDYKVYDVRKMIAKSEQEIGKATAKYFFYSNIMNFFKTEITLANGEIRKRPLIETNGETGEIVWDKGRDFATVRKVLSMPQVNIVKKTEVQTGGFSKESILPKRNSDKLIARKKDWDPKKYGGFDSPTVAYSVLVVAKVEKGKSKKLKSVKELLGITIMERSSFEKNPIDFLEAKGYKEVKKDLIIKLPKYSLFELENGRKRMLASAGELQKGNELALPSKYVNFLYLASHYEKLKGSPEDNEQKQLFVEQHKHYLDEIIEQISEFSKRVILADANLDKVLSAYNKHRDKPIREQAENIIHLFTLTNLGAPAAFKYFDTTIDRKRYTSTKEVLDATLIHQSITGLYETRIDLSQLGGDGGGGGPAPEAAAKGGTLQLEEEYRLFEPESTQKQEMDIWLKNFPQAWAETGGMGTAHCQAPVLIQLKATATPISIRQYPMPHEAYQGIKPHIRRMLDQGILKPCQSPWNTPLLPVKKPGTEDYRPVQDLREVNKRVEDIHPTVPNPYNLLSTLPPSHPWYTVLDLKDAFFCLRLHSESQLLFAFEWRDPEIGLSGQLTWTRLPQGFKNSPTLFNEALHSDLADFRVRYPALVLLQYVDDLLLAAATRTECLEGTKALLETLGNKGYRASAKKAQICLQEVTYLGYSLKDGQRWLTKARKEAILSIPVPKNSRQVREFLGTAGYCRLWIPGFAELAAPLYPLTRPGTLFQWGTEQQLAFEDIKKALLSSPALGLPDITKPFELFIDENSGFAKGVLVQKLGPWKRPVAYLSKKLDTVASGWPPCLRMVAAIAILVKDAGKLTLGQPLTILTSHPVEALVRQPPNKWLSNARMTHYQAMLLDAERVHFGPTVSLNPATLLPLPSGGNHHDCLQILAETHGTRPDLTDQPLPDADLTWYTDGSSFIRNGEREAGAAVTTESEVIWAAPLPPGTSAQRAELIALTQALKMAEGKKLTVYTDSRYAFATTHVHGEIYRRRGWLTSEGKEIKNKNEILALLEALFLPKRLSIIHCPGHQKGDSPQAKGNRLADDTAKKAATETHSSLTVLPAGKRTADGSEFEKRTADGSEFESPKKKAKVE

SEQ ID NO: 1187 - protein, 2095 aa, synthetic construct
MPAAKRVKLDGGDKKYSIGLDIGTNSVGWAVITDEYKVPSKKFKVLGNTDRHSIKKNLIGALLFDSGETAEATRLKRTARRRYTRRKNRICYLQEIFSNEMAKVDDSFFHRLEESFLVEEDKKHERHPIFGNIVDEVAYHEKYPTIYHLRKKLVDSTDKADLRLIYLALAHMIKFRGHFLIEGDLNPDNSDVDKLFIQLVQTYNQLFEENPINASGVDAKAILSARLSKSRRLENLIAQLPGEKKNGLFGNLIALSLGLTPNFKSNFDLAEDAKLQLSKDTYDDDLDNLLAQIGDQYADLFLAAKNLSDAILLSDILRVNTEITKAPLSASMIKRYDEHHQDLTLLKALVRQQLPEKYKEIFFDQSKNGYAGYIDGGASQEEFYKFIKPILEKMDGTEELLVKLNREDLLRKQRTFDNGSIPHQIHLGELHAILRRQEDFYPFLKDNREKIEKILTFRIPYYVGPLARGNSRFAWMTRKSEETITPWNFEEVVDKGASAQSFIERMTNFDKNLPNEKVLPKHSLLYEYFTVYNELTKVKYVTEGMRKPAFLSGEQKKAIVDLLFKTNRKVTVKQLKEDYFKKIECFDSVEISGVEDRFNASLGTYHDLLKIIKDKDFLDNEENEDILEDIVLTLTLFEDREMIEERLKTYAHLFDDKVMKQLKRRRYTGWGRLSRKLINGIRDKQSGKTILDFLKSDGFANRNFMQLIHDDSLTFKEDIQKAQVSGQGDSLHEHIANLAGSPAIKKGILQTVKVVDELVKVMGRHKPENIVIEMARENQTTQKGQKNSRERMKRIEEGIKELGSQILKEHPVENTQLQNEKLYLYYLQNGRDMYVDQELDINRLSDYDVDHIVPQSFLKDDSIDNKVLTRSDKARGKSDNVPSEEVVKKMKNYWRQLLNAKLITQRKFDNLTKAERGGLSELDKAGFIKRQLVETRQITKHVAQILDSRMNTKYDENDKLIREVKVITLKSKLVSDFRKDFQFYKVREINNYHHAHDAYLNAVVGTALIKKYPKLESEFVYGDYKVYDVRKMIAKSEQEIGKATAKYFFYSNIMNFFKTEITLANGEIRKRPLIETNGETGEIVWDKGRDFATVRKVLSMPQVNIVKKTEVQTGGFSKESILPKRNSDKLIARKKDWDPKKYGGFDSPTVAYSVLVVAKVEKGKSKKLKSVKELLGITIMERSSFEKNPIDFLEAKGYKEVKKDLIIKLPKYSLFELENGRKRMLASAGELQKGNELALPSKYVNFLYLASHYEKLKGSPEDNEQKQLFVEQHKHYLDEIIEQISEFSKRVILADANLDKVLSAYNKHRDKPIREQAENIIHLFTLTNLGAPAAFKYFDTTIDRKRYTSTKEVLDATLIHQSITGLYETRIDLSQLGGDGGGGGGGSEAAAKGGTLQLEEEYRLFEPESTQKQEMDIWLKNFPQAWAETGGMGTAHCQAPVLIQLKATATPISIRQYPMPHEAYQGIKPHIRRMLDQGILKPCQSPWNTPLLPVKKPGTEDYRPVQDLREVNKRVEDIHPTVPNPYNLLSTLPPSHPWYTVLDLKDAFFCLRLHSESQLLFAFEWRDPEIGLSGQLTWTRLPQGFKNSPTLFNEALHSDLADFRVRYPALVLLQYVDDLLLAAATRTECLEGTKALLETLGNKGYRASAKKAQICLQEVTYLGYSLKDGQRWLTKARKEAILSIPVPKNSRQVREFLGTAGYCRLWIPGFAELAAPLYPLTRPGTLFQWGTEQQLAFEDIKKALLSSPALGLPDITKPFELFIDENSGFAKGVLVQKLGPWKRPVAYLSKKLDTVASGWPPCLRMVAAIAILVKDAGKLTLGQPLTILTSHPVEALVRQPPNKWLSNARMTHYQAMLLDAERVHFGPTVSLNPATLLPLPSGGNHHDCLQILAETHGTRPDLTDQPLPDADLTWYTDGSSFIRNGEREAGAAVTTESEVIWAAPLPPGTSAQRAELIALTQALKMAEGKKLTVYTDSRYAFATTHVHGEIYRRRGWLTSEGKEIKNKNEILALLEALFLPKRLSIIHCPGHQKGDSPQAKGNRLADDTAKKAATETHSSLTVLPAGKRTADGSEFEKRTADGSEFESPKKKAKVE

SEQ ID NO: 1188 - protein, 2090 aa, synthetic construct
MPAAKRVKLDGGDKKYSIGLDIGTNSVGWAVITDEYKVPSKKFKVLGNTDRHSIKKNLIGALLFDSGETAEATRLKRTARRRYTRRKNRICYLQEIFSNEMAKVDDSFFHRLEESFLVEEDKKHERHPIFGNIVDEVAYHEKYPTIYHLRKKLVDSTDKADLRLIYLALAHMIKFRGHFLIEGDLNPDNSDVDKLFIQLVQTYNQLFEENPINASGVDAKAILSARLSKSRRLENLIAQLPGEKKNGLFGNLIALSLGLTPNFKSNFDLAEDAKLQLSKDTYDDDLDNLLAQIGDQYADLFLAAKNLSDAILLSDILRVNTEITKAPLSASMIKRYDEHHQDLTLLKALVRQQLPEKYKEIFFDQSKNGYAGYIDGGASQEEFYKFIKPILEKMDGTEELLVKLNREDLLRKQRTFDNGSIPHQIHLGELHAILRRQEDFYPFLKDNREKIEKILTFRIPYYVGPLARGNSRFAWMTRKSEETITPWNFEEVVDKGASAQSFIERMTNFDKNLPNEKVLPKHSLLYEYFTVYNELTKVKYVTEGMRKPAFLSGEQKKAIVDLLFKTNRKVTVKQLKEDYFKKIECFDSVEISGVEDRFNASLGTYHDLLKIIKDKDFLDNEENEDILEDIVLTLTLFEDREMIEERLKTYAHLFDDKVMKQLKRRRYTGWGRLSRKLINGIRDKQSGKTILDFLKSDGFANRNFMQLIHDDSLTFKEDIQKAQVSGQGDSLHEHIANLAGSPAIKKGILQTVKVVDELVKVMGRHKPENIVIEMARENQTTQKGQKNSRERMKRIEEGIKELGSQILKEHPVENTQLQNEKLYLYYLQNGRDMYVDQELDINRLSDYDVDHIVPQSFLKDDSIDNKVLTRSDKARGKSDNVPSEEVVKKMKNYWRQLLNAKLITQRKFDNLTKAERGGLSELDKAGFIKRQLVETRQITKHVAQILDSRMNTKYDENDKLIREVKVITLKSKLVSDFRKDFQFYKVREINNYHHAHDAYLNAVVGTALIKKYPKLESEFVYGDYKVYDVRKMIAKSEQEIGKATAKYFFYSNIMNFFKTEITLANGEIRKRPLIETNGETGEIVWDKGRDFATVRKVLSMPQVNIVKKTEVQTGGFSKESILPKRNSDKLIARKKDWDPKKYGGFDSPTVAYSVLVVAKVEKGKSKKLKSVKELLGITIMERSSFEKNPIDFLEAKGYKEVKKDLIIKLPKYSLFELENGRKRMLASAGELQKGNELALPSKYVNFLYLASHYEKLKGSPEDNEQKQLFVEQHKHYLDEIIEQISEFSKRVILADANLDKVLSAYNKHRDKPIREQAENIIHLFTLTNLGAPAAFKYFDTTIDRKRYTSTKEVLDATLIHQSITGLYETRIDLSQLGGDGGGGGGGGGGTLQLEEEYRLFEPESTQKQEMDIWLKNFPQAWAETGGMGTAHCQAPVLIQLKATATPISIRQYPMPHEAYQGIKPHIRRMLDQGILKPCQSPWNTPLLPVKKPGTEDYRPVQDLREVNKRVEDIHPTVPNPYNLLSTLPPSHPWYTVLDLKDAFFCLRLHSESQLLFAFEWRDPEIGLSGQLTWTRLPQGFKNSPTLFNEALHSDLADFRVRYPALVLLQYVDDLLLAAATRTECLEGTKALLETLGNKGYRASAKKAQICLQEVTYLGYSLKDGQRWLTKARKEAILSIPVPKNSRQVREFLGTAGYCRLWIPGFAELAAPLYPLTRPGTLFQWGTEQQLAFEDIKKALLSSPALGLPDITKPFELFIDENSGFAKGVLVQKLGPWKRPVAYLSKKLDTVASGWPPCLRMVAAIAILVKDAGKLTLGQPLTILTSHPVEALVRQPPNKWLSNARMTHYQAMLLDAERVHFGPTVSLNPATLLPLPSGGNHHDCLQILAETHGTRPDLTDQPLPDADLTWYTDGSSFIRNGEREAGAAVTTESEVIWAAPLPPGTSAQRAELIALTQALKMAEGKKLTVYTDSRYAFATTHVHGEIYRRRGWLTSEGKEIKNKNEILALLEALFLPKRLSIIHCPGHQKGDSPQAKGNRLADDTAKKAATETHSSLTVLPAGKRTADGSEFEKRTADGSEFESPKKKAKVE

SEQ ID NO: 1189 - protein, 2093 aa, synthetic construct
MPAAKRVKLDGGDKKYSIGLDIGTNSVGWAVITDEYKVPSKKFKVLGNTDRHSIKKNLIGALLFDSGETAEATRLKRTARRRYTRRKNRICYLQEIFSNEMAKVDDSFFHRLEESFLVEEDKKHERHPIFGNIVDEVAYHEKYPTIYHLRKKLVDSTDKADLRLIYLALAHMIKFRGHFLIEGDLNPDNSDVDKLFIQLVQTYNQLFEENPINASGVDAKAILSARLSKSRRLENLIAQLPGEKKNGLFGNLIALSLGLTPNFKSNFDLAEDAKLQLSKDTYDDDLDNLLAQIGDQYADLFLAAKNLSDAILLSDILRVNTEITKAPLSASMIKRYDEHHQDLTLLKALVRQQLPEKYKEIFFDQSKNGYAGYIDGGASQEEFYKFIKPILEKMDGTEELLVKLNREDLLRKQRTFDNGSIPHQIHLGELHAILRRQEDFYPFLKDNREKIEKILTFRIPYYVGPLARGNSRFAWMTRKSEETITPWNFEEVVDKGASAQSFIERMTNFDKNLPNEKVLPKHSLLYEYFTVYNELTKVKYVTEGMRKPAFLSGEQKKAIVDLLFKTNRKVTVKQLKEDYFKKIECFDSVEISGVEDRFNASLGTYHDLLKIIKDKDFLDNEENEDILEDIVLTLTLFEDREMIEERLKTYAHLFDDKVMKQLKRRRYTGWGRLSRKLINGIRDKQSGKTILDFLKSDGFANRNFMQLIHDDSLTFKEDIQKAQVSGQGDSLHEHIANLAGSPAIKKGILQTVKVVDELVKVMGRHKPENIVIEMARENQTTQKGQKNSRERMKRIEEGIKELGSQILKEHPVENTQLQNEKLYLYYLQNGRDMYVDQELDINRLSDYDVDHIVPQSFLKDDSIDNKVLTRSDKARGKSDNVPSEEVVKKMKNYWRQLLNAKLITQRKFDNLTKAERGGLSELDKAGFIKRQLVETRQITKHVAQILDSRMNTKYDENDKLIREVKVITLKSKLVSDFRKDFQFYKVREINNYHHAHDAYLNAVVGTALIKKYPKLESEFVYGDYKVYDVRKMIAKSEQEIGKATAKYFFYSNIMNFFKTEITLANGEIRKRPLIETNGETGEIVWDKGRDFATVRKVLSMPQVNIVKKTEVQTGGFSKESILPKRNSDKLIARKKDWDPKKYGGFDSPTVAYSVLVVAKVEKGKSKKLKSVKELLGITIMERSSFEKNPIDFLEAKGYKEVKKDLIIKLPKYSLFELENGRKRMLASAGELQKGNELALPSKYVNFLYLASHYEKLKGSPEDNEQKQLFVEQHKHYLDEIIEQISEFSKRVILADANLDKVLSAYNKHRDKPIREQAENIIHLFTLTNLGAPAAFKYFDTTIDRKRYTSTKEVLDATLIHQSITGLYETRIDLSQLGGDGGGGGGSSPAPGGTLQLEEEYRLFEPESTQKQEMDIWLKNFPQAWAETGGMGTAHCQAPVLIQLKATATPISIRQYPMPHEAYQGIKPHIRRMLDQGILKPCQSPWNTPLLPVKKPGTEDYRPVQDLREVNKRVEDIHPTVPNPYNLLSTLPPSHPWYTVLDLKDAFFCLRLHSESQLLFAFEWRDPEIGLSGQLTWTRLPQGFKNSPTLFNEALHSDLADFRVRYPALVLLQYVDDLLLAAATRTECLEGTKALLETLGNKGYRASAKKAQICLQEVTYLGYSLKDGQRWLTKARKEAILSIPVPKNSRQVREFLGTAGYCRLWIPGFAELAAPLYPLTRPGTLFQWGTEQQLAFEDIKKALLSSPALGLPDITKPFELFIDENSGFAKGVLVQKLGPWKRPVAYLSKKLDTVASGWPPCLRMVAAIAILVKDAGKLTLGQPLTILTSHPVEALVRQPPNKWLSNARMTHYQAMLLDAERVHFGPTVSLNPATLLPLPSGGNHHDCLQILAETHGTRPDLTDQPLPDADLTWYTDGSSFIRNGEREAGAAVTTESEVIWAAPLPPGTSAQRAELIALTQALKMAEGKKLTVYTDSRYAFATTHVHGEIYRRRGWLTSEGKEIKNKNEILALLEALFLPKRLSIIHCPGHQKGDSPQAKGNRLADDTAKKAATETHSSLTVLPAGKRTADGSEFEKRTADGSEFESPKKKAKVE

SEQ ID NO: 1190 - protein, 2093 aa, synthetic construct
MPAAKRVKLDGGDKKYSIGLDIGTNSVGWAVITDEYKVPSKKFKVLGNTDRHSIKKNLIGALLFDSGETAEATRLKRTARRRYTRRKNRICYLQEIFSNEMAKVDDSFFHRLEESFLVEEDKKHERHPIFGNIVDEVAYHEKYPTIYHLRKKLVDSTDKADLRLIYLALAHMIKFRGHFLIEGDLNPDNSDVDKLFIQLVQTYNQLFEENPINASGVDAKAILSARLSKSRRLENLIAQLPGEKKNGLFGNLIALSLGLTPNFKSNFDLAEDAKLQLSKDTYDDDLDNLLAQIGDQYADLFLAAKNLSDAILLSDILRVNTEITKAPLSASMIKRYDEHHQDLTLLKALVRQQLPEKYKEIFFDQSKNGYAGYIDGGASQEEFYKFIKPILEKMDGTEELLVKLNREDLLRKQRTFDNGSIPHQIHLGELHAILRRQEDFYPFLKDNREKIEKILTFRIPYYVGPLARGNSRFAWMTRKSEETITPWNFEEVVDKGASAQSFIERMTNFDKNLPNEKVLPKHSLLYEYFTVYNELTKVKYVTEGMRKPAFLSGEQKKAIVDLLFKTNRKVTVKQLKEDYFKKIECFDSVEISGVEDRFNASLGTYHDLLKIIKDKDFLDNEENEDILEDIVLTLTLFEDREMIEERLKTYAHLFDDKVMKQLKRRRYTGWGRLSRKLINGIRDKQSGKTILDFLKSDGFANRNFMQLIHDDSLTFKEDIQKAQVSGQGDSLHEHIANLAGSPAIKKGILQTVKVVDELVKVMGRHKPENIVIEMARENQTTQKGQKNSRERMKRIEEGIKELGSQILKEHPVENTQLQNEKLYLYYLQNGRDMYVDQELDINRLSDYDVDHIVPQSFLKDDSIDNKVLTRSDKARGKSDNVPSEEVVKKMKNYWRQLLNAKLITQRKFDNLTKAERGGLSELDKAGFIKRQLVETRQITKHVAQILDSRMNTKYDENDKLIREVKVITLKSKLVSDFRKDFQFYKVREINNYHHAHDAYLNAVVGTALIKKYPKLESEFVYGDYKVYDVRKMIAKSEQEIGKATAKYFFYSNIMNFFKTEITLANGEIRKRPLIETNGETGEIVWDKGRDFATVRKVLSMPQVNIVKKTEVQTGGFSKESILPKRNSDKLIARKKDWDPKKYGGFDSPTVAYSVLVVAKVEKGKSKKLKSVKELLGITIMERSSFEKNPIDFLEAKGYKEVKKDLIIKLPKYSLFELENGRKRMLASAGELQKGNELALPSKYVNFLYLASHYEKLKGSPEDNEQKQLFVEQHKHYLDEIIEQISEFSKRVILADANLDKVLSAYNKHRDKPIREQAENIIHLFTLTNLGAPAAFKYFDTTIDRKRYTSTKEVLDATLIHQSITGLYETRIDLSQLGGDGGGGSGGGPAPGGTLQLEEEYRLFEPESTQKQEMDIWLKNFPQAWAETGGMGTAHCQAPVLIQLKATATPISIRQYPMPHEAYQGIKPHIRRMLDQGILKPCQSPWNTPLLPVKKPGTEDYRPVQDLREVNKRVEDIHPTVPNPYNLLSTLPPSHPWYTVLDLKDAFFCLRLHSESQLLFAFEWRDPEIGLSGQLTWTRLPQGFKNSPTLFNEALHSDLADFRVRYPALVLLQYVDDLLLAAATRTECLEGTKALLETLGNKGYRASAKKAQICLQEVTYLGYSLKDGQRWLTKARKEAILSIPVPKNSRQVREFLGTAGYCRLWIPGFAELAAPLYPLTRPGTLFQWGTEQQLAFEDIKKALLSSPALGLPDITKPFELFIDENSGFAKGVLVQKLGPWKRPVAYLSKKLDTVASGWPPCLRMVAAIAILVKDAGKLTLGQPLTILTSHPVEALVRQPPNKWLSNARMTHYQAMLLDAERVHFGPTVSLNPATLLPLPSGGNHHDCLQILAETHGTRPDLTDQPLPDADLTWYTDGSSFIRNGEREAGAAVTTESEVIWAAPLPPGTSAQRAELIALTQALKMAEGKKLTVYTDSRYAFATTHVHGEIYRRRGWLTSEGKEIKNKNEILALLEALFLPKRLSIIHCPGHQKGDSPQAKGNRLADDTAKKAATETHSSLTVLPAGKRTADGSEFEKRTADGSEFESPKKKAKVE

SEQ ID NO: 1191 - protein, 2095 aa, synthetic construct
MPAAKRVKLDGGDKKYSIGLDIGTNSVGWAVITDEYKVPSKKFKVLGNTDRHSIKKNLIGALLFDSGETAEATRLKRTARRRYTRRKNRICYLQEIFSNEMAKVDDSFFHRLEESFLVEEDKKHERHPIFGNIVDEVAYHEKYPTIYHLRKKLVDSTDKADLRLIYLALAHMIKFRGHFLIEGDLNPDNSDVDKLFIQLVQTYNQLFEENPINASGVDAKAILSARLSKSRRLENLIAQLPGEKKNGLFGNLIALSLGLTPNFKSNFDLAEDAKLQLSKDTYDDDLDNLLAQIGDQYADLFLAAKNLSDAILLSDILRVNTEITKAPLSASMIKRYDEHHQDLTLLKALVRQQLPEKYKEIFFDQSKNGYAGYIDGGASQEEFYKFIKPILEKMDGTEELLVKLNREDLLRKQRTFDNGSIPHQIHLGELHAILRRQEDFYPFLKDNREKIEKILTFRIPYYVGPLARGNSRFAWMTRKSEETITPWNFEEVVDKGASAQSFIERMTNFDKNLPNEKVLPKHSLLYEYFTVYNELTKVKYVTEGMRKPAFLSGEQKKAIVDLLFKTNRKVTVKQLKEDYFKKIECFDSVEISGVEDRFNASLGTYHDLLKIIKDKDFLDNEENEDILEDIVLTLTLFEDREMIEERLKTYAHLFDDKVMKQLKRRRYTGWGRLSRKLINGIRDKQSGKTILDFLKSDGFANRNFMQLIHDDSLTFKEDIQKAQVSGQGDSLHEHIANLAGSPAIKKGILQTVKVVDELVKVMGRHKPENIVIEMARENQTTQKGQKNSRERMKRIEEGIKELGSQILKEHPVENTQLQNEKLYLYYLQNGRDMYVDQELDINRLSDYDVDHIVPQSFLKDDSIDNKVLTRSDKARGKSDNVPSEEVVKKMKNYWRQLLNAKLITQRKFDNLTKAERGGLSELDKAGFIKRQLVETRQITKHVAQILDSRMNTKYDENDKLIREVKVITLKSKLVSDFRKDFQFYKVREINNYHHAHDAYLNAVVGTALIKKYPKLESEFVYGDYKVYDVRKMIAKSEQEIGKATAKYFFYSNIMNFFKTEITLANGEIRKRPLIETNGETGEIVWDKGRDFATVRKVLSMPQVNIVKKTEVQTGGFSKESILPKRNSDKLIARKKDWDPKKYGGFDSPTVAYSVLVVAKVEKGKSKKLKSVKELLGITIMERSSFEKNPIDFLEAKGYKEVKKDLIIKLPKYSLFELENGRKRMLASAGELQKGNELALPSKYVNFLYLASHYEKLKGSPEDNEQKQLFVEQHKHYLDEIIEQISEFSKRVILADANLDKVLSAYNKHRDKPIREQAENIIHLFTLTNLGAPAAFKYFDTTIDRKRYTSTKEVLDATLIHQSITGLYETRIDLSQLGGDGGGSSPAPEAAAKGGTLQLEEEYRLFEPESTQKQEMDIWLKNFPQAWAETGGMGTAHCQAPVLIQLKATATPISIRQYPMPHEAYQGIKPHIRRMLDQGILKPCQSPWNTPLLPVKKPGTEDYRPVQDLREVNKRVEDIHPTVPNPYNLLSTLPPSHPWYTVLDLKDAFFCLRLHSESQLLFAFEWRDPEIGLSGQLTWTRLPQGFKNSPTLFNEALHSDLADFRVRYPALVLLQYVDDLLLAAATRTECLEGTKALLETLGNKGYRASAKKAQICLQEVTYLGYSLKDGQRWLTKARKEAILSIPVPKNSRQVREFLGTAGYCRLWIPGFAELAAPLYPLTRPGTLFQWGTEQQLAFEDIKKALLSSPALGLPDITKPFELFIDENSGFAKGVLVQKLGPWKRPVAYLSKKLDTVASGWPPCLRMVAAIAILVKDAGKLTLGQPLTILTSHPVEALVRQPPNKWLSNARMTHYQAMLLDAERVHFGPTVSLNPATLLPLPSGGNHHDCLQILAETHGTRPDLTDQPLPDADLTWYTDGSSFIRNGEREAGAAVTTESEVIWAAPLPPGTSAQRAELIALTQALKMAEGKKLTVYTDSRYAFATTHVHGEIYRRRGWLTSEGKEIKNKNEILALLEALFLPKRLSIIHCPGHQKGDSPQAKGNRLADDTAKKAATETHSSLTVLPAGKRTADGSEFEKRTADGSEFESPKKKAKVE

SEQ ID NO: 1192 - protein, 2093 aa, synthetic construct
MPAAKRVKLDGGDKKYSIGLDIGTNSVGWAVITDEYKVPSKKFKVLGNTDRHSIKKNLIGALLFDSGETAEATRLKRTARRRYTRRKNRICYLQEIFSNEMAKVDDSFFHRLEESFLVEEDKKHERHPIFGNIVDEVAYHEKYPTIYHLRKKLVDSTDKADLRLIYLALAHMIKFRGHFLIEGDLNPDNSDVDKLFIQLVQTYNQLFEENPINASGVDAKAILSARLSKSRRLENLIAQLPGEKKNGLFGNLIALSLGLTPNFKSNFDLAEDAKLQLSKDTYDDDLDNLLAQIGDQYADLFLAAKNLSDAILLSDILRVNTEITKAPLSASMIKRYDEHHQDLTLLKALVRQQLPEKYKEIFFDQSKNGYAGYIDGGASQEEFYKFIKPILEKMDGTEELLVKLNREDLLRKQRTFDNGSIPHQIHLGELHAILRRQEDFYPFLKDNREKIEKILTFRIPYYVGPLARGNSRFAWMTRKSEETITPWNFEEVVDKGASAQSFIERMTNFDKNLPNEKVLPKHSLLYEYFTVYNELTKVKYVTEGMRKPAFLSGEQKKAIVDLLFKTNRKVTVKQLKEDYFKKIECFDSVEISGVEDRFNASLGTYHDLLKIIKDKDFLDNEENEDILEDIVLTLTLFEDREMIEERLKTYAHLFDDKVMKQLKRRRYTGWGRLSRKLINGIRDKQSGKTILDFLKSDGFANRNFMQLIHDDSLTFKEDIQKAQVSGQGDSLHEHIANLAGSPAIKKGILQTVKVVDELVKVMGRHKPENIVIEMARENQTTQKGQKNSRERMKRIEEGIKELGSQILKEHPVENTQLQNEKLYLYYLQNGRDMYVDQELDINRLSDYDVDHIVPQSFLKDDSIDNKVLTRSDKARGKSDNVPSEEVVKKMKNYWRQLLNAKLITQRKFDNLTKAERGGLSELDKAGFIKRQLVETRQITKHVAQILDSRMNTKYDENDKLIREVKVITLKSKLVSDFRKDFQFYKVREINNYHHAHDAYLNAVVGTALIKKYPKLESEFVYGDYKVYDVRKMIAKSEQEIGKATAKYFFYSNIMNFFKTEITLANGEIRKRPLIETNGETGEIVWDKGRDFATVRKVLSMPQVNIVKKTEVQTGGFSKESILPKRNSDKLIARKKDWDPKKYGGFDSPTVAYSVLVVAKVEKGKSKKLKSVKELLGITIMERSSFEKNPIDFLEAKGYKEVKKDLIIKLPKYSLFELENGRKRMLASAGELQKGNELALPSKYVNFLYLASHYEKLKGSPEDNEQKQLFVEQHKHYLDEIIEQISEFSKRVILADANLDKVLSAYNKHRDKPIREQAENIIHLFTLTNLGAPAAFKYFDTTIDRKRYTSTKEVLDATLIHQSITGLYETRIDLSQLGGDGGPAPGSSGGGGGTLQLEEEYRLFEPESTQKQEMDIWLKNFPQAWAETGGMGTAHCQAPVLIQLKATATPISIRQYPMPHEAYQGIKPHIRRMLDQGILKPCQSPWNTPLLPVKKPGTEDYRPVQDLREVNKRVEDIHPTVPNPYNLLSTLPPSHPWYTVLDLKDAFFCLRLHSESQLLFAFEWRDPEIGLSGQLTWTRLPQGFKNSPTLFNEALHSDLADFRVRYPALVLLQYVDDLLLAAATRTECLEGTKALLETLGNKGYRASAKKAQICLQEVTYLGYSLKDGQRWLTKARKEAILSIPVPKNSRQVREFLGTAGYCRLWIPGFAELAAPLYPLTRPGTLFQWGTEQQLAFEDIKKALLSSPALGLPDITKPFELFIDENSGFAKGVLVQKLGPWKRPVAYLSKKLDTVASGWPPCLRMVAAIAILVKDAGKLTLGQPLTILTSHPVEALVRQPPNKWLSNARMTHYQAMLLDAERVHFGPTVSLNPATLLPLPSGGNHHDCLQILAETHGTRPDLTDQPLPDADLTWYTDGSSFIRNGEREAGAAVTTESEVIWAAPLPPGTSAQRAELIALTQALKMAEGKKLTVYTDSRYAFATTHVHGEIYRRRGWLTSEGKEIKNKNEILALLEALFLPKRLSIIHCPGHQKGDSPQAKGNRLADDTAKKAATETHSSLTVLPAGKRTADGSEFEKRTADGSEFESPKKKAKVE

SEQ ID NO: 1193 - protein, 2090 aa, synthetic construct
MPAAKRVKLDGGDKKYSIGLDIGTNSVGWAVITDEYKVPSKKFKVLGNTDRHSIKKNLIGALLFDSGETAEATRLKRTARRRYTRRKNRICYLQEIFSNEMAKVDDSFFHRLEESFLVEEDKKHERHPIFGNIVDEVAYHEKYPTIYHLRKKLVDSTDKADLRLIYLALAHMIKFRGHFLIEGDLNPDNSDVDKLFIQLVQTYNQLFEENPINASGVDAKAILSARLSKSRRLENLIAQLPGEKKNGLFGNLIALSLGLTPNFKSNFDLAEDAKLQLSKDTYDDDLDNLLAQIGDQYADLFLAAKNLSDAILLSDILRVNTEITKAPLSASMIKRYDEHHQDLTLLKALVRQQLPEKYKEIFFDQSKNGYAGYIDGGASQEEFYKFIKPILEKMDGTEELLVKLNREDLLRKQRTFDNGSIPHQIHLGELHAILRRQEDFYPFLKDNREKIEKILTFRIPYYVGPLARGNSRFAWMTRKSEETITPWNFEEVVDKGASAQSFIERMTNFDKNLPNEKVLPKHSLLYEYFTVYNELTKVKYVTEGMRKPAFLSGEQKKAIVDLLFKTNRKVTVKQLKEDYFKKIECFDSVEISGVEDRFNASLGTYHDLLKIIKDKDFLDNEENEDILEDIVLTLTLFEDREMIEERLKTYAHLFDDKVMKQLKRRRYTGWGRLSRKLINGIRDKQSGKTILDFLKSDGFANRNFMQLIHDDSLTFKEDIQKAQVSGQGDSLHEHIANLAGSPAIKKGILQTVKVVDELVKVMGRHKPENIVIEMARENQTTQKGQKNSRERMKRIEEGIKELGSQILKEHPVENTQLQNEKLYLYYLQNGRDMYVDQELDINRLSDYDVDHIVPQSFLKDDSIDNKVLTRSDKARGKSDNVPSEEVVKKMKNYWRQLLNAKLITQRKFDNLTKAERGGLSELDKAGFIKRQLVETRQITKHVAQILDSRMNTKYDENDKLIREVKVITLKSKLVSDFRKDFQFYKVREINNYHHAHDAYLNAVVGTALIKKYPKLESEFVYGDYKVYDVRKMIAKSEQEIGKATAKYFFYSNIMNFFKTEITLANGEIRKRPLIETNGETGEIVWDKGRDFATVRKVLSMPQVNIVKKTEVQTGGFSKESILPKRNSDKLIARKKDWDPKKYGGFDSPTVAYSVLVVAKVEKGKSKKLKSVKELLGITIMERSSFEKNPIDFLEAKGYKEVKKDLIIKLPKYSLFELENGRKRMLASAGELQKGNELALPSKYVNFLYLASHYEKLKGSPEDNEQKQLFVEQHKHYLDEIIEQISEFSKRVILADANLDKVLSAYNKHRDKPIREQAENIIHLFTLTNLGAPAAFKYFDTTIDRKRYTSTKEVLDATLIHQSITGLYETRIDLSQLGGDGGGGSGGSGGTLQLEEEYRLFEPESTQKQEMDIWLKNFPQAWAETGGMGTAHCQAPVLIQLKATATPISIRQYPMPHEAYQGIKPHIRRMLDQGILKPCQSPWNTPLLPVKKPGTEDYRPVQDLREVNKRVEDIHPTVPNPYNLLSTLPPSHPWYTVLDLKDAFFCLRLHSESQLLFAFEWRDPEIGLSGQLTWTRLPQGFKNSPTLFNEALHSDLADFRVRYPALVLLQYVDDLLLAAATRTECLEGTKALLETLGNKGYRASAKKAQICLQEVTYLGYSLKDGQRWLTKARKEAILSIPVPKNSRQVREFLGTAGYCRLWIPGFAELAAPLYPLTRPGTLFQWGTEQQLAFEDIKKALLSSPALGLPDITKPFELFIDENSGFAKGVLVQKLGPWKRPVAYLSKKLDTVASGWPPCLRMVAAIAILVKDAGKLTLGQPLTILTSHPVEALVRQPPNKWLSNARMTHYQAMLLDAERVHFGPTVSLNPATLLPLPSGGNHHDCLQILAETHGTRPDLTDQPLPDADLTWYTDGSSFIRNGEREAGAAVTTESEVIWAAPLPPGTSAQRAELIALTQALKMAEGKKLTVYTDSRYAFATTHVHGEIYRRRGWLTSEGKEIKNKNEILALLEALFLPKRLSIIHCPGHQKGDSPQAKGNRLADDTAKKAATETHSSLTVLPAGKRTADGSEFEKRTADGSEFESPKKKAKVE

SEQ ID NO: 1194 - protein, 2093 aa, synthetic construct
MPAAKRVKLDGGDKKYSIGLDIGTNSVGWAVITDEYKVPSKKFKVLGNTDRHSIKKNLIGALLFDSGETAEATRLKRTARRRYTRRKNRICYLQEIFSNEMAKVDDSFFHRLEESFLVEEDKKHERHPIFGNIVDEVAYHEKYPTIYHLRKKLVDSTDKADLRLIYLALAHMIKFRGHFLIEGDLNPDNSDVDKLFIQLVQTYNQLFEENPINASGVDAKAILSARLSKSRRLENLIAQLPGEKKNGLFGNLIALSLGLTPNFKSNFDLAEDAKLQLSKDTYDDDLDNLLAQIGDQYADLFLAAKNLSDAILLSDILRVNTEITKAPLSASMIKRYDEHHQDLTLLKALVRQQLPEKYKEIFFDQSKNGYAGYIDGGASQEEFYKFIKPILEKMDGTEELLVKLNREDLLRKQRTFDNGSIPHQIHLGELHAILRRQEDFYPFLKDNREKIEKILTFRIPYYVGPLARGNSRFAWMTRKSEETITPWNFEEVVDKGASAQSFIERMTNFDKNLPNEKVLPKHSLLYEYFTVYNELTKVKYVTEGMRKPAFLSGEQKKAIVDLLFKTNRKVTVKQLKEDYFKKIECFDSVEISGVEDRFNASLGTYHDLLKIIKDKDFLDNEENEDILEDIVLTLTLFEDREMIEERLKTYAHLFDDKVMKQLKRRRYTGWGRLSRKLINGIRDKQSGKTILDFLKSDGFANRNFMQLIHDDSLTFKEDIQKAQVSGQGDSLHEHIANLAGSPAIKKGILQTVKVVDELVKVMGRHKPENIVIEMARENQTTQKGQKNSRERMKRIEEGIKELGSQILKEHPVENTQLQNEKLYLYYLQNGRDMYVDQELDINRLSDYDVDHIVPQSFLKDDSIDNKVLTRSDKARGKSDNVPSEEVVKKMKNYWRQLLNAKLITQRKFDNLTKAERGGLSELDKAGFIKRQLVETRQITKHVAQILDSRMNTKYDENDKLIREVKVITLKSKLVSDFRKDFQFYKVREINNYHHAHDAYLNAVVGTALIKKYPKLESEFVYGDYKVYDVRKMIAKSEQEIGKATAKYFFYSNIMNFFKTEITLANGEIRKRPLIETNGETGEIVWDKGRDFATVRKVLSMPQVNIVKKTEVQTGGFSKESILPKRNSDKLIARKKDWDPKKYGGFDSPTVAYSVLVVAKVEKGKSKKLKSVKELLGITIMERSSFEKNPIDFLEAKGYKEVKKDLIIKLPKYSLFELENGRKRMLASAGELQKGNELALPSKYVNFLYLASHYEKLKGSPEDNEQKQLFVEQHKHYLDEIIEQISEFSKRVILADANLDKVLSAYNKHRDKPIREQAENIIHLFTLTNLGAPAAFKYFDTTIDRKRYTSTKEVLDATLIHQSITGLYETRIDLSQLGGDGGGGSPAPGGGGGTLQLEEEYRLFEPESTQKQEMDIWLKNFPQAWAETGGMGTAHCQAPVLIQLKATATPISIRQYPMPHEAYQGIKPHIRRMLDQGILKPCQSPWNTPLLPVKKPGTEDYRPVQDLREVNKRVEDIHPTVPNPYNLLSTLPPSHPWYTVLDLKDAFFCLRLHSESQLLFAFEWRDPEIGLSGQLTWTRLPQGFKNSPTLFNEALHSDLADFRVRYPALVLLQYVDDLLLAAATRTECLEGTKALLETLGNKGYRASAKKAQICLQEVTYLGYSLKDGQRWLTKARKEAILSIPVPKNSRQVREFLGTAGYCRLWIPGFAELAAPLYPLTRPGTLFQWGTEQQLAFEDIKKALLSSPALGLPDITKPFELFIDENSGFAKGVLVQKLGPWKRPVAYLSKKLDTVASGWPPCLRMVAAIAILVKDAGKLTLGQPLTILTSHPVEALVRQPPNKWLSNARMTHYQAMLLDAERVHFGPTVSLNPATLLPLPSGGNHHDCLQILAETHGTRPDLTDQPLPDADLTWYTDGSSFIRNGEREAGAAVTTESEVIWAAPLPPGTSAQRAELIALTQALKMAEGKKLTVYTDSRYAFATTHVHGEIYRRRGWLTSEGKEIKNKNEILALLEALFLPKRLSIIHCPGHQKGDSPQAKGNRLADDTAKKAATETHSSLTVLPAGKRTADGSEFEKRTADGSEFESPKKKAKVE

SEQ ID NO: 1195 - protein, 2089 aa, synthetic construct
MPAAKRVKLDGGDKKYSIGLDIGTNSVGWAVITDEYKVPSKKFKVLGNTDRHSIKKNLIGALLFDSGETAEATRLKRTARRRYTRRKNRICYLQEIFSNEMAKVDDSFFHRLEESFLVEEDKKHERHPIFGNIVDEVAYHEKYPTIYHLRKKLVDSTDKADLRLIYLALAHMIKFRGHFLIEGDLNPDNSDVDKLFIQLVQTYNQLFEENPINASGVDAKAILSARLSKSRRLENLIAQLPGEKKNGLFGNLIALSLGLTPNFKSNFDLAEDAKLQLSKDTYDDDLDNLLAQIGDQYADLFLAAKNLSDAILLSDILRVNTEITKAPLSASMIKRYDEHHQDLTLLKALVRQQLPEKYKEIFFDQSKNGYAGYIDGGASQEEFYKFIKPILEKMDGTEELLVKLNREDLLRKQRTFDNGSIPHQIHLGELHAILRRQEDFYPFLKDNREKIEKILTFRIPYYVGPLARGNSRFAWMTRKSEETITPWNFEEVVDKGASAQSFIERMTNFDKNLPNEKVLPKHSLLYEYFTVYNELTKVKYVTEGMRKPAFLSGEQKKAIVDLLFKTNRKVTVKQLKEDYFKKIECFDSVEISGVEDRFNASLGTYHDLLKIIKDKDFLDNEENEDILEDIVLTLTLFEDREMIEERLKTYAHLFDDKVMKQLKRRRYTGWGRLSRKLINGIRDKQSGKTILDFLKSDGFANRNFMQLIHDDSLTFKEDIQKAQVSGQGDSLHEHIANLAGSPAIKKGILQTVKVVDELVKVMGRHKPENIVIEMARENQTTQKGQKNSRERMKRIEEGIKELGSQILKEHPVENTQLQNEKLYLYYLQNGRDMYVDQELDINRLSDYDVDHIVPQSFLKDDSIDNKVLTRSDKARGKSDNVPSEEVVKKMKNYWRQLLNAKLITQRKFDNLTKAERGGLSELDKAGFIKRQLVETRQITKHVAQILDSRMNTKYDENDKLIREVKVITLKSKLVSDFRKDFQFYKVREINNYHHAHDAYLNAVVGTALIKKYPKLESEFVYGDYKVYDVRKMIAKSEQEIGKATAKYFFYSNIMNFFKTEITLANGEIRKRPLIETNGETGEIVWDKGRDFATVRKVLSMPQVNIVKKTEVQTGGFSKESILPKRNSDKLIARKKDWDPKKYGGFDSPTVAYSVLVVAKVEKGKSKKLKSVKELLGITIMERSSFEKNPIDFLEAKGYKEVKKDLIIKLPKYSLFELENGRKRMLASAGELQKGNELALPSKYVNFLYLASHYEKLKGSPEDNEQKQLFVEQHKHYLDEIIEQISEFSKRVILADANLDKVLSAYNKHRDKPIREQAENIIHLFTLTNLGAPAAFKYFDTTIDRKRYTSTKEVLDATLIHQSITGLYETRIDLSQLGGDGGGGGGGGGTLQLEEEYRLFEPESTQKQEMDIWLKNFPQAWAETGGMGTAHCQAPVLIQLKATATPISIRQYPMPHEAYQGIKPHIRRMLDQGILKPCQSPWNTPLLPVKKPGTEDYRPVQDLREVNKRVEDIHPTVPNPYNLLSTLPPSHPWYTVLDLKDAFFCLRLHSESQLLFAFEWRDPEIGLSGQLTWTRLPQGFKNSPTLFNEALHSDLADFRVRYPALVLLQYVDDLLLAAATRTECLEGTKALLETLGNKGYRASAKKAQICLQEVTYLGYSLKDGQRWLTKARKEAILSIPVPKNSRQVREFLGTAGYCRLWIPGFAELAAPLYPLTRPGTLFQWGTEQQLAFEDIKKALLSSPALGLPDITKPFELFIDENSGFAKGVLVQKLGPWKRPVAYLSKKLDTVASGWPPCLRMVAAIAILVKDAGKLTLGQPLTILTSHPVEALVRQPPNKWLSNARMTHYQAMLLDAERVHFGPTVSLNPATLLPLPSGGNHHDCLQILAETHGTRPDLTDQPLPDADLTWYTDGSSFIRNGEREAGAAVTTESEVIWAAPLPPGTSAQRAELIALTQALKMAEGKKLTVYTDSRYAFATTHVHGEIYRRRGWLTSEGKEIKNKNEILALLEALFLPKRLSIIHCPGHQKGDSPQAKGNRLADDTAKKAATETHSSLTVLPAGKRTADGSEFEKRTADGSEFESPKKKAKVE

SEQ ID NO: 1196 - protein, 2093 aa, synthetic construct
MPAAKRVKLDGGDKKYSIGLDIGTNSVGWAVITDEYKVPSKKFKVLGNTDRHSIKKNLIGALLFDSGETAEATRLKRTARRRYTRRKNRICYLQEIFSNEMAKVDDSFFHRLEESFLVEEDKKHERHPIFGNIVDEVAYHEKYPTIYHLRKKLVDSTDKADLRLIYLALAHMIKFRGHFLIEGDLNPDNSDVDKLFIQLVQTYNQLFEENPINASGVDAKAILSARLSKSRRLENLIAQLPGEKKNGLFGNLIALSLGLTPNFKSNFDLAEDAKLQLSKDTYDDDLDNLLAQIGDQYADLFLAAKNLSDAILLSDILRVNTEITKAPLSASMIKRYDEHHQDLTLLKALVRQQLPEKYKEIFFDQSKNGYAGYIDGGASQEEFYKFIKPILEKMDGTEELLVKLNREDLLRKQRTFDNGSIPHQIHLGELHAILRRQEDFYPFLKDNREKIEKILTFRIPYYVGPLARGNSRFAWMTRKSEETITPWNFEEVVDKGASAQSFIERMTNFDKNLPNEKVLPKHSLLYEYFTVYNELTKVKYVTEGMRKPAFLSGEQKKAIVDLLFKTNRKVTVKQLKEDYFKKIECFDSVEISGVEDRFNASLGTYHDLLKIIKDKDFLDNEENEDILEDIVLTLTLFEDREMIEERLKTYAHLFDDKVMKQLKRRRYTGWGRLSRKLINGIRDKQSGKTILDFLKSDGFANRNFMQLIHDDSLTFKEDIQKAQVSGQGDSLHEHIANLAGSPAIKKGILQTVKVVDELVKVMGRHKPENIVIEMARENQTTQKGQKNSRERMKRIEEGIKELGSQILKEHPVENTQLQNEKLYLYYLQNGRDMYVDQELDINRLSDYDVDHIVPQSFLKDDSIDNKVLTRSDKARGKSDNVPSEEVVKKMKNYWRQLLNAKLITQRKFDNLTKAERGGLSELDKAGFIKRQLVETRQITKHVAQILDSRMNTKYDENDKLIREVKVITLKSKLVSDFRKDFQFYKVREINNYHHAHDAYLNAVVGTALIKKYPKLESEFVYGDYKVYDVRKMIAKSEQEIGKATAKYFFYSNIMNFFKTEITLANGEIRKRPLIETNGETGEIVWDKGRDFATVRKVLSMPQVNIVKKTEVQTGGFSKESILPKRNSDKLIARKKDWDPKKYGGFDSPTVAYSVLVVAKVEKGKSKKLKSVKELLGITIMERSSFEKNPIDFLEAKGYKEVKKDLIIKLPKYSLFELENGRKRMLASAGELQKGNELALPSKYVNFLYLASHYEKLKGSPEDNEQKQLFVEQHKHYLDEIIEQISEFSKRVILADANLDKVLSAYNKHRDKPIREQAENIIHLFTLTNLGAPAAFKYFDTTIDRKRYTSTKEVLDATLIHQSITGLYETRIDLSQLGGDGGPAPGGSGGGGGTLQLEEEYRLFEPESTQKQEMDIWLKNFPQAWAETGGMGTAHCQAPVLIQLKATATPISIRQYPMPHEAYQGIKPHIRRMLDQGILKPCQSPWNTPLLPVKKPGTEDYRPVQDLREVNKRVEDIHPTVPNPYNLLSTLPPSHPWYTVLDLKDAFFCLRLHSESQLLFAFEWRDPEIGLSGQLTWTRLPQGFKNSPTLFNEALHSDLADFRVRYPALVLLQYVDDLLLAAATRTECLEGTKALLETLGNKGYRASAKKAQICLQEVTYLGYSLKDGQRWLTKARKEAILSIPVPKNSRQVREFLGTAGYCRLWIPGFAELAAPLYPLTRPGTLFQWGTEQQLAFEDIKKALLSSPALGLPDITKPFELFIDENSGFAKGVLVQKLGPWKRPVAYLSKKLDTVASGWPPCLRMVAAIAILVKDAGKLTLGQPLTILTSHPVEALVRQPPNKWLSNARMTHYQAMLLDAERVHFGPTVSLNPATLLPLPSGGNHHDCLQILAETHGTRPDLTDQPLPDADLTWYTDGSSFIRNGEREAGAAVTTESEVIWAAPLPPGTSAQRAELIALTQALKMAEGKKLTVYTDSRYAFATTHVHGEIYRRRGWLTSEGKEIKNKNEILALLEALFLPKRLSIIHCPGHQKGDSPQAKGNRLADDTAKKAATETHSSLTVLPAGKRTADGSEFEKRTADGSEFESPKKKAKVE

SEQ ID NO: 1197 - protein, 2130 aa, synthetic construct
MPAAKRVKLDGGDKKYSIGLDIGTNSVGWAVITDEYKVPSKKFKVLGNTDRHSIKKNLIGALLFDSGETAEATRLKRTARRRYTRRKNRICYLQEIFSNEMAKVDDSFFHRLEESFLVEEDKKHERHPIFGNIVDEVAYHEKYPTIYHLRKKLVDSTDKADLRLIYLALAHMIKFRGHFLIEGDLNPDNSDVDKLFIQLVQTYNQLFEENPINASGVDAKAILSARLSKSRRLENLIAQLPGEKKNGLFGNLIALSLGLTPNFKSNFDLAEDAKLQLSKDTYDDDLDNLLAQIGDQYADLFLAAKNLSDAILLSDILRVNTEITKAPLSASMIKRYDEHHQDLTLLKALVRQQLPEKYKEIFFDQSKNGYAGYIDGGASQEEFYKFIKPILEKMDGTEELLVKLNREDLLRKQRTFDNGSIPHQIHLGELHAILRRQEDFYPFLKDNREKIEKILTFRIPYYVGPLARGNSRFAWMTRKSEETITPWNFEEVVDKGASAQSFIERMTNFDKNLPNEKVLPKHSLLYEYFTVYNELTKVKYVTEGMRKPAFLSGEQKKAIVDLLFKTNRKVTVKQLKEDYFKKIECFDSVEISGVEDRFNASLGTYHDLLKIIKDKDFLDNEENEDILEDIVLTLTLFEDREMIEERLKTYAHLFDDKVMKQLKRRRYTGWGRLSRKLINGIRDKQSGKTILDFLKSDGFANRNFMQLIHDDSLTFKEDIQKAQVSGQGDSLHEHIANLAGSPAIKKGILQTVKVVDELVKVMGRHKPENIVIEMARENQTTQKGQKNSRERMKRIEEGIKELGSQILKEHPVENTQLQNEKLYLYYLQNGRDMYVDQELDINRLSDYDVDHIVPQSFLKDDSIDNKVLTRSDKARGKSDNVPSEEVVKKMKNYWRQLLNAKLITQRKFDNLTKAERGGLSELDKAGFIKRQLVETRQITKHVAQILDSRMNTKYDENDKLIREVKVITLKSKLVSDFRKDFQFYKVREINNYHHAHDAYLNAVVGTALIKKYPKLESEFVYGDYKVYDVRKMIAKSEQEIGKATAKYFFYSNIMNFFKTEITLANGEIRKRPLIETNGETGEIVWDKGRDFATVRKVLSMPQVNIVKKTEVQTGGFSKESILPKRNSDKLIARKKDWDPKKYGGFDSPTVAYSVLVVAKVEKGKSKKLKSVKELLGITIMERSSFEKNPIDFLEAKGYKEVKKDLIIKLPKYSLFELENGRKRMLASAGELQKGNELALPSKYVNFLYLASHYEKLKGSPEDNEQKQLFVEQHKHYLDEIIEQISEFSKRVILADANLDKVLSAYNKHRDKPIREQAENIIHLFTLTNLGAPAAFKYFDTTIDRKRYTSTKEVLDATLIHQSITGLYETRIDLSQLGGDGGAEAAAKEAAAKEAAAKEAAAKALEAEAAAKEAAAKEAAAKEAAAKAGGTLQLEEEYRLFEPESTQKQEMDIWLKNFPQAWAETGGMGTAHCQAPVLIQLKATATPISIRQYPMPHEAYQGIKPHIRRMLDQGILKPCQSPWNTPLLPVKKPGTEDYRPVQDLREVNKRVEDIHPTVPNPYNLLSTLPPSHPWYTVLDLKDAFFCLRLHSESQLLFAFEWRDPEIGLSGQLTWTRLPQGFKNSPTLFNEALHSDLADFRVRYPALVLLQYVDDLLLAAATRTECLEGTKALLETLGNKGYRASAKKAQICLQEVTYLGYSLKDGQRWLTKARKEAILSIPVPKNSRQVREFLGKAGYCRLFIPGFAELAAPLYPLTRPGTLFQWGTEQQLAFEDIKKALLSSPALGLPDITKPFELFIDENSGFAKGVLVQKLGPWKRPVAYLSKKLDTVASGWPPCLRMVAAIAILVKDAGKLTLGQPLTILTSHPVEALVRQPPNKWLSNARMTHYQAMLLDAERVHFGPTVSLNPATLLPLPSGGNHHDCLQILAETHGTRPDLTDQPLPDADLTWYTDGSSFIRNGEREAGAAVTTESEVIWAAPLPPGTSAQRAELIALTQALKMAEGKKLTVYTDSRYAFATTHVHGEIYRRRGWLTSEGKEIKNKNEILALLEALFLPKRLSIIHCPGHQKGDSPQAKGNRLADDTAKKAATETHSSLTVLPAGKRTADGSEFEKRTADGSEFESPKKKAKVE

SEQ ID NO: 1198 - protein, 2104 aa, synthetic construct
MPAAKRVKLDGGDKKYSIGLDIGTNSVGWAVITDEYKVPSKKFKVLGNTDRHSIKKNLIGALLFDSGETAEATRLKRTARRRYTRRKNRICYLQEIFSNEMAKVDDSFFHRLEESFLVEEDKKHERHPIFGNIVDEVAYHEKYPTIYHLRKKLVDSTDKADLRLIYLALAHMIKFRGHFLIEGDLNPDNSDVDKLFIQLVQTYNQLFEENPINASGVDAKAILSARLSKSRRLENLIAQLPGEKKNGLFGNLIALSLGLTPNFKSNFDLAEDAKLQLSKDTYDDDLDNLLAQIGDQYADLFLAAKNLSDAILLSDILRVNTEITKAPLSASMIKRYDEHHQDLTLLKALVRQQLPEKYKEIFFDQSKNGYAGYIDGGASQEEFYKFIKPILEKMDGTEELLVKLNREDLLRKQRTFDNGSIPHQIHLGELHAILRRQEDFYPFLKDNREKIEKILTFRIPYYVGPLARGNSRFAWMTRKSEETITPWNFEEVVDKGASAQSFIERMTNFDKNLPNEKVLPKHSLLYEYFTVYNELTKVKYVTEGMRKPAFLSGEQKKAIVDLLFKTNRKVTVKQLKEDYFKKIECFDSVEISGVEDRFNASLGTYHDLLKIIKDKDFLDNEENEDILEDIVLTLTLFEDREMIEERLKTYAHLFDDKVMKQLKRRRYTGWGRLSRKLINGIRDKQSGKTILDFLKSDGFANRNFMQLIHDDSLTFKEDIQKAQVSGQGDSLHEHIANLAGSPAIKKGILQTVKVVDELVKVMGRHKPENIVIEMARENQTTQKGQKNSRERMKRIEEGIKELGSQILKEHPVENTQLQNEKLYLYYLQNGRDMYVDQELDINRLSDYDVDHIVPQSFLKDDSIDNKVLTRSDKARGKSDNVPSEEVVKKMKNYWRQLLNAKLITQRKFDNLTKAERGGLSELDKAGFIKRQLVETRQITKHVAQILDSRMNTKYDENDKLIREVKVITLKSKLVSDFRKDFQFYKVREINNYHHAHDAYLNAVVGTALIKKYPKLESEFVYGDYKVYDVRKMIAKSEQEIGKATAKYFFYSNIMNFFKTEITLANGEIRKRPLIETNGETGEIVWDKGRDFATVRKVLSMPQVNIVKKTEVQTGGFSKESILPKRNSDKLIARKKDWDPKKYGGFDSPTVAYSVLVVAKVEKGKSKKLKSVKELLGITIMERSSFEKNPIDFLEAKGYKEVKKDLIIKLPKYSLFELENGRKRMLASAGELQKGNELALPSKYVNFLYLASHYEKLKGSPEDNEQKQLFVEQHKHYLDEIIEQISEFSKRVILADANLDKVLSAYNKHRDKPIREQAENIIHLFTLTNLGAPAAFKYFDTTIDRKRYTSTKEVLDATLIHQSITGLYETRIDLSQLGGDGGEAAAKEAAAKEAAAKEAAAKGGTLQLEEEYRLFEPESTQKQEMDIWLKNFPQAWAETGGMGTAHCQAPVLIQLKATATPISIRQYPMPHEAYQGIKPHIRRMLDQGILKPCQSPWNTPLLPVKKPGTEDYRPVQDLREVNKRVEDIHPTVPNPYNLLSTLPPSHPWYTVLDLKDAFFCLRLHSESQLLFAFEWRDPEIGLSGQLTWTRLPQGFKNSPTLFNEALHSDLADFRVRYPALVLLQYVDDLLLAAATRTECLEGTKALLETLGNKGYRASAKKAQICLQEVTYLGYSLKDGQRWLTKARKEAILSIPVPKNSRQVREFLGKAGYCRLFIPGFAELAAPLYPLTRPGTLFQWGTEQQLAFEDIKKALLSSPALGLPDITKPFELFIDENSGFAKGVLVQKLGPWKRPVAYLSKKLDTVASGWPPCLRMVAAIAILVKDAGKLTLGQPLTILTSHPVEALVRQPPNKWLSNARMTHYQAMLLDAERVHFGPTVSLNPATLLPLPSGGNHHDCLQILAETHGTRPDLTDQPLPDADLTWYTDGSSFIRNGEREAGAAVTTESEVIWAAPLPPGTSAQRAELIALTQALKMAEGKKLTVYTDSRYAFATTHVHGEIYRRRGWLTSEGKEIKNKNEILALLEALFLPKRLSIIHCPGHQKGDSPQAKGNRLADDTAKKAATETHSSLTVLPAGKRTADGSEFEKRTADGSEFESPKKKAKVE

SEQ ID NO: 1199 - protein, 2114 aa, synthetic construct
MPAAKRVKLDGGDKKYSIGLDIGTNSVGWAVITDEYKVPSKKFKVLGNTDRHSIKKNLIGALLFDSGETAEATRLKRTARRRYTRRKNRICYLQEIFSNEMAKVDDSFFHRLEESFLVEEDKKHERHPIFGNIVDEVAYHEKYPTIYHLRKKLVDSTDKADLRLIYLALAHMIKFRGHFLIEGDLNPDNSDVDKLFIQLVQTYNQLFEENPINASGVDAKAILSARLSKSRRLENLIAQLPGEKKNGLFGNLIALSLGLTPNFKSNFDLAEDAKLQLSKDTYDDDLDNLLAQIGDQYADLFLAAKNLSDAILLSDILRVNTEITKAPLSASMIKRYDEHHQDLTLLKALVRQQLPEKYKEIFFDQSKNGYAGYIDGGASQEEFYKFIKPILEKMDGTEELLVKLNREDLLRKQRTFDNGSIPHQIHLGELHAILRRQEDFYPFLKDNREKIEKILTFRIPYYVGPLARGNSRFAWMTRKSEETITPWNFEEVVDKGASAQSFIERMTNFDKNLPNEKVLPKHSLLYEYFTVYNELTKVKYVTEGMRKPAFLSGEQKKAIVDLLFKTNRKVTVKQLKEDYFKKIECFDSVEISGVEDRFNASLGTYHDLLKIIKDKDFLDNEENEDILEDIVLTLTLFEDREMIEERLKTYAHLFDDKVMKQLKRRRYTGWGRLSRKLINGIRDKQSGKTILDFLKSDGFANRNFMQLIHDDSLTFKEDIQKAQVSGQGDSLHEHIANLAGSPAIKKGILQTVKVVDELVKVMGRHKPENIVIEMARENQTTQKGQKNSRERMKRIEEGIKELGSQILKEHPVENTQLQNEKLYLYYLQNGRDMYVDQELDINRLSDYDVDHIVPQSFLKDDSIDNKVLTRSDKARGKSDNVPSEEVVKKMKNYWRQLLNAKLITQRKFDNLTKAERGGLSELDKAGFIKRQLVETRQITKHVAQILDSRMNTKYDENDKLIREVKVITLKSKLVSDFRKDFQFYKVREINNYHHAHDAYLNAVVGTALIKKYPKLESEFVYGDYKVYDVRKMIAKSEQEIGKATAKYFFYSNIMNFFKTEITLANGEIRKRPLIETNGETGEIVWDKGRDFATVRKVLSMPQVNIVKKTEVQTGGFSKESILPKRNSDKLIARKKDWDPKKYGGFDSPTVAYSVLVVAKVEKGKSKKLKSVKELLGITIMERSSFEKNPIDFLEAKGYKEVKKDLIIKLPKYSLFELENGRKRMLASAGELQKGNELALPSKYVNFLYLASHYEKLKGSPEDNEQKQLFVEQHKHYLDEIIEQISEFSKRVILADANLDKVLSAYNKHRDKPIREQAENIIHLFTLTNLGAPAAFKYFDTTIDRKRYTSTKEVLDATLIHQSITGLYETRIDLSQLGGDGGEAAAKEAAAKEAAAKEAAAKEAAAKEAAAKGGTLQLEEEYRLFEPESTQKQEMDIWLKNFPQAWAETGGMGTAHCQAPVLIQLKATATPISIRQYPMPHEAYQGIKPHIRRMLDQGILKPCQSPWNTPLLPVKKPGTEDYRPVQDLREVNKRVEDIHPTVPNPYNLLSTLPPSHPWYTVLDLKDAFFCLRLHSESQLLFAFEWRDPEIGLSGQLTWTRLPQGFKNSPTLFNEALHSDLADFRVRYPALVLLQYVDDLLLAAATRTECLEGTKALLETLGNKGYRASAKKAQICLQEVTYLGYSLKDGQRWLTKARKEAILSIPVPKNSRQVREFLGKAGYCRLFIPGFAELAAPLYPLTRPGTLFQWGTEQQLAFEDIKKALLSSPALGLPDITKPFELFIDENSGFAKGVLVQKLGPWKRPVAYLSKKLDTVASGWPPCLRMVAAIAILVKDAGKLTLGQPLTILTSHPVEALVRQPPNKWLSNARMTHYQAMLLDAERVHFGPTVSLNPATLLPLPSGGNHHDCLQILAETHGTRPDLTDQPLPDADLTWYTDGSSFIRNGEREAGAAVTTESEVIWAAPLPPGTSAQRAELIALTQALKMAEGKKLTVYTDSRYAFATTHVHGEIYRRRGWLTSEGKEIKNKNEILALLEALFLPKRLSIIHCPGHQKGDSPQAKGNRLADDTAKKAATETHSSLTVLPAGKRTADGSEFEKRTADGSEFESPKKKAKVE

SEQ ID NO: 1200 - protein, 2095 aa, synthetic construct
MPAAKRVKLDGGDKKYSIGLDIGTNSVGWAVITDEYKVPSKKFKVLGNTDRHSIKKNLIGALLFDSGETAEATRLKRTARRRYTRRKNRICYLQEIFSNEMAKVDDSFFHRLEESFLVEEDKKHERHPIFGNIVDEVAYHEKYPTIYHLRKKLVDSTDKADLRLIYLALAHMIKFRGHFLIEGDLNPDNSDVDKLFIQLVQTYNQLFEENPINASGVDAKAILSARLSKSRRLENLIAQLPGEKKNGLFGNLIALSLGLTPNFKSNFDLAEDAKLQLSKDTYDDDLDNLLAQIGDQYADLFLAAKNLSDAILLSDILRVNTEITKAPLSASMIKRYDEHHQDLTLLKALVRQQLPEKYKEIFFDQSKNGYAGYIDGGASQEEFYKFIKPILEKMDGTEELLVKLNREDLLRKQRTFDNGSIPHQIHLGELHAILRRQEDFYPFLKDNREKIEKILTFRIPYYVGPLARGNSRFAWMTRKSEETITPWNFEEVVDKGASAQSFIERMTNFDKNLPNEKVLPKHSLLYEYFTVYNELTKVKYVTEGMRKPAFLSGEQKKAIVDLLFKTNRKVTVKQLKEDYFKKIECFDSVEISGVEDRFNASLGTYHDLLKIIKDKDFLDNEENEDILEDIVLTLTLFEDREMIEERLKTYAHLFDDKVMKQLKRRRYTGWGRLSRKLINGIRDKQSGKTILDFLKSDGFANRNFMQLIHDDSLTFKEDIQKAQVSGQGDSLHEHIANLAGSPAIKKGILQTVKVVDELVKVMGRHKPENIVIEMARENQTTQKGQKNSRERMKRIEEGIKELGSQILKEHPVENTQLQNEKLYLYYLQNGRDMYVDQELDINRLSDYDVDHIVPQSFLKDDSIDNKVLTRSDKARGKSDNVPSEEVVKKMKNYWRQLLNAKLITQRKFDNLTKAERGGLSELDKAGFIKRQLVETRQITKHVAQILDSRMNTKYDENDKLIREVKVITLKSKLVSDFRKDFQFYKVREINNYHHAHDAYLNAVVGTALIKKYPKLESEFVYGDYKVYDVRKMIAKSEQEIGKATAKYFFYSNIMNFFKTEITLANGEIRKRPLIETNGETGEIVWDKGRDFATVRKVLSMPQVNIVKKTEVQTGGFSKESILPKRNSDKLIARKKDWDPKKYGGFDSPTVAYSVLVVAKVEKGKSKKLKSVKELLGITIMERSSFEKNPIDFLEAKGYKEVKKDLIIKLPKYSLFELENGRKRMLASAGELQKGNELALPSKYVNFLYLASHYEKLKGSPEDNEQKQLFVEQHKHYLDEIIEQISEFSKRVILADANLDKVLSAYNKHRDKPIREQAENIIHLFTLTNLGAPAAFKYFDTTIDRKRYTSTKEVLDATLIHQSITGLYETRIDLSQLGGDGGPAPEAAAKGGGGGTLQLEEEYRLFEPESTQKQEMDIWLKNFPQAWAETGGMGTAHCQAPVLIQLKATATPISIRQYPMPHEAYQGIKPHIRRMLDQGILKPCQSPWNTPLLPVKKPGTEDYRPVQDLREVNKRVEDIHPTVPNPYNLLSTLPPSHPWYTVLDLKDAFFCLRLHSESQLLFAFEWRDPEIGLSGQLTWTRLPQGFKNSPTLFNEALHSDLADFRVRYPALVLLQYVDDLLLAAATRTECLEGTKALLETLGNKGYRASAKKAQICLQEVTYLGYSLKDGQRWLTKARKEAILSIPVPKNSRQVREFLGKAGYCRLFIPGFAELAAPLYPLTRPGTLFQWGTEQQLAFEDIKKALLSSPALGLPDITKPFELFIDENSGFAKGVLVQKLGPWKRPVAYLSKKLDTVASGWPPCLRMVAAIAILVKDAGKLTLGQPLTILTSHPVEALVRQPPNKWLSNARMTHYQAMLLDAERVHFGPTVSLNPATLLPLPSGGNHHDCLQILAETHGTRPDLTDQPLPDADLTWYTDGSSFIRNGEREAGAAVTTESEVIWAAPLPPGTSAQRAELIALTQALKMAEGKKLTVYTDSRYAFATTHVHGEIYRRRGWLTSEGKEIKNKNEILALLEALFLPKRLSIIHCPGHQKGDSPQAKGNRLADDTAKKAATETHSSLTVLPAGKRTADGSEFEKRTADGSEFESPKKKAKVE

SEQ ID NO: 1201 - protein, 2095 aa, synthetic construct
MPAAKRVKLDGGDKKYSIGLDIGTNSVGWAVITDEYKVPSKKFKVLGNTDRHSIKKNLIGALLFDSGETAEATRLKRTARRRYTRRKNRICYLQEIFSNEMAKVDDSFFHRLEESFLVEEDKKHERHPIFGNIVDEVAYHEKYPTIYHLRKKLVDSTDKADLRLIYLALAHMIKFRGHFLIEGDLNPDNSDVDKLFIQLVQTYNQLFEENPINASGVDAKAILSARLSKSRRLENLIAQLPGEKKNGLFGNLIALSLGLTPNFKSNFDLAEDAKLQLSKDTYDDDLDNLLAQIGDQYADLFLAAKNLSDAILLSDILRVNTEITKAPLSASMIKRYDEHHQDLTLLKALVRQQLPEKYKEIFFDQSKNGYAGYIDGGASQEEFYKFIKPILEKMDGTEELLVKLNREDLLRKQRTFDNGSIPHQIHLGELHAILRRQEDFYPFLKDNREKIEKILTFRIPYYVGPLARGNSRFAWMTRKSEETITPWNFEEVVDKGASAQSFIERMTNFDKNLPNEKVLPKHSLLYEYFTVYNELTKVKYVTEGMRKPAFLSGEQKKAIVDLLFKTNRKVTVKQLKEDYFKKIECFDSVEISGVEDRFNASLGTYHDLLKIIKDKDFLDNEENEDILEDIVLTLTLFEDREMIEERLKTYAHLFDDKVMKQLKRRRYTGWGRLSRKLINGIRDKQSGKTILDFLKSDGFANRNFMQLIHDDSLTFKEDIQKAQVSGQGDSLHEHIANLAGSPAIKKGILQTVKVVDELVKVMGRHKPENIVIEMARENQTTQKGQKNSRERMKRIEEGIKELGSQILKEHPVENTQLQNEKLYLYYLQNGRDMYVDQELDINRLSDYDVDHIVPQSFLKDDSIDNKVLTRSDKARGKSDNVPSEEVVKKMKNYWRQLLNAKLITQRKFDNLTKAERGGLSELDKAGFIKRQLVETRQITKHVAQILDSRMNTKYDENDKLIREVKVITLKSKLVSDFRKDFQFYKVREINNYHHAHDAYLNAVVGTALIKKYPKLESEFVYGDYKVYDVRKMIAKSEQEIGKATAKYFFYSNIMNFFKTEITLANGEIRKRPLIETNGETGEIVWDKGRDFATVRKVLSMPQVNIVKKTEVQTGGFSKESILPKRNSDKLIARKKDWDPKKYGGFDSPTVAYSVLVVAKVEKGKSKKLKSVKELLGITIMERSSFEKNPIDFLEAKGYKEVKKDLIIKLPKYSLFELENGRKRMLASAGELQKGNELALPSKYVNFLYLASHYEKLKGSPEDNEQKQLFVEQHKHYLDEIIEQISEFSKRVILADANLDKVLSAYNKHRDKPIREQAENIIHLFTLTNLGAPAAFKYFDTTIDRKRYTSTKEVLDATLIHQSITGLYETRIDLSQLGGDGGEAAAKGSSPAPGGTLQLEEEYRLFEPESTQKQEMDIWLKNFPQAWAETGGMGTAHCQAPVLIQLKATATPISIRQYPMPHEAYQGIKPHIRRMLDQGILKPCQSPWNTPLLPVKKPGTEDYRPVQDLREVNKRVEDIHPTVPNPYNLLSTLPPSHPWYTVLDLKDAFFCLRLHSESQLLFAFEWRDPEIGLSGQLTWTRLPQGFKNSPTLFNEALHSDLADFRVRYPALVLLQYVDDLLLAAATRTECLEGTKALLETLGNKGYRASAKKAQICLQEVTYLGYSLKDGQRWLTKARKEAILSIPVPKNSRQVREFLGKAGYCRLFIPGFAELAAPLYPLTRPGTLFQWGTEQQLAFEDIKKALLSSPALGLPDITKPFELFIDENSGFAKGVLVQKLGPWKRPVAYLSKKLDTVASGWPPCLRMVAAIAILVKDAGKLTLGQPLTILTSHPVEALVRQPPNKWLSNARMTHYQAMLLDAERVHFGPTVSLNPATLLPLPSGGNHHDCLQILAETHGTRPDLTDQPLPDADLTWYTDGSSFIRNGEREAGAAVTTESEVIWAAPLPPGTSAQRAELIALTQALKMAEGKKLTVYTDSRYAFATTHVHGEIYRRRGWLTSEGKEIKNKNEILALLEALFLPKRLSIIHCPGHQKGDSPQAKGNRLADDTAKKAATETHSSLTVLPAGKRTADGSEFEKRTADGSEFESPKKKAKVE

SEQ ID NO: 1202 - protein, 2109 aa, synthetic construct
MPAAKRVKLDGGDKKYSIGLDIGTNSVGWAVITDEYKVPSKKFKVLGNTDRHSIKKNLIGALLFDSGETAEATRLKRTARRRYTRRKNRICYLQEIFSNEMAKVDDSFFHRLEESFLVEEDKKHERHPIFGNIVDEVAYHEKYPTIYHLRKKLVDSTDKADLRLIYLALAHMIKFRGHFLIEGDLNPDNSDVDKLFIQLVQTYNQLFEENPINASGVDAKAILSARLSKSRRLENLIAQLPGEKKNGLFGNLIALSLGLTPNFKSNFDLAEDAKLQLSKDTYDDDLDNLLAQIGDQYADLFLAAKNLSDAILLSDILRVNTEITKAPLSASMIKRYDEHHQDLTLLKALVRQQLPEKYKEIFFDQSKNGYAGYIDGGASQEEFYKFIKPILEKMDGTEELLVKLNREDLLRKQRTFDNGSIPHQIHLGELHAILRRQEDFYPFLKDNREKIEKILTFRIPYYVGPLARGNSRFAWMTRKSEETITPWNFEEVVDKGASAQSFIERMTNFDKNLPNEKVLPKHSLLYEYFTVYNELTKVKYVTEGMRKPAFLSGEQKKAIVDLLFKTNRKVTVKQLKEDYFKKIECFDSVEISGVEDRFNASLGTYHDLLKIIKDKDFLDNEENEDILEDIVLTLTLFEDREMIEERLKTYAHLFDDKVMKQLKRRRYTGWGRLSRKLINGIRDKQSGKTILDFLKSDGFANRNFMQLIHDDSLTFKEDIQKAQVSGQGDSLHEHIANLAGSPAIKKGILQTVKVVDELVKVMGRHKPENIVIEMARENQTTQKGQKNSRERMKRIEEGIKELGSQILKEHPVENTQLQNEKLYLYYLQNGRDMYVDQELDINRLSDYDVDHIVPQSFLKDDSIDNKVLTRSDKARGKSDNVPSEEVVKKMKNYWRQLLNAKLITQRKFDNLTKAERGGLSELDKAGFIKRQLVETRQITKHVAQILDSRMNTKYDENDKLIREVKVITLKSKLVSDFRKDFQFYKVREINNYHHAHDAYLNAVVGTALIKKYPKLESEFVYGDYKVYDVRKMIAKSEQEIGKATAKYFFYSNIMNFFKTEITLANGEIRKRPLIETNGETGEIVWDKGRDFATVRKVLSMPQVNIVKKTEVQTGGFSKESILPKRNSDKLIARKKDWDPKKYGGFDSPTVAYSVLVVAKVEKGKSKKLKSVKELLGITIMERSSFEKNPIDFLEAKGYKEVKKDLIIKLPKYSLFELENGRKRMLASAGELQKGNELALPSKYVNFLYLASHYEKLKGSPEDNEQKQLFVEQHKHYLDEIIEQISEFSKRVILADANLDKVLSAYNKHRDKPIREQAENIIHLFTLTNLGAPAAFKYFDTTIDRKRYTSTKEVLDATLIHQSITGLYETRIDLSQLGGDGGGGGGSGGGGSGGGGSGGGGSGGGGSGGTLQLEEEYRLFEPESTQKQEMDIWLKNFPQAWAETGGMGTAHCQAPVLIQLKATATPISIRQYPMPHEAYQGIKPHIRRMLDQGILKPCQSPWNTPLLPVKKPGTEDYRPVQDLREVNKRVEDIHPTVPNPYNLLSTLPPSHPWYTVLDLKDAFFCLRLHSESQLLFAFEWRDPEIGLSGQLTWTRLPQGFKNSPTLFNEALHSDLADFRVRYPALVLLQYVDDLLLAAATRTECLEGTKALLETLGNKGYRASAKKAQICLQEVTYLGYSLKDGQRWLTKARKEAILSIPVPKNSRQVREFLGKAGYCRLFIPGFAELAAPLYPLTRPGTLFQWGTEQQLAFEDIKKALLSSPALGLPDITKPFELFIDENSGFAKGVLVQKLGPWKRPVAYLSKKLDTVASGWPPCLRMVAAIAILVKDAGKLTLGQPLTILTSHPVEALVRQPPNKWLSNARMTHYQAMLLDAERVHFGPTVSLNPATLLPLPSGGNHHDCLQILAETHGTRPDLTDQPLPDADLTWYTDGSSFIRNGEREAGAAVTTESEVIWAAPLPPGTSAQRAELIALTQALKMAEGKKLTVYTDSRYAFATTHVHGEIYRRRGWLTSEGKEIKNKNEILALLEALFLPKRLSIIHCPGHQKGDSPQAKGNRLADDTAKKAATETHSSLTVLPAGKRTADGSEFEKRTADGSEFESPKKKAKVE

SEQ ID NO: 1203 - protein, 2099 aa, synthetic construct
MPAAKRVKLDGGDKKYSIGLDIGTNSVGWAVITDEYKVPSKKFKVLGNTDRHSIKKNLIGALLFDSGETAEATRLKRTARRRYTRRKNRICYLQEIFSNEMAKVDDSFFHRLEESFLVEEDKKHERHPIFGNIVDEVAYHEKYPTIYHLRKKLVDSTDKADLRLIYLALAHMIKFRGHFLIEGDLNPDNSDVDKLFIQLVQTYNQLFEENPINASGVDAKAILSARLSKSRRLENLIAQLPGEKKNGLFGNLIALSLGLTPNFKSNFDLAEDAKLQLSKDTYDDDLDNLLAQIGDQYADLFLAAKNLSDAILLSDILRVNTEITKAPLSASMIKRYDEHHQDLTLLKALVRQQLPEKYKEIFFDQSKNGYAGYIDGGASQEEFYKFIKPILEKMDGTEELLVKLNREDLLRKQRTFDNGSIPHQIHLGELHAILRRQEDFYPFLKDNREKIEKILTFRIPYYVGPLARGNSRFAWMTRKSEETITPWNFEEVVDKGASAQSFIERMTNFDKNLPNEKVLPKHSLLYEYFTVYNELTKVKYVTEGMRKPAFLSGEQKKAIVDLLFKTNRKVTVKQLKEDYFKKIECFDSVEISGVEDRFNASLGTYHDLLKIIKDKDFLDNEENEDILEDIVLTLTLFEDREMIEERLKTYAHLFDDKVMKQLKRRRYTGWGRLSRKLINGIRDKQSGKTILDFLKSDGFANRNFMQLIHDDSLTFKEDIQKAQVSGQGDSLHEHIANLAGSPAIKKGILQTVKVVDELVKVMGRHKPENIVIEMARENQTTQKGQKNSRERMKRIEEGIKELGSQILKEHPVENTQLQNEKLYLYYLQNGRDMYVDQELDINRLSDYDVDHIVPQSFLKDDSIDNKVLTRSDKARGKSDNVPSEEVVKKMKNYWRQLLNAKLITQRKFDNLTKAERGGLSELDKAGFIKRQLVETRQITKHVAQILDSRMNTKYDENDKLIREVKVITLKSKLVSDFRKDFQFYKVREINNYHHAHDAYLNAVVGTALIKKYPKLESEFVYGDYKVYDVRKMIAKSEQEIGKATAKYFFYSNIMNFFKTEITLANGEIRKRPLIETNGETGEIVWDKGRDFATVRKVLSMPQVNIVKKTEVQTGGFSKESILPKRNSDKLIARKKDWDPKKYGGFDSPTVAYSVLVVAKVEKGKSKKLKSVKELLGITIMERSSFEKNPIDFLEAKGYKEVKKDLIIKLPKYSLFELENGRKRMLASAGELQKGNELALPSKYVNFLYLASHYEKLKGSPEDNEQKQLFVEQHKHYLDEIIEQISEFSKRVILADANLDKVLSAYNKHRDKPIREQAENIIHLFTLTNLGAPAAFKYFDTTIDRKRYTSTKEVLDATLIHQSITGLYETRIDLSQLGGDGGGGGGSEAAAKGGGGSGGTLQLEEEYRLFEPESTQKQEMDIWLKNFPQAWAETGGMGTAHCQAPVLIQLKATATPISIRQYPMPHEAYQGIKPHIRRMLDQGILKPCQSPWNTPLLPVKKPGTEDYRPVQDLREVNKRVEDIHPTVPNPYNLLSTLPPSHPWYTVLDLKDAFFCLRLHSESQLLFAFEWRDPEIGLSGQLTWTRLPQGFKNSPTLFNEALHSDLADFRVRYPALVLLQYVDDLLLAAATRTECLEGTKALLETLGNKGYRASAKKAQICLQEVTYLGYSLKDGQRWLTKARKEAILSIPVPKNSRQVREFLGKAGYCRLFIPGFAELAAPLYPLTRPGTLFQWGTEQQLAFEDIKKALLSSPALGLPDITKPFELFIDENSGFAKGVLVQKLGPWKRPVAYLSKKLDTVASGWPPCLRMVAAIAILVKDAGKLTLGQPLTILTSHPVEALVRQPPNKWLSNARMTHYQAMLLDAERVHFGPTVSLNPATLLPLPSGGNHHDCLQILAETHGTRPDLTDQPLPDADLTWYTDGSSFIRNGEREAGAAVTTESEVIWAAPLPPGTSAQRAELIALTQALKMAEGKKLTVYTDSRYAFATTHVHGEIYRRRGWLTSEGKEIKNKNEILALLEALFLPKRLSIIHCPGHQKGDSPQAKGNRLADDTAKKAATETHSSLTVLPAGKRTADGSEFEKRTADGSEFESPKKKAKVE

SEQ ID NO: 1204 - protein, 2092 aa, synthetic construct
MPAAKRVKLDGGDKKYSIGLDIGTNSVGWAVITDEYKVPSKKFKVLGNTDRHSIKKNLIGALLFDSGETAEATRLKRTARRRYTRRKNRICYLQEIFSNEMAKVDDSFFHRLEESFLVEEDKKHERHPIFGNIVDEVAYHEKYPTIYHLRKKLVDSTDKADLRLIYLALAHMIKFRGHFLIEGDLNPDNSDVDKLFIQLVQTYNQLFEENPINASGVDAKAILSARLSKSRRLENLIAQLPGEKKNGLFGNLIALSLGLTPNFKSNFDLAEDAKLQLSKDTYDDDLDNLLAQIGDQYADLFLAAKNLSDAILLSDILRVNTEITKAPLSASMIKRYDEHHQDLTLLKALVRQQLPEKYKEIFFDQSKNGYAGYIDGGASQEEFYKFIKPILEKMDGTEELLVKLNREDLLRKQRTFDNGSIPHQIHLGELHAILRRQEDFYPFLKDNREKIEKILTFRIPYYVGPLARGNSRFAWMTRKSEETITPWNFEEVVDKGASAQSFIERMTNFDKNLPNEKVLPKHSLLYEYFTVYNELTKVKYVTEGMRKPAFLSGEQKKAIVDLLFKTNRKVTVKQLKEDYFKKIECFDSVEISGVEDRFNASLGTYHDLLKIIKDKDFLDNEENEDILEDIVLTLTLFEDREMIEERLKTYAHLFDDKVMKQLKRRRYTGWGRLSRKLINGIRDKQSGKTILDFLKSDGFANRNFMQLIHDDSLTFKEDIQKAQVSGQGDSLHEHIANLAGSPAIKKGILQTVKVVDELVKVMGRHKPENIVIEMARENQTTQKGQKNSRERMKRIEEGIKELGSQILKEHPVENTQLQNEKLYLYYLQNGRDMYVDQELDINRLSDYDVDHIVPQSFLKDDSIDNKVLTRSDKARGKSDNVPSEEVVKKMKNYWRQLLNAKLITQRKFDNLTKAERGGLSELDKAGFIKRQLVETRQITKHVAQILDSRMNTKYDENDKLIREVKVITLKSKLVSDFRKDFQFYKVREINNYHHAHDAYLNAVVGTALIKKYPKLESEFVYGDYKVYDVRKMIAKSEQEIGKATAKYFFYSNIMNFFKTEITLANGEIRKRPLIETNGETGEIVWDKGRDFATVRKVLSMPQVNIVKKTEVQTGGFSKESILPKRNSDKLIARKKDWDPKKYGGFDSPTVAYSVLVVAKVEKGKSKKLKSVKELLGITIMERSSFEKNPIDFLEAKGYKEVKKDLIIKLPKYSLFELENGRKRMLASAGELQKGNELALPSKYVNFLYLASHYEKLKGSPEDNEQKQLFVEQHKHYLDEIIEQISEFSKRVILADANLDKVLSAYNKHRDKPIREQAENIIHLFTLTNLGAPAAFKYFDTTIDRKRYTSTKEVLDATLIHQSITGLYETRIDLSQLGGDGGGGSEAAAKGGTLQLEEEYRLFEPESTQKQEMDIWLKNFPQAWAETGGMGTAHCQAPVLIQLKATATPISIRQYPMPHEAYQGIKPHIRRMLDQGILKPCQSPWNTPLLPVKKPGTEDYRPVQDLREVNKRVEDIHPTVPNPYNLLSTLPPSHPWYTVLDLKDAFFCLRLHSESQLLFAFEWRDPEIGLSGQLTWTRLPQGFKNSPTLFNEALHSDLADFRVRYPALVLLQYVDDLLLAAATRTECLEGTKALLETLGNKGYRASAKKAQICLQEVTYLGYSLKDGQRWLTKARKEAILSIPVPKNSRQVREFLGKAGYCRLFIPGFAELAAPLYPLTRPGTLFQWGTEQQLAFEDIKKALLSSPALGLPDITKPFELFIDENSGFAKGVLVQKLGPWKRPVAYLSKKLDTVASGWPPCLRMVAAIAILVKDAGKLTLGQPLTILTSHPVEALVRQPPNKWLSNARMTHYQAMLLDAERVHFGPTVSLNPATLLPLPSGGNHHDCLQILAETHGTRPDLTDQPLPDADLTWYTDGSSFIRNGEREAGAAVTTESEVIWAAPLPPGTSAQRAELIALTQALKMAEGKKLTVYTDSRYAFATTHVHGEIYRRRGWLTSEGKEIKNKNEILALLEALFLPKRLSIIHCPGHQKGDSPQAKGNRLADDTAKKAATETHSSLTVLPAGKRTADGSEFEKRTADGSEFESPKKKAKVE

SEQ ID NO: 1205 - protein, 2100 aa, synthetic construct
MPAAKRVKLDGGDKKYSIGLDIGTNSVGWAVITDEYKVPSKKFKVLGNTDRHSIKKNLIGALLFDSGETAEATRLKRTARRRYTRRKNRICYLQEIFSNEMAKVDDSFFHRLEESFLVEEDKKHERHPIFGNIVDEVAYHEKYPTIYHLRKKLVDSTDKADLRLIYLALAHMIKFRGHFLIEGDLNPDNSDVDKLFIQLVQTYNQLFEENPINASGVDAKAILSARLSKSRRLENLIAQLPGEKKNGLFGNLIALSLGLTPNFKSNFDLAEDAKLQLSKDTYDDDLDNLLAQIGDQYADLFLAAKNLSDAILLSDILRVNTEITKAPLSASMIKRYDEHHQDLTLLKALVRQQLPEKYKEIFFDQSKNGYAGYIDGGASQEEFYKFIKPILEKMDGTEELLVKLNREDLLRKQRTFDNGSIPHQIHLGELHAILRRQEDFYPFLKDNREKIEKILTFRIPYYVGPLARGNSRFAWMTRKSEETITPWNFEEVVDKGASAQSFIERMTNFDKNLPNEKVLPKHSLLYEYFTVYNELTKVKYVTEGMRKPAFLSGEQKKAIVDLLFKTNRKVTVKQLKEDYFKKIECFDSVEISGVEDRFNASLGTYHDLLKIIKDKDFLDNEENEDILEDIVLTLTLFEDREMIEERLKTYAHLFDDKVMKQLKRRRYTGWGRLSRKLINGIRDKQSGKTILDFLKSDGFANRNFMQLIHDDSLTFKEDIQKAQVSGQGDSLHEHIANLAGSPAIKKGILQTVKVVDELVKVMGRHKPENIVIEMARENQTTQKGQKNSRERMKRIEEGIKELGSQILKEHPVENTQLQNEKLYLYYLQNGRDMYVDQELDINRLSDYDVDHIVPQSFLKDDSIDNKVLTRSDKARGKSDNVPSEEVVKKMKNYWRQLLNAKLITQRKFDNLTKAERGGLSELDKAGFIKRQLVETRQITKHVAQILDSRMNTKYDENDKLIREVKVITLKSKLVSDFRKDFQFYKVREINNYHHAHDAYLNAVVGTALIKKYPKLESEFVYGDYKVYDVRKMIAKSEQEIGKATAKYFFYSNIMNFFKTEITLANGEIRKRPLIETNGETGEIVWDKGRDFATVRKVLSMPQVNIVKKTEVQTGGFSKESILPKRNSDKLIARKKDWDPKKYGGFDSPTVAYSVLVVAKVEKGKSKKLKSVKELLGITIMERSSFEKNPIDFLEAKGYKEVKKDLIIKLPKYSLFELENGRKRMLASAGELQKGNELALPSKYVNFLYLASHYEKLKGSPEDNEQKQLFVEQHKHYLDEIIEQISEFSKRVILADANLDKVLSAYNKHRDKPIREQAENIIHLFTLTNLGAPAAFKYFDTTIDRKRYTSTKEVLDATLIHQSITGLYETRIDLSQLGGDGGSGSETPGTSESATPESGGTLQLEEEYRLFEPESTQKQEMDIWLKNFPQAWAETGGMGTAHCQAPVLIQLKATATPISIRQYPMPHEAYQGIKPHIRRMLDQGILKPCQSPWNTPLLPVKKPGTEDYRPVQDLREVNKRVEDIHPTVPNPYNLLSTLPPSHPWYTVLDLKDAFFCLRLHSESQLLFAFEWRDPEIGLSGQLTWTRLPQGFKNSPTLFNEALHSDLADFRVRYPALVLLQYVDDLLLAAATRTECLEGTKALLETLGNKGYRASAKKAQICLQEVTYLGYSLKDGQRWLTKARKEAILSIPVPKNSRQVREFLGKAGYCRLFIPGFAELAAPLYPLTRPGTLFQWGTEQQLAFEDIKKALLSSPALGLPDITKPFELFIDENSGFAKGVLVQKLGPWKRPVAYLSKKLDTVASGWPPCLRMVAAIAILVKDAGKLTLGQPLTILTSHPVEALVRQPPNKWLSNARMTHYQAMLLDAERVHFGPTVSLNPATLLPLPSGGNHHDCLQILAETHGTRPDLTDQPLPDADLTWYTDGSSFIRNGEREAGAAVTTESEVIWAAPLPPGTSAQRAELIALTQALKMAEGKKLTVYTDSRYAFATTHVHGEIYRRRGWLTSEGKEIKNKNEILALLEALFLPKRLSIIHCPGHQKGDSPQAKGNRLADDTAKKAATETHSSLTVLPAGKRTADGSEFEKRTADGSEFESPKKKAKVE

SEQ ID NO: 1206 - protein, 2094 aa, synthetic construct
MPAAKRVKLDGGDKKYSIGLDIGTNSVGWAVITDEYKVPSKKFKVLGNTDRHSIKKNLIGALLFDSGETAEATRLKRTARRRYTRRKNRICYLQEIFSNEMAKVDDSFFHRLEESFLVEEDKKHERHPIFGNIVDEVAYHEKYPTIYHLRKKLVDSTDKADLRLIYLALAHMIKFRGHFLIEGDLNPDNSDVDKLFIQLVQTYNQLFEENPINASGVDAKAILSARLSKSRRLENLIAQLPGEKKNGLFGNLIALSLGLTPNFKSNFDLAEDAKLQLSKDTYDDDLDNLLAQIGDQYADLFLAAKNLSDAILLSDILRVNTEITKAPLSASMIKRYDEHHQDLTLLKALVRQQLPEKYKEIFFDQSKNGYAGYIDGGASQEEFYKFIKPILEKMDGTEELLVKLNREDLLRKQRTFDNGSIPHQIHLGELHAILRRQEDFYPFLKDNREKIEKILTFRIPYYVGPLARGNSRFAWMTRKSEETITPWNFEEVVDKGASAQSFIERMTNFDKNLPNEKVLPKHSLLYEYFTVYNELTKVKYVTEGMRKPAFLSGEQKKAIVDLLFKTNRKVTVKQLKEDYFKKIECFDSVEISGVEDRFNASLGTYHDLLKIIKDKDFLDNEENEDILEDIVLTLTLFEDREMIEERLKTYAHLFDDKVMKQLKRRRYTGWGRLSRKLINGIRDKQSGKTILDFLKSDGFANRNFMQLIHDDSLTFKEDIQKAQVSGQGDSLHEHIANLAGSPAIKKGILQTVKVVDELVKVMGRHKPENIVIEMARENQTTQKGQKNSRERMKRIEEGIKELGSQILKEHPVENTQLQNEKLYLYYLQNGRDMYVDQELDINRLSDYDVDHIVPQSFLKDDSIDNKVLTRSDKARGKSDNVPSEEVVKKMKNYWRQLLNAKLITQRKFDNLTKAERGGLSELDKAGFIKRQLVETRQITKHVAQILDSRMNTKYDENDKLIREVKVITLKSKLVSDFRKDFQFYKVREINNYHHAHDAYLNAVVGTALIKKYPKLESEFVYGDYKVYDVRKMIAKSEQEIGKATAKYFFYSNIMNFFKTEITLANGEIRKRPLIETNGETGEIVWDKGRDFATVRKVLSMPQVNIVKKTEVQTGGFSKESILPKRNSDKLIARKKDWDPKKYGGFDSPTVAYSVLVVAKVEKGKSKKLKSVKELLGITIMERSSFEKNPIDFLEAKGYKEVKKDLIIKLPKYSLFELENGRKRMLASAGELQKGNELALPSKYVNFLYLASHYEKLKGSPEDNEQKQLFVEQHKHYLDEIIEQISEFSKRVILADANLDKVLSAYNKHRDKPIREQAENIIHLFTLTNLGAPAAFKYFDTTIDRKRYTSTKEVLDATLIHQSITGLYETRIDLSQLGGDGGEAAAKEAAAKGGTLQLEEEYRLFEPESTQKQEMDIWLKNFPQAWAETGGMGTAHCQAPVLIQLKATATPISIRQYPMPHEAYQGIKPHIRRMLDQGILKPCQSPWNTPLLPVKKPGTEDYRPVQDLREVNKRVEDIHPTVPNPYNLLSTLPPSHPWYTVLDLKDAFFCLRLHSESQLLFAFEWRDPEIGLSGQLTWTRLPQGFKNSPTLFNEALHSDLADFRVRYPALVLLQYVDDLLLAAATRTECLEGTKALLETLGNKGYRASAKKAQICLQEVTYLGYSLKDGQRWLTKARKEAILSIPVPKNSRQVREFLGKAGYCRLFIPGFAELAAPLYPLTRPGTLFQWGTEQQLAFEDIKKALLSSPALGLPDITKPFELFIDENSGFAKGVLVQKLGPWKRPVAYLSKKLDTVASGWPPCLRMVAAIAILVKDAGKLTLGQPLTILTSHPVEALVRQPPNKWLSNARMTHYQAMLLDAERVHFGPTVSLNPATLLPLPSGGNHHDCLQILAETHGTRPDLTDQPLPDADLTWYTDGSSFIRNGEREAGAAVTTESEVIWAAPLPPGTSAQRAELIALTQALKMAEGKKLTVYTDSRYAFATTHVHGEIYRRRGWLTSEGKEIKNKNEILALLEALFLPKRLSIIHCPGHQKGDSPQAKGNRLADDTAKKAATETHSSLTVLPAGKRTADGSEFEKRTADGSEFESPKKKAKVE

SEQ ID NO: 1207 - protein, 2096 aa, synthetic construct
MPAAKRVKLDGGDKKYSIGLDIGTNSVGWAVITDEYKVPSKKFKVLGNTDRHSIKKNLIGALLFDSGETAEATRLKRTARRRYTRRKNRICYLQEIFSNEMAKVDDSFFHRLEESFLVEEDKKHERHPIFGNIVDEVAYHEKYPTIYHLRKKLVDSTDKADLRLIYLALAHMIKFRGHFLIEGDLNPDNSDVDKLFIQLVQTYNQLFEENPINASGVDAKAILSARLSKSRRLENLIAQLPGEKKNGLFGNLIALSLGLTPNFKSNFDLAEDAKLQLSKDTYDDDLDNLLAQIGDQYADLFLAAKNLSDAILLSDILRVNTEITKAPLSASMIKRYDEHHQDLTLLKALVRQQLPEKYKEIFFDQSKNGYAGYIDGGASQEEFYKFIKPILEKMDGTEELLVKLNREDLLRKQRTFDNGSIPHQIHLGELHAILRRQEDFYPFLKDNREKIEKILTFRIPYYVGPLARGNSRFAWMTRKSEETITPWNFEEVVDKGASAQSFIERMTNFDKNLPNEKVLPKHSLLYEYFTVYNELTKVKYVTEGMRKPAFLSGEQKKAIVDLLFKTNRKVTVKQLKEDYFKKIECFDSVEISGVEDRFNASLGTYHDLLKIIKDKDFLDNEENEDILEDIVLTLTLFEDREMIEERLKTYAHLFDDKVMKQLKRRRYTGWGRLSRKLINGIRDKQSGKTILDFLKSDGFANRNFMQLIHDDSLTFKEDIQKAQVSGQGDSLHEHIANLAGSPAIKKGILQTVKVVDELVKVMGRHKPENIVIEMARENQTTQKGQKNSRERMKRIEEGIKELGSQILKEHPVENTQLQNEKLYLYYLQNGRDMYVDQELDINRLSDYDVDHIVPQSFLKDDSIDNKVLTRSDKARGKSDNVPSEEVVKKMKNYWRQLLNAKLITQRKFDNLTKAERGGLSELDKAGFIKRQLVETRQITKHVAQILDSRMNTKYDENDKLIREVKVITLKSKLVSDFRKDFQFYKVREINNYHHAHDAYLNAVVGTALIKKYPKLESEFVYGDYKVYDVRKMIAKSEQEIGKATAKYFFYSNIMNFFKTEITLANGEIRKRPLIETNGETGEIVWDKGRDFATVRKVLSMPQVNIVKKTEVQTGGFSKESILPKRNSDKLIARKKDWDPKKYGGFDSPTVAYSVLVVAKVEKGKSKKLKSVKELLGITIMERSSFEKNPIDFLEAKGYKEVKKDLIIKLPKYSLFELENGRKRMLASAGELQKGNELALPSKYVNFLYLASHYEKLKGSPEDNEQKQLFVEQHKHYLDEIIEQISEFSKRVILADANLDKVLSAYNKHRDKPIREQAENIIHLFTLTNLGAPAAFKYFDTTIDRKRYTSTKEVLDATLIHQSITGLYETRIDLSQLGGDGGGGSGGSGGSGGSGGTLQLEEEYRLFEPESTQKQEMDIWLKNFPQAWAETGGMGTAHCQAPVLIQLKATATPISIRQYPMPHEAYQGIKPHIRRMLDQGILKPCQSPWNTPLLPVKKPGTEDYRPVQDLREVNKRVEDIHPTVPNPYNLLSTLPPSHPWYTVLDLKDAFFCLRLHSESQLLFAFEWRDPEIGLSGQLTWTRLPQGFKNSPTLFNEALHSDLADFRVRYPALVLLQYVDDLLLAAATRTECLEGTKALLETLGNKGYRASAKKAQICLQEVTYLGYSLKDGQRWLTKARKEAILSIPVPKNSRQVREFLGKAGYCRLFIPGFAELAAPLYPLTRPGTLFQWGTEQQLAFEDIKKALLSSPALGLPDITKPFELFIDENSGFAKGVLVQKLGPWKRPVAYLSKKLDTVASGWPPCLRMVAAIAILVKDAGKLTLGQPLTILTSHPVEALVRQPPNKWLSNARMTHYQAMLLDAERVHFGPTVSLNPATLLPLPSGGNHHDCLQILAETHGTRPDLTDQPLPDADLTWYTDGSSFIRNGEREAGAAVTTESEVIWAAPLPPGTSAQRAELIALTQALKMAEGKKLTVYTDSRYAFATTHVHGEIYRRRGWLTSEGKEIKNKNEILALLEALFLPKRLSIIHCPGHQKGDSPQAKGNRLADDTAKKAATETHSSLTVLPAGKRTADGSEFEKRTADGSEFESPKKKAKVE

SEQ ID NO: 1208 - protein, 2095 aa, synthetic construct
MPAAKRVKLDGGDKKYSIGLDIGTNSVGWAVITDEYKVPSKKFKVLGNTDRHSIKKNLIGALLFDSGETAEATRLKRTARRRYTRRKNRICYLQEIFSNEMAKVDDSFFHRLEESFLVEEDKKHERHPIFGNIVDEVAYHEKYPTIYHLRKKLVDSTDKADLRLIYLALAHMIKFRGHFLIEGDLNPDNSDVDKLFIQLVQTYNQLFEENPINASGVDAKAILSARLSKSRRLENLIAQLPGEKKNGLFGNLIALSLGLTPNFKSNFDLAEDAKLQLSKDTYDDDLDNLLAQIGDQYADLFLAAKNLSDAILLSDILRVNTEITKAPLSASMIKRYDEHHQDLTLLKALVRQQLPEKYKEIFFDQSKNGYAGYIDGGASQEEFYKFIKPILEKMDGTEELLVKLNREDLLRKQRTFDNGSIPHQIHLGELHAILRRQEDFYPFLKDNREKIEKILTFRIPYYVGPLARGNSRFAWMTRKSEETITPWNFEEVVDKGASAQSFIERMTNFDKNLPNEKVLPKHSLLYEYFTVYNELTKVKYVTEGMRKPAFLSGEQKKAIVDLLFKTNRKVTVKQLKEDYFKKIECFDSVEISGVEDRFNASLGTYHDLLKIIKDKDFLDNEENEDILEDIVLTLTLFEDREMIEERLKTYAHLFDDKVMKQLKRRRYTGWGRLSRKLINGIRDKQSGKTILDFLKSDGFANRNFMQLIHDDSLTFKEDIQKAQVSGQGDSLHEHIANLAGSPAIKKGILQTVKVVDELVKVMGRHKPENIVIEMARENQTTQKGQKNSRERMKRIEEGIKELGSQILKEHPVENTQLQNEKLYLYYLQNGRDMYVDQELDINRLSDYDVDHIVPQSFLKDDSIDNKVLTRSDKARGKSDNVPSEEVVKKMKNYWRQLLNAKLITQRKFDNLTKAERGGLSELDKAGFIKRQLVETRQITKHVAQILDSRMNTKYDENDKLIREVKVITLKSKLVSDFRKDFQFYKVREINNYHHAHDAYLNAVVGTALIKKYPKLESEFVYGDYKVYDVRKMIAKSEQEIGKATAKYFFYSNIMNFFKTEITLANGEIRKRPLIETNGETGEIVWDKGRDFATVRKVLSMPQVNIVKKTEVQTGGFSKESILPKRNSDKLIARKKDWDPKKYGGFDSPTVAYSVLVVAKVEKGKSKKLKSVKELLGITIMERSSFEKNPIDFLEAKGYKEVKKDLIIKLPKYSLFELENGRKRMLASAGELQKGNELALPSKYVNFLYLASHYEKLKGSPEDNEQKQLFVEQHKHYLDEIIEQISEFSKRVILADANLDKVLSAYNKHRDKPIREQAENIIHLFTLTNLGAPAAFKYFDTTIDRKRYTSTKEVLDATLIHQSITGLYETRIDLSQLGGDGGPAPEAAAKGSSGGTLQLEEEYRLFEPESTQKQEMDIWLKNFPQAWAETGGMGTAHCQAPVLIQLKATATPISIRQYPMPHEAYQGIKPHIRRMLDQGILKPCQSPWNTPLLPVKKPGTEDYRPVQDLREVNKRVEDIHPTVPNPYNLLSTLPPSHPWYTVLDLKDAFFCLRLHSESQLLFAFEWRDPEIGLSGQLTWTRLPQGFKNSPTLFNEALHSDLADFRVRYPALVLLQYVDDLLLAAATRTECLEGTKALLETLGNKGYRASAKKAQICLQEVTYLGYSLKDGQRWLTKARKEAILSIPVPKNSRQVREFLGKAGYCRLFIPGFAELAAPLYPLTRPGTLFQWGTEQQLAFEDIKKALLSSPALGLPDITKPFELFIDENSGFAKGVLVQKLGPWKRPVAYLSKKLDTVASGWPPCLRMVAAIAILVKDAGKLTLGQPLTILTSHPVEALVRQPPNKWLSNARMTHYQAMLLDAERVHFGPTVSLNPATLLPLPSGGNHHDCLQILAETHGTRPDLTDQPLPDADLTWYTDGSSFIRNGEREAGAAVTTESEVIWAAPLPPGTSAQRAELIALTQALKMAEGKKLTVYTDSRYAFATTHVHGEIYRRRGWLTSEGKEIKNKNEILALLEALFLPKRLSIIHCPGHQKGDSPQAKGNRLADDTAKKAATETHSSLTVLPAGKRTADGSEFEKRTADGSEFESPKKKAKVE

SEQ ID NO: 1209 - protein, 2114 aa, synthetic construct
MPAAKRVKLDGGDKKYSIGLDIGTNSVGWAVITDEYKVPSKKFKVLGNTDRHSIKKNLIGALLFDSGETAEATRLKRTARRRYTRRKNRICYLQEIFSNEMAKVDDSFFHRLEESFLVEEDKKHERHPIFGNIVDEVAYHEKYPTIYHLRKKLVDSTDKADLRLIYLALAHMIKFRGHFLIEGDLNPDNSDVDKLFIQLVQTYNQLFEENPINASGVDAKAILSARLSKSRRLENLIAQLPGEKKNGLFGNLIALSLGLTPNFKSNFDLAEDAKLQLSKDTYDDDLDNLLAQIGDQYADLFLAAKNLSDAILLSDILRVNTEITKAPLSASMIKRYDEHHQDLTLLKALVRQQLPEKYKEIFFDQSKNGYAGYIDGGASQEEFYKFIKPILEKMDGTEELLVKLNREDLLRKQRTFDNGSIPHQIHLGELHAILRRQEDFYPFLKDNREKIEKILTFRIPYYVGPLARGNSRFAWMTRKSEETITPWNFEEVVDKGASAQSFIERMTNFDKNLPNEKVLPKHSLLYEYFTVYNELTKVKYVTEGMRKPAFLSGEQKKAIVDLLFKTNRKVTVKQLKEDYFKKIECFDSVEISGVEDRFNASLGTYHDLLKIIKDKDFLDNEENEDILEDIVLTLTLFEDREMIEERLKTYAHLFDDKVMKQLKRRRYTGWGRLSRKLINGIRDKQSGKTILDFLKSDGFANRNFMQLIHDDSLTFKEDIQKAQVSGQGDSLHEHIANLAGSPAIKKGILQTVKVVDELVKVMGRHKPENIVIEMARENQTTQKGQKNSRERMKRIEEGIKELGSQILKEHPVENTQLQNEKLYLYYLQNGRDMYVDQELDINRLSDYDVDHIVPQSFLKDDSIDNKVLTRSDKARGKSDNVPSEEVVKKMKNYWRQLLNAKLITQRKFDNLTKAERGGLSELDKAGFIKRQLVETRQITKHVAQILDSRMNTKYDENDKLIREVKVITLKSKLVSDFRKDFQFYKVREINNYHHAHDAYLNAVVGTALIKKYPKLESEFVYGDYKVYDVRKMIAKSEQEIGKATAKYFFYSNIMNFFKTEITLANGEIRKRPLIETNGETGEIVWDKGRDFATVRKVLSMPQVNIVKKTEVQTGGFSKESILPKRNSDKLIARKKDWDPKKYGGFDSPTVAYSVLVVAKVEKGKSKKLKSVKELLGITIMERSSFEKNPIDFLEAKGYKEVKKDLIIKLPKYSLFELENGRKRMLASAGELQKGNELALPSKYVNFLYLASHYEKLKGSPEDNEQKQLFVEQHKHYLDEIIEQISEFSKRVILADANLDKVLSAYNKHRDKPIREQAENIIHLFTLTNLGAPAAFKYFDTTIDRKRYTSTKEVLDATLIHQSITGLYETRIDLSQLGGDGGGGGGSGGGGSGGGGSGGGGSGGGGSGGGGSGGTLQLEEEYRLFEPESTQKQEMDIWLKNFPQAWAETGGMGTAHCQAPVLIQLKATATPISIRQYPMPHEAYQGIKPHIRRMLDQGILKPCQSPWNTPLLPVKKPGTEDYRPVQDLREVNKRVEDIHPTVPNPYNLLSTLPPSHPWYTVLDLKDAFFCLRLHSESQLLFAFEWRDPEIGLSGQLTWTRLPQGFKNSPTLFNEALHSDLADFRVRYPALVLLQYVDDLLLAAATRTECLEGTKALLETLGNKGYRASAKKAQICLQEVTYLGYSLKDGQRWLTKARKEAILSIPVPKNSRQVREFLGKAGYCRLFIPGFAELAAPLYPLTRPGTLFQWGTEQQLAFEDIKKALLSSPALGLPDITKPFELFIDENSGFAKGVLVQKLGPWKRPVAYLSKKLDTVASGWPPCLRMVAAIAILVKDAGKLTLGQPLTILTSHPVEALVRQPPNKWLSNARMTHYQAMLLDAERVHFGPTVSLNPATLLPLPSGGNHHDCLQILAETHGTRPDLTDQPLPDADLTWYTDGSSFIRNGEREAGAAVTTESEVIWAAPLPPGTSAQRAELIALTQALKMAEGKKLTVYTDSRYAFATTHVHGEIYRRRGWLTSEGKEIKNKNEILALLEALFLPKRLSIIHCPGHQKGDSPQAKGNRLADDTAKKAATETHSSLTVLPAGKRTADGSEFEKRTADGSEFESPKKKAKVE

SEQ ID NO: 1210 - protein, 2095 aa, synthetic construct
MPAAKRVKLDGGDKKYSIGLDIGTNSVGWAVITDEYKVPSKKFKVLGNTDRHSIKKNLIGALLFDSGETAEATRLKRTARRRYTRRKNRICYLQEIFSNEMAKVDDSFFHRLEESFLVEEDKKHERHPIFGNIVDEVAYHEKYPTIYHLRKKLVDSTDKADLRLIYLALAHMIKFRGHFLIEGDLNPDNSDVDKLFIQLVQTYNQLFEENPINASGVDAKAILSARLSKSRRLENLIAQLPGEKKNGLFGNLIALSLGLTPNFKSNFDLAEDAKLQLSKDTYDDDLDNLLAQIGDQYADLFLAAKNLSDAILLSDILRVNTEITKAPLSASMIKRYDEHHQDLTLLKALVRQQLPEKYKEIFFDQSKNGYAGYIDGGASQEEFYKFIKPILEKMDGTEELLVKLNREDLLRKQRTFDNGSIPHQIHLGELHAILRRQEDFYPFLKDNREKIEKILTFRIPYYVGPLARGNSRFAWMTRKSEETITPWNFEEVVDKGASAQSFIERMTNFDKNLPNEKVLPKHSLLYEYFTVYNELTKVKYVTEGMRKPAFLSGEQKKAIVDLLFKTNRKVTVKQLKEDYFKKIECFDSVEISGVEDRFNASLGTYHDLLKIIKDKDFLDNEENEDILEDIVLTLTLFEDREMIEERLKTYAHLFDDKVMKQLKRRRYTGWGRLSRKLINGIRDKQSGKTILDFLKSDGFANRNFMQLIHDDSLTFKEDIQKAQVSGQGDSLHEHIANLAGSPAIKKGILQTVKVVDELVKVMGRHKPENIVIEMARENQTTQKGQKNSRERMKRIEEGIKELGSQILKEHPVENTQLQNEKLYLYYLQNGRDMYVDQELDINRLSDYDVDHIVPQSFLKDDSIDNKVLTRSDKARGKSDNVPSEEVVKKMKNYWRQLLNAKLITQRKFDNLTKAERGGLSELDKAGFIKRQLVETRQITKHVAQILDSRMNTKYDENDKLIREVKVITLKSKLVSDFRKDFQFYKVREINNYHHAHDAYLNAVVGTALIKKYPKLESEFVYGDYKVYDVRKMIAKSEQEIGKATAKYFFYSNIMNFFKTEITLANGEIRKRPLIETNGETGEIVWDKGRDFATVRKVLSMPQVNIVKKTEVQTGGFSKESILPKRNSDKLIARKKDWDPKKYGGFDSPTVAYSVLVVAKVEKGKSKKLKSVKELLGITIMERSSFEKNPIDFLEAKGYKEVKKDLIIKLPKYSLFELENGRKRMLASAGELQKGNELALPSKYVNFLYLASHYEKLKGSPEDNEQKQLFVEQHKHYLDEIIEQISEFSKRVILADANLDKVLSAYNKHRDKPIREQAENIIHLFTLTNLGAPAAFKYFDTTIDRKRYTSTKEVLDATLIHQSITGLYETRIDLSQLGGDGGEAAAKGSSGGGGGTLQLEEEYRLFEPESTQKQEMDIWLKNFPQAWAETGGMGTAHCQAPVLIQLKATATPISIRQYPMPHEAYQGIKPHIRRMLDQGILKPCQSPWNTPLLPVKKPGTEDYRPVQDLREVNKRVEDIHPTVPNPYNLLSTLPPSHPWYTVLDLKDAFFCLRLHSESQLLFAFEWRDPEIGLSGQLTWTRLPQGFKNSPTLFNEALHSDLADFRVRYPALVLLQYVDDLLLAAATRTECLEGTKALLETLGNKGYRASAKKAQICLQEVTYLGYSLKDGQRWLTKARKEAILSIPVPKNSRQVREFLGKAGYCRLFIPGFAELAAPLYPLTRPGTLFQWGTEQQLAFEDIKKALLSSPALGLPDITKPFELFIDENSGFAKGVLVQKLGPWKRPVAYLSKKLDTVASGWPPCLRMVAAIAILVKDAGKLTLGQPLTILTSHPVEALVRQPPNKWLSNARMTHYQAMLLDAERVHFGPTVSLNPATLLPLPSGGNHHDCLQILAETHGTRPDLTDQPLPDADLTWYTDGSSFIRNGEREAGAAVTTESEVIWAAPLPPGTSAQRAELIALTQALKMAEGKKLTVYTDSRYAFATTHVHGEIYRRRGWLTSEGKEIKNKNEILALLEALFLPKRLSIIHCPGHQKGDSPQAKGNRLADDTAKKAATETHSSLTVLPAGKRTADGSEFEKRTADGSEFESPKKKAKVE

SEQ ID NO: 1211 - protein, 2090 aa, synthetic construct
MPAAKRVKLDGGDKKYSIGLDIGTNSVGWAVITDEYKVPSKKFKVLGNTDRHSIKKNLIGALLFDSGETAEATRLKRTARRRYTRRKNRICYLQEIFSNEMAKVDDSFFHRLEESFLVEEDKKHERHPIFGNIVDEVAYHEKYPTIYHLRKKLVDSTDKADLRLIYLALAHMIKFRGHFLIEGDLNPDNSDVDKLFIQLVQTYNQLFEENPINASGVDAKAILSARLSKSRRLENLIAQLPGEKKNGLFGNLIALSLGLTPNFKSNFDLAEDAKLQLSKDTYDDDLDNLLAQIGDQYADLFLAAKNLSDAILLSDILRVNTEITKAPLSASMIKRYDEHHQDLTLLKALVRQQLPEKYKEIFFDQSKNGYAGYIDGGASQEEFYKFIKPILEKMDGTEELLVKLNREDLLRKQRTFDNGSIPHQIHLGELHAILRRQEDFYPFLKDNREKIEKILTFRIPYYVGPLARGNSRFAWMTRKSEETITPWNFEEVVDKGASAQSFIERMTNFDKNLPNEKVLPKHSLLYEYFTVYNELTKVKYVTEGMRKPAFLSGEQKKAIVDLLFKTNRKVTVKQLKEDYFKKIECFDSVEISGVEDRFNASLGTYHDLLKIIKDKDFLDNEENEDILEDIVLTLTLFEDREMIEERLKTYAHLFDDKVMKQLKRRRYTGWGRLSRKLINGIRDKQSGKTILDFLKSDGFANRNFMQLIHDDSLTFKEDIQKAQVSGQGDSLHEHIANLAGSPAIKKGILQTVKVVDELVKVMGRHKPENIVIEMARENQTTQKGQKNSRERMKRIEEGIKELGSQILKEHPVENTQLQNEKLYLYYLQNGRDMYVDQELDINRLSDYDVDHIVPQSFLKDDSIDNKVLTRSDKARGKSDNVPSEEVVKKMKNYWRQLLNAKLITQRKFDNLTKAERGGLSELDKAGFIKRQLVETRQITKHVAQILDSRMNTKYDENDKLIREVKVITLKSKLVSDFRKDFQFYKVREINNYHHAHDAYLNAVVGTALIKKYPKLESEFVYGDYKVYDVRKMIAKSEQEIGKATAKYFFYSNIMNFFKTEITLANGEIRKRPLIETNGETGEIVWDKGRDFATVRKVLSMPQVNIVKKTEVQTGGFSKESILPKRNSDKLIARKKDWDPKKYGGFDSPTVAYSVLVVAKVEKGKSKKLKSVKELLGITIMERSSFEKNPIDFLEAKGYKEVKKDLIIKLPKYSLFELENGRKRMLASAGELQKGNELALPSKYVNFLYLASHYEKLKGSPEDNEQKQLFVEQHKHYLDEIIEQISEFSKRVILADANLDKVLSAYNKHRDKPIREQAENIIHLFTLTNLGAPAAFKYFDTTIDRKRYTSTKEVLDATLIHQSITGLYETRIDLSQLGGDGGGGGGGGGGTLQLEEEYRLFEPESTQKQEMDIWLKNFPQAWAETGGMGTAHCQAPVLIQLKATATPISIRQYPMPHEAYQGIKPHIRRMLDQGILKPCQSPWNTPLLPVKKPGTEDYRPVQDLREVNKRVEDIHPTVPNPYNLLSTLPPSHPWYTVLDLKDAFFCLRLHSESQLLFAFEWRDPEIGLSGQLTWTRLPQGFKNSPTLFNEALHSDLADFRVRYPALVLLQYVDDLLLAAATRTECLEGTKALLETLGNKGYRASAKKAQICLQEVTYLGYSLKDGQRWLTKARKEAILSIPVPKNSRQVREFLGKAGYCRLFIPGFAELAAPLYPLTRPGTLFQWGTEQQLAFEDIKKALLSSPALGLPDITKPFELFIDENSGFAKGVLVQKLGPWKRPVAYLSKKLDTVASGWPPCLRMVAAIAILVKDAGKLTLGQPLTILTSHPVEALVRQPPNKWLSNARMTHYQAMLLDAERVHFGPTVSLNPATLLPLPSGGNHHDCLQILAETHGTRPDLTDQPLPDADLTWYTDGSSFIRNGEREAGAAVTTESEVIWAAPLPPGTSAQRAELIALTQALKMAEGKKLTVYTDSRYAFATTHVHGEIYRRRGWLTSEGKEIKNKNEILALLEALFLPKRLSIIHCPGHQKGDSPQAKGNRLADDTAKKAATETHSSLTVLPAGKRTADGSEFEKRTADGSEFESPKKKAKVE

SEQ ID NO: 1212 - protein, 2102 aa, synthetic construct
MPAAKRVKLDGGDKKYSIGLDIGTNSVGWAVITDEYKVPSKKFKVLGNTDRHSIKKNLIGALLFDSGETAEATRLKRTARRRYTRRKNRICYLQEIFSNEMAKVDDSFFHRLEESFLVEEDKKHERHPIFGNIVDEVAYHEKYPTIYHLRKKLVDSTDKADLRLIYLALAHMIKFRGHFLIEGDLNPDNSDVDKLFIQLVQTYNQLFEENPINASGVDAKAILSARLSKSRRLENLIAQLPGEKKNGLFGNLIALSLGLTPNFKSNFDLAEDAKLQLSKDTYDDDLDNLLAQIGDQYADLFLAAKNLSDAILLSDILRVNTEITKAPLSASMIKRYDEHHQDLTLLKALVRQQLPEKYKEIFFDQSKNGYAGYIDGGASQEEFYKFIKPILEKMDGTEELLVKLNREDLLRKQRTFDNGSIPHQIHLGELHAILRRQEDFYPFLKDNREKIEKILTFRIPYYVGPLARGNSRFAWMTRKSEETITPWNFEEVVDKGASAQSFIERMTNFDKNLPNEKVLPKHSLLYEYFTVYNELTKVKYVTEGMRKPAFLSGEQKKAIVDLLFKTNRKVTVKQLKEDYFKKIECFDSVEISGVEDRFNASLGTYHDLLKIIKDKDFLDNEENEDILEDIVLTLTLFEDREMIEERLKTYAHLFDDKVMKQLKRRRYTGWGRLSRKLINGIRDKQSGKTILDFLKSDGFANRNFMQLIHDDSLTFKEDIQKAQVSGQGDSLHEHIANLAGSPAIKKGILQTVKVVDELVKVMGRHKPENIVIEMARENQTTQKGQKNSRERMKRIEEGIKELGSQILKEHPVENTQLQNEKLYLYYLQNGRDMYVDQELDINRLSDYDVDHIVPQSFLKDDSIDNKVLTRSDKARGKSDNVPSEEVVKKMKNYWRQLLNAKLITQRKFDNLTKAERGGLSELDKAGFIKRQLVETRQITKHVAQILDSRMNTKYDENDKLIREVKVITLKSKLVSDFRKDFQFYKVREINNYHHAHDAYLNAVVGTALIKKYPKLESEFVYGDYKVYDVRKMIAKSEQEIGKATAKYFFYSNIMNFFKTEITLANGEIRKRPLIETNGETGEIVWDKGRDFATVRKVLSMPQVNIVKKTEVQTGGFSKESILPKRNSDKLIARKKDWDPKKYGGFDSPTVAYSVLVVAKVEKGKSKKLKSVKELLGITIMERSSFEKNPIDFLEAKGYKEVKKDLIIKLPKYSLFELENGRKRMLASAGELQKGNELALPSKYVNFLYLASHYEKLKGSPEDNEQKQLFVEQHKHYLDEIIEQISEFSKRVILADANLDKVLSAYNKHRDKPIREQAENIIHLFTLTNLGAPAAFKYFDTTIDRKRYTSTKEVLDATLIHQSITGLYETRIDLSQLGGDGGGSSGSSGSSGSSGSSGSSGGTLQLEEEYRLFEPESTQKQEMDIWLKNFPQAWAETGGMGTAHCQAPVLIQLKATATPISIRQYPMPHEAYQGIKPHIRRMLDQGILKPCQSPWNTPLLPVKKPGTEDYRPVQDLREVNKRVEDIHPTVPNPYNLLSTLPPSHPWYTVLDLKDAFFCLRLHSESQLLFAFEWRDPEIGLSGQLTWTRLPQGFKNSPTLFNEALHSDLADFRVRYPALVLLQYVDDLLLAAATRTECLEGTKALLETLGNKGYRASAKKAQICLQEVTYLGYSLKDGQRWLTKARKEAILSIPVPKNSRQVREFLGKAGYCRLFIPGFAELAAPLYPLTRPGTLFQWGTEQQLAFEDIKKALLSSPALGLPDITKPFELFIDENSGFAKGVLVQKLGPWKRPVAYLSKKLDTVASGWPPCLRMVAAIAILVKDAGKLTLGQPLTILTSHPVEALVRQPPNKWLSNARMTHYQAMLLDAERVHFGPTVSLNPATLLPLPSGGNHHDCLQILAETHGTRPDLTDQPLPDADLTWYTDGSSFIRNGEREAGAAVTTESEVIWAAPLPPGTSAQRAELIALTQALKMAEGKKLTVYTDSRYAFATTHVHGEIYRRRGWLTSEGKEIKNKNEILALLEALFLPKRLSIIHCPGHQKGDSPQAKGNRLADDTAKKAATETHSSLTVLPAGKRTADGSEFEKRTADGSEFESPKKKAKVE

SEQ ID NO: 1213 - protein, 2099 aa, synthetic construct
MPAAKRVKLDGGDKKYSIGLDIGTNSVGWAVITDEYKVPSKKFKVLGNTDRHSIKKNLIGALLFDSGETAEATRLKRTARRRYTRRKNRICYLQEIFSNEMAKVDDSFFHRLEESFLVEEDKKHERHPIFGNIVDEVAYHEKYPTIYHLRKKLVDSTDKADLRLIYLALAHMIKFRGHFLIEGDLNPDNSDVDKLFIQLVQTYNQLFEENPINASGVDAKAILSARLSKSRRLENLIAQLPGEKKNGLFGNLIALSLGLTPNFKSNFDLAEDAKLQLSKDTYDDDLDNLLAQIGDQYADLFLAAKNLSDAILLSDILRVNTEITKAPLSASMIKRYDEHHQDLTLLKALVRQQLPEKYKEIFFDQSKNGYAGYIDGGASQEEFYKFIKPILEKMDGTEELLVKLNREDLLRKQRTFDNGSIPHQIHLGELHAILRRQEDFYPFLKDNREKIEKILTFRIPYYVGPLARGNSRFAWMTRKSEETITPWNFEEVVDKGASAQSFIERMTNFDKNLPNEKVLPKHSLLYEYFTVYNELTKVKYVTEGMRKPAFLSGEQKKAIVDLLFKTNRKVTVKQLKEDYFKKIECFDSVEISGVEDRFNASLGTYHDLLKIIKDKDFLDNEENEDILEDIVLTLTLFEDREMIEERLKTYAHLFDDKVMKQLKRRRYTGWGRLSRKLINGIRDKQSGKTILDFLKSDGFANRNFMQLIHDDSLTFKEDIQKAQVSGQGDSLHEHIANLAGSPAIKKGILQTVKVVDELVKVMGRHKPENIVIEMARENQTTQKGQKNSRERMKRIEEGIKELGSQILKEHPVENTQLQNEKLYLYYLQNGRDMYVDQELDINRLSDYDVDHIVPQSFLKDDSIDNKVLTRSDKARGKSDNVPSEEVVKKMKNYWRQLLNAKLITQRKFDNLTKAERGGLSELDKAGFIKRQLVETRQITKHVAQILDSRMNTKYDENDKLIREVKVITLKSKLVSDFRKDFQFYKVREINNYHHAHDAYLNAVVGTALIKKYPKLESEFVYGDYKVYDVRKMIAKSEQEIGKATAKYFFYSNIMNFFKTEITLANGEIRKRPLIETNGETGEIVWDKGRDFATVRKVLSMPQVNIVKKTEVQTGGFSKESILPKRNSDKLIARKKDWDPKKYGGFDSPTVAYSVLVVAKVEKGKSKKLKSVKELLGITIMERSSFEKNPIDFLEAKGYKEVKKDLIIKLPKYSLFELENGRKRMLASAGELQKGNELALPSKYVNFLYLASHYEKLKGSPEDNEQKQLFVEQHKHYLDEIIEQISEFSKRVILADANLDKVLSAYNKHRDKPIREQAENIIHLFTLTNLGAPAAFKYFDTTIDRKRYTSTKEVLDATLIHQSITGLYETRIDLSQLGGDGGEAAAKEAAAKEAAAKGGTLQLEEEYRLFEPESTQKQEMDIWLKNFPQAWAETGGMGTAHCQAPVLIQLKATATPISIRQYPMPHEAYQGIKPHIRRMLDQGILKPCQSPWNTPLLPVKKPGTEDYRPVQDLREVNKRVEDIHPTVPNPYNLLSTLPPSHPWYTVLDLKDAFFCLRLHSESQLLFAFEWRDPEIGLSGQLTWTRLPQGFKNSPTLFNEALHSDLADFRVRYPALVLLQYVDDLLLAAATRTECLEGTKALLETLGNKGYRASAKKAQICLQEVTYLGYSLKDGQRWLTKARKEAILSIPVPKNSRQVREFLGKAGYCRLFIPGFAELAAPLYPLTRPGTLFQWGTEQQLAFEDIKKALLSSPALGLPDITKPFELFIDENSGFAKGVLVQKLGPWKRPVAYLSKKLDTVASGWPPCLRMVAAIAILVKDAGKLTLGQPLTILTSHPVEALVRQPPNKWLSNARMTHYQAMLLDAERVHFGPTVSLNPATLLPLPSGGNHHDCLQILAETHGTRPDLTDQPLPDADLTWYTDGSSFIRNGEREAGAAVTTESEVIWAAPLPPGTSAQRAELIALTQALKMAEGKKLTVYTDSRYAFATTHVHGEIYRRRGWLTSEGKEIKNKNEILALLEALFLPKRLSIIHCPGHQKGDSPQAKGNRLADDTAKKAATETHSSLTVLPAGKRTADGSEFEKRTADGSEFESPKKKAKVE

SEQ ID NO: 1214 - protein, 2095 aa, synthetic construct
MPAAKRVKLDGGDKKYSIGLDIGTNSVGWAVITDEYKVPSKKFKVLGNTDRHSIKKNLIGALLFDSGETAEATRLKRTARRRYTRRKNRICYLQEIFSNEMAKVDDSFFHRLEESFLVEEDKKHERHPIFGNIVDEVAYHEKYPTIYHLRKKLVDSTDKADLRLIYLALAHMIKFRGHFLIEGDLNPDNSDVDKLFIQLVQTYNQLFEENPINASGVDAKAILSARLSKSRRLENLIAQLPGEKKNGLFGNLIALSLGLTPNFKSNFDLAEDAKLQLSKDTYDDDLDNLLAQIGDQYADLFLAAKNLSDAILLSDILRVNTEITKAPLSASMIKRYDEHHQDLTLLKALVRQQLPEKYKEIFFDQSKNGYAGYIDGGASQEEFYKFIKPILEKMDGTEELLVKLNREDLLRKQRTFDNGSIPHQIHLGELHAILRRQEDFYPFLKDNREKIEKILTFRIPYYVGPLARGNSRFAWMTRKSEETITPWNFEEVVDKGASAQSFIERMTNFDKNLPNEKVLPKHSLLYEYFTVYNELTKVKYVTEGMRKPAFLSGEQKKAIVDLLFKTNRKVTVKQLKEDYFKKIECFDSVEISGVEDRFNASLGTYHDLLKIIKDKDFLDNEENEDILEDIVLTLTLFEDREMIEERLKTYAHLFDDKVMKQLKRRRYTGWGRLSRKLINGIRDKQSGKTILDFLKSDGFANRNFMQLIHDDSLTFKEDIQKAQVSGQGDSLHEHIANLAGSPAIKKGILQTVKVVDELVKVMGRHKPENIVIEMARENQTTQKGQKNSRERMKRIEEGIKELGSQILKEHPVENTQLQNEKLYLYYLQNGRDMYVDQELDINRLSDYDVDHIVPQSFLKDDSIDNKVLTRSDKARGKSDNVPSEEVVKKMKNYWRQLLNAKLITQRKFDNLTKAERGGLSELDKAGFIKRQLVETRQITKHVAQILDSRMNTKYDENDKLIREVKVITLKSKLVSDFRKDFQFYKVREINNYHHAHDAYLNAVVGTALIKKYPKLESEFVYGDYKVYDVRKMIAKSEQEIGKATAKYFFYSNIMNFFKTEITLANGEIRKRPLIETNGETGEIVWDKGRDFATVRKVLSMPQVNIVKKTEVQTGGFSKESILPKRNSDKLIARKKDWDPKKYGGFDSPTVAYSVLVVAKVEKGKSKKLKSVKELLGITIMERSSFEKNPIDFLEAKGYKEVKKDLIIKLPKYSLFELENGRKRMLASAGELQKGNELALPSKYVNFLYLASHYEKLKGSPEDNEQKQLFVEQHKHYLDEIIEQISEFSKRVILADANLDKVLSAYNKHRDKPIREQAENIIHLFTLTNLGAPAAFKYFDTTIDRKRYTSTKEVLDATLIHQSITGLYETRIDLSQLGGDGGPAPGSSEAAAKGGTLQLEEEYRLFEPESTQKQEMDIWLKNFPQAWAETGGMGTAHCQAPVLIQLKATATPISIRQYPMPHEAYQGIKPHIRRMLDQGILKPCQSPWNTPLLPVKKPGTEDYRPVQDLREVNKRVEDIHPTVPNPYNLLSTLPPSHPWYTVLDLKDAFFCLRLHSESQLLFAFEWRDPEIGLSGQLTWTRLPQGFKNSPTLFNEALHSDLADFRVRYPALVLLQYVDDLLLAAATRTECLEGTKALLETLGNKGYRASAKKAQICLQEVTYLGYSLKDGQRWLTKARKEAILSIPVPKNSRQVREFLGKAGYCRLFIPGFAELAAPLYPLTRPGTLFQWGTEQQLAFEDIKKALLSSPALGLPDITKPFELFIDENSGFAKGVLVQKLGPWKRPVAYLSKKLDTVASGWPPCLRMVAAIAILVKDAGKLTLGQPLTILTSHPVEALVRQPPNKWLSNARMTHYQAMLLDAERVHFGPTVSLNPATLLPLPSGGNHHDCLQILAETHGTRPDLTDQPLPDADLTWYTDGSSFIRNGEREAGAAVTTESEVIWAAPLPPGTSAQRAELIALTQALKMAEGKKLTVYTDSRYAFATTHVHGEIYRRRGWLTSEGKEIKNKNEILALLEALFLPKRLSIIHCPGHQKGDSPQAKGNRLADDTAKKAATETHSSLTVLPAGKRTADGSEFEKRTADGSEFESPKKKAKVE

SEQ ID NO: 1215 - protein, 2092 aa, synthetic construct
MPAAKRVKLDGGDKKYSIGLDIGTNSVGWAVITDEYKVPSKKFKVLGNTDRHSIKKNLIGALLFDSGETAEATRLKRTARRRYTRRKNRICYLQEIFSNEMAKVDDSFFHRLEESFLVEEDKKHERHPIFGNIVDEVAYHEKYPTIYHLRKKLVDSTDKADLRLIYLALAHMIKFRGHFLIEGDLNPDNSDVDKLFIQLVQTYNQLFEENPINASGVDAKAILSARLSKSRRLENLIAQLPGEKKNGLFGNLIALSLGLTPNFKSNFDLAEDAKLQLSKDTYDDDLDNLLAQIGDQYADLFLAAKNLSDAILLSDILRVNTEITKAPLSASMIKRYDEHHQDLTLLKALVRQQLPEKYKEIFFDQSKNGYAGYIDGGASQEEFYKFIKPILEKMDGTEELLVKLNREDLLRKQRTFDNGSIPHQIHLGELHAILRRQEDFYPFLKDNREKIEKILTFRIPYYVGPLARGNSRFAWMTRKSEETITPWNFEEVVDKGASAQSFIERMTNFDKNLPNEKVLPKHSLLYEYFTVYNELTKVKYVTEGMRKPAFLSGEQKKAIVDLLFKTNRKVTVKQLKEDYFKKIECFDSVEISGVEDRFNASLGTYHDLLKIIKDKDFLDNEENEDILEDIVLTLTLFEDREMIEERLKTYAHLFDDKVMKQLKRRRYTGWGRLSRKLINGIRDKQSGKTILDFLKSDGFANRNFMQLIHDDSLTFKEDIQKAQVSGQGDSLHEHIANLAGSPAIKKGILQTVKVVDELVKVMGRHKPENIVIEMARENQTTQKGQKNSRERMKRIEEGIKELGSQILKEHPVENTQLQNEKLYLYYLQNGRDMYVDQELDINRLSDYDVDHIVPQSFLKDDSIDNKVLTRSDKARGKSDNVPSEEVVKKMKNYWRQLLNAKLITQRKFDNLTKAERGGLSELDKAGFIKRQLVETRQITKHVAQILDSRMNTKYDENDKLIREVKVITLKSKLVSDFRKDFQFYKVREINNYHHAHDAYLNAVVGTALIKKYPKLESEFVYGDYKVYDVRKMIAKSEQEIGKATAKYFFYSNIMNFFKTEITLANGEIRKRPLIETNGETGEIVWDKGRDFATVRKVLSMPQVNIVKKTEVQTGGFSKESILPKRNSDKLIARKKDWDPKKYGGFDSPTVAYSVLVVAKVEKGKSKKLKSVKELLGITIMERSSFEKNPIDFLEAKGYKEVKKDLIIKLPKYSLFELENGRKRMLASAGELQKGNELALPSKYVNFLYLASHYEKLKGSPEDNEQKQLFVEQHKHYLDEIIEQISEFSKRVILADANLDKVLSAYNKHRDKPIREQAENIIHLFTLTNLGAPAAFKYFDTTIDRKRYTSTKEVLDATLIHQSITGLYETRIDLSQLGGDGGGGGGGGGGGGTLQLEEEYRLFEPESTQKQEMDIWLKNFPQAWAETGGMGTAHCQAPVLIQLKATATPISIRQYPMPHEAYQGIKPHIRRMLDQGILKPCQSPWNTPLLPVKKPGTEDYRPVQDLREVNKRVEDIHPTVPNPYNLLSTLPPSHPWYTVLDLKDAFFCLRLHSESQLLFAFEWRDPEIGLSGQLTWTRLPQGFKNSPTLFNEALHSDLADFRVRYPALVLLQYVDDLLLAAATRTECLEGTKALLETLGNKGYRASAKKAQICLQEVTYLGYSLKDGQRWLTKARKEAILSIPVPKNSRQVREFLGKAGYCRLFIPGFAELAAPLYPLTRPGTLFQWGTEQQLAFEDIKKALLSSPALGLPDITKPFELFIDENSGFAKGVLVQKLGPWKRPVAYLSKKLDTVASGWPPCLRMVAAIAILVKDAGKLTLGQPLTILTSHPVEALVRQPPNKWLSNARMTHYQAMLLDAERVHFGPTVSLNPATLLPLPSGGNHHDCLQILAETHGTRPDLTDQPLPDADLTWYTDGSSFIRNGEREAGAAVTTESEVIWAAPLPPGTSAQRAELIALTQALKMAEGKKLTVYTDSRYAFATTHVHGEIYRRRGWLTSEGKEIKNKNEILALLEALFLPKRLSIIHCPGHQKGDSPQAKGNRLADDTAKKAATETHSSLTVLPAGKRTADGSEFEKRTADGSEFESPKKKAKVE

SEQ ID NO: 1216 - protein, 2093 aa, synthetic construct
MPAAKRVKLDGGDKKYSIGLDIGTNSVGWAVITDEYKVPSKKFKVLGNTDRHSIKKNLIGALLFDSGETAEATRLKRTARRRYTRRKNRICYLQEIFSNEMAKVDDSFFHRLEESFLVEEDKKHERHPIFGNIVDEVAYHEKYPTIYHLRKKLVDSTDKADLRLIYLALAHMIKFRGHFLIEGDLNPDNSDVDKLFIQLVQTYNQLFEENPINASGVDAKAILSARLSKSRRLENLIAQLPGEKKNGLFGNLIALSLGLTPNFKSNFDLAEDAKLQLSKDTYDDDLDNLLAQIGDQYADLFLAAKNLSDAILLSDILRVNTEITKAPLSASMIKRYDEHHQDLTLLKALVRQQLPEKYKEIFFDQSKNGYAGYIDGGASQEEFYKFIKPILEKMDGTEELLVKLNREDLLRKQRTFDNGSIPHQIHLGELHAILRRQEDFYPFLKDNREKIEKILTFRIPYYVGPLARGNSRFAWMTRKSEETITPWNFEEVVDKGASAQSFIERMTNFDKNLPNEKVLPKHSLLYEYFTVYNELTKVKYVTEGMRKPAFLSGEQKKAIVDLLFKTNRKVTVKQLKEDYFKKIECFDSVEISGVEDRFNASLGTYHDLLKIIKDKDFLDNEENEDILEDIVLTLTLFEDREMIEERLKTYAHLFDDKVMKQLKRRRYTGWGRLSRKLINGIRDKQSGKTILDFLKSDGFANRNFMQLIHDDSLTFKEDIQKAQVSGQGDSLHEHIANLAGSPAIKKGILQTVKVVDELVKVMGRHKPENIVIEMARENQTTQKGQKNSRERMKRIEEGIKELGSQILKEHPVENTQLQNEKLYLYYLQNGRDMYVDQELDINRLSDYDVDHIVPQSFLKDDSIDNKVLTRSDKARGKSDNVPSEEVVKKMKNYWRQLLNAKLITQRKFDNLTKAERGGLSELDKAGFIKRQLVETRQITKHVAQILDSRMNTKYDENDKLIREVKVITLKSKLVSDFRKDFQFYKVREINNYHHAHDAYLNAVVGTALIKKYPKLESEFVYGDYKVYDVRKMIAKSEQEIGKATAKYFFYSNIMNFFKTEITLANGEIRKRPLIETNGETGEIVWDKGRDFATVRKVLSMPQVNIVKKTEVQTGGFSKESILPKRNSDKLIARKKDWDPKKYGGFDSPTVAYSVLVVAKVEKGKSKKLKSVKELLGITIMERSSFEKNPIDFLEAKGYKEVKKDLIIKLPKYSLFELENGRKRMLASAGELQKGNELALPSKYVNFLYLASHYEKLKGSPEDNEQKQLFVEQHKHYLDEIIEQISEFSKRVILADANLDKVLSAYNKHRDKPIREQAENIIHLFTLTNLGAPAAFKYFDTTIDRKRYTSTKEVLDATLIHQSITGLYETRIDLSQLGGDGGPAPAPAPAPGGTLQLEEEYRLFEPESTQKQEMDIWLKNFPQAWAETGGMGTAHCQAPVLIQLKATATPISIRQYPMPHEAYQGIKPHIRRMLDQGILKPCQSPWNTPLLPVKKPGTEDYRPVQDLREVNKRVEDIHPTVPNPYNLLSTLPPSHPWYTVLDLKDAFFCLRLHSESQLLFAFEWRDPEIGLSGQLTWTRLPQGFKNSPTLFNEALHSDLADFRVRYPALVLLQYVDDLLLAAATRTECLEGTKALLETLGNKGYRASAKKAQICLQEVTYLGYSLKDGQRWLTKARKEAILSIPVPKNSRQVREFLGKAGYCRLFIPGFAELAAPLYPLTRPGTLFQWGTEQQLAFEDIKKALLSSPALGLPDITKPFELFIDENSGFAKGVLVQKLGPWKRPVAYLSKKLDTVASGWPPCLRMVAAIAILVKDAGKLTLGQPLTILTSHPVEALVRQPPNKWLSNARMTHYQAMLLDAERVHFGPTVSLNPATLLPLPSGGNHHDCLQILAETHGTRPDLTDQPLPDADLTWYTDGSSFIRNGEREAGAAVTTESEVIWAAPLPPGTSAQRAELIALTQALKMAEGKKLTVYTDSRYAFATTHVHGEIYRRRGWLTSEGKEIKNKNEILALLEALFLPKRLSIIHCPGHQKGDSPQAKGNRLADDTAKKAATETHSSLTVLPAGKRTADGSEFEKRTADGSEFESPKKKAKVE

SEQ ID NO: 1217 - protein, 2089 aa, synthetic construct
MPAAKRVKLDGGDKKYSIGLDIGTNSVGWAVITDEYKVPSKKFKVLGNTDRHSIKKNLIGALLFDSGETAEATRLKRTARRRYTRRKNRICYLQEIFSNEMAKVDDSFFHRLEESFLVEEDKKHERHPIFGNIVDEVAYHEKYPTIYHLRKKLVDSTDKADLRLIYLALAHMIKFRGHFLIEGDLNPDNSDVDKLFIQLVQTYNQLFEENPINASGVDAKAILSARLSKSRRLENLIAQLPGEKKNGLFGNLIALSLGLTPNFKSNFDLAEDAKLQLSKDTYDDDLDNLLAQIGDQYADLFLAAKNLSDAILLSDILRVNTEITKAPLSASMIKRYDEHHQDLTLLKALVRQQLPEKYKEIFFDQSKNGYAGYIDGGASQEEFYKFIKPILEKMDGTEELLVKLNREDLLRKQRTFDNGSIPHQIHLGELHAILRRQEDFYPFLKDNREKIEKILTFRIPYYVGPLARGNSRFAWMTRKSEETITPWNFEEVVDKGASAQSFIERMTNFDKNLPNEKVLPKHSLLYEYFTVYNELTKVKYVTEGMRKPAFLSGEQKKAIVDLLFKTNRKVTVKQLKEDYFKKIECFDSVEISGVEDRFNASLGTYHDLLKIIKDKDFLDNEENEDILEDIVLTLTLFEDREMIEERLKTYAHLFDDKVMKQLKRRRYTGWGRLSRKLINGIRDKQSGKTILDFLKSDGFANRNFMQLIHDDSLTFKEDIQKAQVSGQGDSLHEHIANLAGSPAIKKGILQTVKVVDELVKVMGRHKPENIVIEMARENQTTQKGQKNSRERMKRIEEGIKELGSQILKEHPVENTQLQNEKLYLYYLQNGRDMYVDQELDINRLSDYDVDHIVPQSFLKDDSIDNKVLTRSDKARGKSDNVPSEEVVKKMKNYWRQLLNAKLITQRKFDNLTKAERGGLSELDKAGFIKRQLVETRQITKHVAQILDSRMNTKYDENDKLIREVKVITLKSKLVSDFRKDFQFYKVREINNYHHAHDAYLNAVVGTALIKKYPKLESEFVYGDYKVYDVRKMIAKSEQEIGKATAKYFFYSNIMNFFKTEITLANGEIRKRPLIETNGETGEIVWDKGRDFATVRKVLSMPQVNIVKKTEVQTGGFSKESILPKRNSDKLIARKKDWDPKKYGGFDSPTVAYSVLVVAKVEKGKSKKLKSVKELLGITIMERSSFEKNPIDFLEAKGYKEVKKDLIIKLPKYSLFELENGRKRMLASAGELQKGNELALPSKYVNFLYLASHYEKLKGSPEDNEQKQLFVEQHKHYLDEIIEQISEFSKRVILADANLDKVLSAYNKHRDKPIREQAENIIHLFTLTNLGAPAAFKYFDTTIDRKRYTSTKEVLDATLIHQSITGLYETRIDLSQLGGDGGGGGGGGGTLQLEEEYRLFEPESTQKQEMDIWLKNFPQAWAETGGMGTAHCQAPVLIQLKATATPISIRQYPMPHEAYQGIKPHIRRMLDQGILKPCQSPWNTPLLPVKKPGTEDYRPVQDLREVNKRVEDIHPTVPNPYNLLSTLPPSHPWYTVLDLKDAFFCLRLHSESQLLFAFEWRDPEIGLSGQLTWTRLPQGFKNSPTLFNEALHSDLADFRVRYPALVLLQYVDDLLLAAATRTECLEGTKALLETLGNKGYRASAKKAQICLQEVTYLGYSLKDGQRWLTKARKEAILSIPVPKNSRQVREFLGKAGYCRLFIPGFAELAAPLYPLTRPGTLFQWGTEQQLAFEDIKKALLSSPALGLPDITKPFELFIDENSGFAKGVLVQKLGPWKRPVAYLSKKLDTVASGWPPCLRMVAAIAILVKDAGKLTLGQPLTILTSHPVEALVRQPPNKWLSNARMTHYQAMLLDAERVHFGPTVSLNPATLLPLPSGGNHHDCLQILAETHGTRPDLTDQPLPDADLTWYTDGSSFIRNGEREAGAAVTTESEVIWAAPLPPGTSAQRAELIALTQALKMAEGKKLTVYTDSRYAFATTHVHGEIYRRRGWLTSEGKEIKNKNEILALLEALFLPKRLSIIHCPGHQKGDSPQAKGNRLADDTAKKAATETHSSLTVLPAGKRTADGSEFEKRTADGSEFESPKKKAKVE

SEQ ID NO: 1218 - protein, 2095 aa, synthetic construct
MPAAKRVKLDGGDKKYSIGLDIGTNSVGWAVITDEYKVPSKKFKVLGNTDRHSIKKNLIGALLFDSGETAEATRLKRTARRRYTRRKNRICYLQEIFSNEMAKVDDSFFHRLEESFLVEEDKKHERHPIFGNIVDEVAYHEKYPTIYHLRKKLVDSTDKADLRLIYLALAHMIKFRGHFLIEGDLNPDNSDVDKLFIQLVQTYNQLFEENPINASGVDAKAILSARLSKSRRLENLIAQLPGEKKNGLFGNLIALSLGLTPNFKSNFDLAEDAKLQLSKDTYDDDLDNLLAQIGDQYADLFLAAKNLSDAILLSDILRVNTEITKAPLSASMIKRYDEHHQDLTLLKALVRQQLPEKYKEIFFDQSKNGYAGYIDGGASQEEFYKFIKPILEKMDGTEELLVKLNREDLLRKQRTFDNGSIPHQIHLGELHAILRRQEDFYPFLKDNREKIEKILTFRIPYYVGPLARGNSRFAWMTRKSEETITPWNFEEVVDKGASAQSFIERMTNFDKNLPNEKVLPKHSLLYEYFTVYNELTKVKYVTEGMRKPAFLSGEQKKAIVDLLFKTNRKVTVKQLKEDYFKKIECFDSVEISGVEDRFNASLGTYHDLLKIIKDKDFLDNEENEDILEDIVLTLTLFEDREMIEERLKTYAHLFDDKVMKQLKRRRYTGWGRLSRKLINGIRDKQSGKTILDFLKSDGFANRNFMQLIHDDSLTFKEDIQKAQVSGQGDSLHEHIANLAGSPAIKKGILQTVKVVDELVKVMGRHKPENIVIEMARENQTTQKGQKNSRERMKRIEEGIKELGSQILKEHPVENTQLQNEKLYLYYLQNGRDMYVDQELDINRLSDYDVDHIVPQSFLKDDSIDNKVLTRSDKARGKSDNVPSEEVVKKMKNYWRQLLNAKLITQRKFDNLTKAERGGLSELDKAGFIKRQLVETRQITKHVAQILDSRMNTKYDENDKLIREVKVITLKSKLVSDFRKDFQFYKVREINNYHHAHDAYLNAVVGTALIKKYPKLESEFVYGDYKVYDVRKMIAKSEQEIGKATAKYFFYSNIMNFFKTEITLANGEIRKRPLIETNGETGEIVWDKGRDFATVRKVLSMPQVNIVKKTEVQTGGFSKESILPKRNSDKLIARKKDWDPKKYGGFDSPTVAYSVLVVAKVEKGKSKKLKSVKELLGITIMERSSFEKNPIDFLEAKGYKEVKKDLIIKLPKYSLFELENGRKRMLASAGELQKGNELALPSKYVNFLYLASHYEKLKGSPEDNEQKQLFVEQHKHYLDEIIEQISEFSKRVILADANLDKVLSAYNKHRDKPIREQAENIIHLFTLTNLGAPAAFKYFDTTIDRKRYTSTKEVLDATLIHQSITGLYETRIDLSQLGGDGGGSSEAAAKPAPGGTLQLEEEYRLFEPESTQKQEMDIWLKNFPQAWAETGGMGTAHCQAPVLIQLKATATPISIRQYPMPHEAYQGIKPHIRRMLDQGILKPCQSPWNTPLLPVKKPGTEDYRPVQDLREVNKRVEDIHPTVPNPYNLLSTLPPSHPWYTVLDLKDAFFCLRLHSESQLLFAFEWRDPEIGLSGQLTWTRLPQGFKNSPTLFNEALHSDLADFRVRYPALVLLQYVDDLLLAAATRTECLEGTKALLETLGNKGYRASAKKAQICLQEVTYLGYSLKDGQRWLTKARKEAILSIPVPKNSRQVREFLGKAGYCRLFIPGFAELAAPLYPLTRPGTLFQWGTEQQLAFEDIKKALLSSPALGLPDITKPFELFIDENSGFAKGVLVQKLGPWKRPVAYLSKKLDTVASGWPPCLRMVAAIAILVKDAGKLTLGQPLTILTSHPVEALVRQPPNKWLSNARMTHYQAMLLDAERVHFGPTVSLNPATLLPLPSGGNHHDCLQILAETHGTRPDLTDQPLPDADLTWYTDGSSFIRNGEREAGAAVTTESEVIWAAPLPPGTSAQRAELIALTQALKMAEGKKLTVYTDSRYAFATTHVHGEIYRRRGWLTSEGKEIKNKNEILALLEALFLPKRLSIIHCPGHQKGDSPQAKGNRLADDTAKKAATETHSSLTVLPAGKRTADGSEFEKRTADGSEFESPKKKAKVE

SEQ ID NO: 1219 - protein, 2097 aa, synthetic construct
MPAAKRVKLDGGDKKYSIGLDIGTNSVGWAVITDEYKVPSKKFKVLGNTDRHSIKKNLIGALLFDSGETAEATRLKRTARRRYTRRKNRICYLQEIFSNEMAKVDDSFFHRLEESFLVEEDKKHERHPIFGNIVDEVAYHEKYPTIYHLRKKLVDSTDKADLRLIYLALAHMIKFRGHFLIEGDLNPDNSDVDKLFIQLVQTYNQLFEENPINASGVDAKAILSARLSKSRRLENLIAQLPGEKKNGLFGNLIALSLGLTPNFKSNFDLAEDAKLQLSKDTYDDDLDNLLAQIGDQYADLFLAAKNLSDAILLSDILRVNTEITKAPLSASMIKRYDEHHQDLTLLKALVRQQLPEKYKEIFFDQSKNGYAGYIDGGASQEEFYKFIKPILEKMDGTEELLVKLNREDLLRKQRTFDNGSIPHQIHLGELHAILRRQEDFYPFLKDNREKIEKILTFRIPYYVGPLARGNSRFAWMTRKSEETITPWNFEEVVDKGASAQSFIERMTNFDKNLPNEKVLPKHSLLYEYFTVYNELTKVKYVTEGMRKPAFLSGEQKKAIVDLLFKTNRKVTVKQLKEDYFKKIECFDSVEISGVEDRFNASLGTYHDLLKIIKDKDFLDNEENEDILEDIVLTLTLFEDREMIEERLKTYAHLFDDKVMKQLKRRRYTGWGRLSRKLINGIRDKQSGKTILDFLKSDGFANRNFMQLIHDDSLTFKEDIQKAQVSGQGDSLHEHIANLAGSPAIKKGILQTVKVVDELVKVMGRHKPENIVIEMARENQTTQKGQKNSRERMKRIEEGIKELGSQILKEHPVENTQLQNEKLYLYYLQNGRDMYVDQELDINRLSDYDVDHIVPQSFLKDDSIDNKVLTRSDKARGKSDNVPSEEVVKKMKNYWRQLLNAKLITQRKFDNLTKAERGGLSELDKAGFIKRQLVETRQITKHVAQILDSRMNTKYDENDKLIREVKVITLKSKLVSDFRKDFQFYKVREINNYHHAHDAYLNAVVGTALIKKYPKLESEFVYGDYKVYDVRKMIAKSEQEIGKATAKYFFYSNIMNFFKTEITLANGEIRKRPLIETNGETGEIVWDKGRDFATVRKVLSMPQVNIVKKTEVQTGGFSKESILPKRNSDKLIARKKDWDPKKYGGFDSPTVAYSVLVVAKVEKGKSKKLKSVKELLGITIMERSSFEKNPIDFLEAKGYKEVKKDLIIKLPKYSLFELENGRKRMLASAGELQKGNELALPSKYVNFLYLASHYEKLKGSPEDNEQKQLFVEQHKHYLDEIIEQISEFSKRVILADANLDKVLSAYNKHRDKPIREQAENIIHLFTLTNLGAPAAFKYFDTTIDRKRYTSTKEVLDATLIHQSITGLYETRIDLSQLGGDGGPAPAPAPAPAPAPGGTLQLEEEYRLFEPESTQKQEMDIWLKNFPQAWAETGGMGTAHCQAPVLIQLKATATPISIRQYPMPHEAYQGIKPHIRRMLDQGILKPCQSPWNTPLLPVKKPGTEDYRPVQDLREVNKRVEDIHPTVPNPYNLLSTLPPSHPWYTVLDLKDAFFCLRLHSESQLLFAFEWRDPEIGLSGQLTWTRLPQGFKNSPTLFNEALHSDLADFRVRYPALVLLQYVDDLLLAAATRTECLEGTKALLETLGNKGYRASAKKAQICLQEVTYLGYSLKDGQRWLTKARKEAILSIPVPKNSRQVREFLGKAGYCRLFIPGFAELAAPLYPLTRPGTLFQWGTEQQLAFEDIKKALLSSPALGLPDITKPFELFIDENSGFAKGVLVQKLGPWKRPVAYLSKKLDTVASGWPPCLRMVAAIAILVKDAGKLTLGQPLTILTSHPVEALVRQPPNKWLSNARMTHYQAMLLDAERVHFGPTVSLNPATLLPLPSGGNHHDCLQILAETHGTRPDLTDQPLPDADLTWYTDGSSFIRNGEREAGAAVTTESEVIWAAPLPPGTSAQRAELIALTQALKMAEGKKLTVYTDSRYAFATTHVHGEIYRRRGWLTSEGKEIKNKNEILALLEALFLPKRLSIIHCPGHQKGDSPQAKGNRLADDTAKKAATETHSSLTVLPAGKRTADGSEFEKRTADGSEFESPKKKAKVE

SEQ ID NO: 1220 - protein, 2095 aa, synthetic construct
MPAAKRVKLDGGDKKYSIGLDIGTNSVGWAVITDEYKVPSKKFKVLGNTDRHSIKKNLIGALLFDSGETAEATRLKRTARRRYTRRKNRICYLQEIFSNEMAKVDDSFFHRLEESFLVEEDKKHERHPIFGNIVDEVAYHEKYPTIYHLRKKLVDSTDKADLRLIYLALAHMIKFRGHFLIEGDLNPDNSDVDKLFIQLVQTYNQLFEENPINASGVDAKAILSARLSKSRRLENLIAQLPGEKKNGLFGNLIALSLGLTPNFKSNFDLAEDAKLQLSKDTYDDDLDNLLAQIGDQYADLFLAAKNLSDAILLSDILRVNTEITKAPLSASMIKRYDEHHQDLTLLKALVRQQLPEKYKEIFFDQSKNGYAGYIDGGASQEEFYKFIKPILEKMDGTEELLVKLNREDLLRKQRTFDNGSIPHQIHLGELHAILRRQEDFYPFLKDNREKIEKILTFRIPYYVGPLARGNSRFAWMTRKSEETITPWNFEEVVDKGASAQSFIERMTNFDKNLPNEKVLPKHSLLYEYFTVYNELTKVKYVTEGMRKPAFLSGEQKKAIVDLLFKTNRKVTVKQLKEDYFKKIECFDSVEISGVEDRFNASLGTYHDLLKIIKDKDFLDNEENEDILEDIVLTLTLFEDREMIEERLKTYAHLFDDKVMKQLKRRRYTGWGRLSRKLINGIRDKQSGKTILDFLKSDGFANRNFMQLIHDDSLTFKEDIQKAQVSGQGDSLHEHIANLAGSPAIKKGILQTVKVVDELVKVMGRHKPENIVIEMARENQTTQKGQKNSRERMKRIEEGIKELGSQILKEHPVENTQLQNEKLYLYYLQNGRDMYVDQELDINRLSDYDVDHIVPQSFLKDDSIDNKVLTRSDKARGKSDNVPSEEVVKKMKNYWRQLLNAKLITQRKFDNLTKAERGGLSELDKAGFIKRQLVETRQITKHVAQILDSRMNTKYDENDKLIREVKVITLKSKLVSDFRKDFQFYKVREINNYHHAHDAYLNAVVGTALIKKYPKLESEFVYGDYKVYDVRKMIAKSEQEIGKATAKYFFYSNIMNFFKTEITLANGEIRKRPLIETNGETGEIVWDKGRDFATVRKVLSMPQVNIVKKTEVQTGGFSKESILPKRNSDKLIARKKDWDPKKYGGFDSPTVAYSVLVVAKVEKGKSKKLKSVKELLGITIMERSSFEKNPIDFLEAKGYKEVKKDLIIKLPKYSLFELENGRKRMLASAGELQKGNELALPSKYVNFLYLASHYEKLKGSPEDNEQKQLFVEQHKHYLDEIIEQISEFSKRVILADANLDKVLSAYNKHRDKPIREQAENIIHLFTLTNLGAPAAFKYFDTTIDRKRYTSTKEVLDATLIHQSITGLYETRIDLSQLGGDGGGGSGSSEAAAKGGTLQLEEEYRLFEPESTQKQEMDIWLKNFPQAWAETGGMGTAHCQAPVLIQLKATATPISIRQYPMPHEAYQGIKPHIRRMLDQGILKPCQSPWNTPLLPVKKPGTEDYRPVQDLREVNKRVEDIHPTVPNPYNLLSTLPPSHPWYTVLDLKDAFFCLRLHSESQLLFAFEWRDPEIGLSGQLTWTRLPQGFKNSPTLFNEALHSDLADFRVRYPALVLLQYVDDLLLAAATRTECLEGTKALLETLGNKGYRASAKKAQICLQEVTYLGYSLKDGQRWLTKARKEAILSIPVPKNSRQVREFLGKAGYCRLFIPGFAELAAPLYPLTRPGTLFQWGTEQQLAFEDIKKALLSSPALGLPDITKPFELFIDENSGFAKGVLVQKLGPWKRPVAYLSKKLDTVASGWPPCLRMVAAIAILVKDAGKLTLGQPLTILTSHPVEALVRQPPNKWLSNARMTHYQAMLLDAERVHFGPTVSLNPATLLPLPSGGNHHDCLQILAETHGTRPDLTDQPLPDADLTWYTDGSSFIRNGEREAGAAVTTESEVIWAAPLPPGTSAQRAELIALTQALKMAEGKKLTVYTDSRYAFATTHVHGEIYRRRGWLTSEGKEIKNKNEILALLEALFLPKRLSIIHCPGHQKGDSPQAKGNRLADDTAKKAATETHSSLTVLPAGKRTADGSEFEKRTADGSEFESPKKKAKVE

SEQ ID NO: 1221 - protein, 2095 aa, synthetic construct
MPAAKRVKLDGGDKKYSIGLDIGTNSVGWAVITDEYKVPSKKFKVLGNTDRHSIKKNLIGALLFDSGETAEATRLKRTARRRYTRRKNRICYLQEIFSNEMAKVDDSFFHRLEESFLVEEDKKHERHPIFGNIVDEVAYHEKYPTIYHLRKKLVDSTDKADLRLIYLALAHMIKFRGHFLIEGDLNPDNSDVDKLFIQLVQTYNQLFEENPINASGVDAKAILSARLSKSRRLENLIAQLPGEKKNGLFGNLIALSLGLTPNFKSNFDLAEDAKLQLSKDTYDDDLDNLLAQIGDQYADLFLAAKNLSDAILLSDILRVNTEITKAPLSASMIKRYDEHHQDLTLLKALVRQQLPEKYKEIFFDQSKNGYAGYIDGGASQEEFYKFIKPILEKMDGTEELLVKLNREDLLRKQRTFDNGSIPHQIHLGELHAILRRQEDFYPFLKDNREKIEKILTFRIPYYVGPLARGNSRFAWMTRKSEETITPWNFEEVVDKGASAQSFIERMTNFDKNLPNEKVLPKHSLLYEYFTVYNELTKVKYVTEGMRKPAFLSGEQKKAIVDLLFKTNRKVTVKQLKEDYFKKIECFDSVEISGVEDRFNASLGTYHDLLKIIKDKDFLDNEENEDILEDIVLTLTLFEDREMIEERLKTYAHLFDDKVMKQLKRRRYTGWGRLSRKLINGIRDKQSGKTILDFLKSDGFANRNFMQLIHDDSLTFKEDIQKAQVSGQGDSLHEHIANLAGSPAIKKGILQTVKVVDELVKVMGRHKPENIVIEMARENQTTQKGQKNSRERMKRIEEGIKELGSQILKEHPVENTQLQNEKLYLYYLQNGRDMYVDQELDINRLSDYDVDHIVPQSFLKDDSIDNKVLTRSDKARGKSDNVPSEEVVKKMKNYWRQLLNAKLITQRKFDNLTKAERGGLSELDKAGFIKRQLVETRQITKHVAQILDSRMNTKYDENDKLIREVKVITLKSKLVSDFRKDFQFYKVREINNYHHAHDAYLNAVVGTALIKKYPKLESEFVYGDYKVYDVRKMIAKSEQEIGKATAKYFFYSNIMNFFKTEITLANGEIRKRPLIETNGETGEIVWDKGRDFATVRKVLSMPQVNIVKKTEVQTGGFSKESILPKRNSDKLIARKKDWDPKKYGGFDSPTVAYSVLVVAKVEKGKSKKLKSVKELLGITIMERSSFEKNPIDFLEAKGYKEVKKDLIIKLPKYSLFELENGRKRMLASAGELQKGNELALPSKYVNFLYLASHYEKLKGSPEDNEQKQLFVEQHKHYLDEIIEQISEFSKRVILADANLDKVLSAYNKHRDKPIREQAENIIHLFTLTNLGAPAAFKYFDTTIDRKRYTSTKEVLDATLIHQSITGLYETRIDLSQLGGDGGGGGPAPEAAAKGGTLQLEEEYRLFEPESTQKQEMDIWLKNFPQAWAETGGMGTAHCQAPVLIQLKATATPISIRQYPMPHEAYQGIKPHIRRMLDQGILKPCQSPWNTPLLPVKKPGTEDYRPVQDLREVNKRVEDIHPTVPNPYNLLSTLPPSHPWYTVLDLKDAFFCLRLHSESQLLFAFEWRDPEIGLSGQLTWTRLPQGFKNSPTLFNEALHSDLADFRVRYPALVLLQYVDDLLLAAATRTECLEGTKALLETLGNKGYRASAKKAQICLQEVTYLGYSLKDGQRWLTKARKEAILSIPVPKNSRQVREFLGKAGYCRLFIPGFAELAAPLYPLTRPGTLFQWGTEQQLAFEDIKKALLSSPALGLPDITKPFELFIDENSGFAKGVLVQKLGPWKRPVAYLSKKLDTVASGWPPCLRMVAAIAILVKDAGKLTLGQPLTILTSHPVEALVRQPPNKWLSNARMTHYQAMLLDAERVHFGPTVSLNPATLLPLPSGGNHHDCLQILAETHGTRPDLTDQPLPDADLTWYTDGSSFIRNGEREAGAAVTTESEVIWAAPLPPGTSAQRAELIALTQALKMAEGKKLTVYTDSRYAFATTHVHGEIYRRRGWLTSEGKEIKNKNEILALLEALFLPKRLSIIHCPGHQKGDSPQAKGNRLADDTAKKAATETHSSLTVLPAGKRTADGSEFEKRTADGSEFESPKKKAKVE

SEQ ID NO: 1222 - protein, 2117 aa, synthetic construct
MPAAKRVKLDGGDKKYSIGLDIGTNSVGWAVITDEYKVPSKKFKVLGNTDRHSIKKNLIGALLFDSGETAEATRLKRTARRRYTRRKNRICYLQEIFSNEMAKVDDSFFHRLEESFLVEEDKKHERHPIFGNIVDEVAYHEKYPTIYHLRKKLVDSTDKADLRLIYLALAHMIKFRGHFLIEGDLNPDNSDVDKLFIQLVQTYNQLFEENPINASGVDAKAILSARLSKSRRLENLIAQLPGEKKNGLFGNLIALSLGLTPNFKSNFDLAEDAKLQLSKDTYDDDLDNLLAQIGDQYADLFLAAKNLSDAILLSDILRVNTEITKAPLSASMIKRYDEHHQDLTLLKALVRQQLPEKYKEIFFDQSKNGYAGYIDGGASQEEFYKFIKPILEKMDGTEELLVKLNREDLLRKQRTFDNGSIPHQIHLGELHAILRRQEDFYPFLKDNREKIEKILTFRIPYYVGPLARGNSRFAWMTRKSEETITPWNFEEVVDKGASAQSFIERMTNFDKNLPNEKVLPKHSLLYEYFTVYNELTKVKYVTEGMRKPAFLSGEQKKAIVDLLFKTNRKVTVKQLKEDYFKKIECFDSVEISGVEDRFNASLGTYHDLLKIIKDKDFLDNEENEDILEDIVLTLTLFEDREMIEERLKTYAHLFDDKVMKQLKRRRYTGWGRLSRKLINGIRDKQSGKTILDFLKSDGFANRNFMQLIHDDSLTFKEDIQKAQVSGQGDSLHEHIANLAGSPAIKKGILQTVKVVDELVKVMGRHKPENIVIEMARENQTTQKGQKNSRERMKRIEEGIKELGSQILKEHPVENTQLQNEKLYLYYLQNGRDMYVDQELDINRLSDYDVDHIVPQSFLKDDSIDNKVLTRSDKARGKSDNVPSEEVVKKMKNYWRQLLNAKLITQRKFDNLTKAERGGLSELDKAGFIKRQLVETRQITKHVAQILDSRMNTKYDENDKLIREVKVITLKSKLVSDFRKDFQFYKVREINNYHHAHDAYLNAVVGTALIKKYPKLESEFVYGDYKVYDVRKMIAKSEQEIGKATAKYFFYSNIMNFFKTEITLANGEIRKRPLIETNGETGEIVWDKGRDFATVRKVLSMPQVNIVKKTEVQTGGFSKESILPKRNSDKLIARKKDWDPKKYGGFDSPTVAYSVLVVAKVEKGKSKKLKSVKELLGITIMERSSFEKNPIDFLEAKGYKEVKKDLIIKLPKYSLFELENGRKRMLASAGELQKGNELALPSKYVNFLYLASHYEKLKGSPEDNEQKQLFVEQHKHYLDEIIEQISEFSKRVILADANLDKVLSAYNKHRDKPIREQAENIIHLFTLTNLGAPAAFKYFDTTIDRKRYTSTKEVLDATLIHQSITGLYETRIDLSQLGGDGGSGGSSGGSSGSETPGTSESATPESSGGSSGGSSGGTLQLEEEYRLFEPESTQKQEMDIWLKNFPQAWAETGGMGTAHCQAPVLIQLKATATPISIRQYPMPHEAYQGIKPHIRRMLDQGILKPCQSPWNTPLLPVKKPGTEDYRPVQDLREVNKRVEDIHPTVPNPYNLLSTLPPSHPWYTVLDLKDAFFCLRLHSESQLLFAFEWRDPEIGLSGQLTWTRLPQGFKNSPTLFNEALHSDLADFRVRYPALVLLQYVDDLLLAAATRTECLEGTKALLETLGNKGYRASAKKAQICLQEVTYLGYSLKDGQRWLTKARKEAILSIPVPKNSRQVREFLGKAGYCRLFIPGFAELAAPLYPLTRPGTLFQWGTEQQLAFEDIKKALLSSPALGLPDITKPFELFIDENSGFAKGVLVQKLGPWKRPVAYLSKKLDTVASGWPPCLRMVAAIAILVKDAGKLTLGQPLTILTSHPVEALVRQPPNKWLSNARMTHYQAMLLDAERVHFGPTVSLNPATLLPLPSGGNHHDCLQILAETHGTRPDLTDQPLPDADLTWYTDGSSFIRNGEREAGAAVTTESEVIWAAPLPPGTSAQRAELIALTQALKMAEGKKLTVYTDSRYAFATTHVHGEIYRRRGWLTSEGKEIKNKNEILALLEALFLPKRLSIIHCPGHQKGDSPQAKGNRLADDTAKKAATETHSSLTVLPAGKRTADGSEFEKRTADGSEFESPKKKAKVE

SEQ ID NO: 1223 - protein, 2087 aa, synthetic construct
MPAAKRVKLDGGDKKYSIGLDIGTNSVGWAVITDEYKVPSKKFKVLGNTDRHSIKKNLIGALLFDSGETAEATRLKRTARRRYTRRKNRICYLQEIFSNEMAKVDDSFFHRLEESFLVEEDKKHERHPIFGNIVDEVAYHEKYPTIYHLRKKLVDSTDKADLRLIYLALAHMIKFRGHFLIEGDLNPDNSDVDKLFIQLVQTYNQLFEENPINASGVDAKAILSARLSKSRRLENLIAQLPGEKKNGLFGNLIALSLGLTPNFKSNFDLAEDAKLQLSKDTYDDDLDNLLAQIGDQYADLFLAAKNLSDAILLSDILRVNTEITKAPLSASMIKRYDEHHQDLTLLKALVRQQLPEKYKEIFFDQSKNGYAGYIDGGASQEEFYKFIKPILEKMDGTEELLVKLNREDLLRKQRTFDNGSIPHQIHLGELHAILRRQEDFYPFLKDNREKIEKILTFRIPYYVGPLARGNSRFAWMTRKSEETITPWNFEEVVDKGASAQSFIERMTNFDKNLPNEKVLPKHSLLYEYFTVYNELTKVKYVTEGMRKPAFLSGEQKKAIVDLLFKTNRKVTVKQLKEDYFKKIECFDSVEISGVEDRFNASLGTYHDLLKIIKDKDFLDNEENEDILEDIVLTLTLFEDREMIEERLKTYAHLFDDKVMKQLKRRRYTGWGRLSRKLINGIRDKQSGKTILDFLKSDGFANRNFMQLIHDDSLTFKEDIQKAQVSGQGDSLHEHIANLAGSPAIKKGILQTVKVVDELVKVMGRHKPENIVIEMARENQTTQKGQKNSRERMKRIEEGIKELGSQILKEHPVENTQLQNEKLYLYYLQNGRDMYVDQELDINRLSDYDVDHIVPQSFLKDDSIDNKVLTRSDKARGKSDNVPSEEVVKKMKNYWRQLLNAKLITQRKFDNLTKAERGGLSELDKAGFIKRQLVETRQITKHVAQILDSRMNTKYDENDKLIREVKVITLKSKLVSDFRKDFQFYKVREINNYHHAHDAYLNAVVGTALIKKYPKLESEFVYGDYKVYDVRKMIAKSEQEIGKATAKYFFYSNIMNFFKTEITLANGEIRKRPLIETNGETGEIVWDKGRDFATVRKVLSMPQVNIVKKTEVQTGGFSKESILPKRNSDKLIARKKDWDPKKYGGFDSPTVAYSVLVVAKVEKGKSKKLKSVKELLGITIMERSSFEKNPIDFLEAKGYKEVKKDLIIKLPKYSLFELENGRKRMLASAGELQKGNELALPSKYVNFLYLASHYEKLKGSPEDNEQKQLFVEQHKHYLDEIIEQISEFSKRVILADANLDKVLSAYNKHRDKPIREQAENIIHLFTLTNLGAPAAFKYFDTTIDRKRYTSTKEVLDATLIHQSITGLYETRIDLSQLGGDGGPAPGGTLQLEEEYRLFEPESTQKQEMDIWLKNFPQAWAETGGMGTAHCQAPVLIQLKATATPISIRQYPMPHEAYQGIKPHIRRMLDQGILKPCQSPWNTPLLPVKKPGTEDYRPVQDLREVNKRVEDIHPTVPNPYNLLSTLPPSHPWYTVLDLKDAFFCLRLHSESQLLFAFEWRDPEIGLSGQLTWTRLPQGFKNSPTLFNEALHSDLADFRVRYPALVLLQYVDDLLLAAATRTECLEGTKALLETLGNKGYRASAKKAQICLQEVTYLGYSLKDGQRWLTKARKEAILSIPVPKNSRQVREFLGKAGYCRLFIPGFAELAAPLYPLTRPGTLFQWGTEQQLAFEDIKKALLSSPALGLPDITKPFELFIDENSGFAKGVLVQKLGPWKRPVAYLSKKLDTVASGWPPCLRMVAAIAILVKDAGKLTLGQPLTILTSHPVEALVRQPPNKWLSNARMTHYQAMLLDAERVHFGPTVSLNPATLLPLPSGGNHHDCLQILAETHGTRPDLTDQPLPDADLTWYTDGSSFIRNGEREAGAAVTTESEVIWAAPLPPGTSAQRAELIALTQALKMAEGKKLTVYTDSRYAFATTHVHGEIYRRRGWLTSEGKEIKNKNEILALLEALFLPKRLSIIHCPGHQKGDSPQAKGNRLADDTAKKAATETHSSLTVLPAGKRTADGSEFEKRTADGSEFESPKKKAKVE

SEQ ID NO: 1224 - protein, 2093 aa, synthetic construct
MPAAKRVKLDGGDKKYSIGLDIGTNSVGWAVITDEYKVPSKKFKVLGNTDRHSIKKNLIGALLFDSGETAEATRLKRTARRRYTRRKNRICYLQEIFSNEMAKVDDSFFHRLEESFLVEEDKKHERHPIFGNIVDEVAYHEKYPTIYHLRKKLVDSTDKADLRLIYLALAHMIKFRGHFLIEGDLNPDNSDVDKLFIQLVQTYNQLFEENPINASGVDAKAILSARLSKSRRLENLIAQLPGEKKNGLFGNLIALSLGLTPNFKSNFDLAEDAKLQLSKDTYDDDLDNLLAQIGDQYADLFLAAKNLSDAILLSDILRVNTEITKAPLSASMIKRYDEHHQDLTLLKALVRQQLPEKYKEIFFDQSKNGYAGYIDGGASQEEFYKFIKPILEKMDGTEELLVKLNREDLLRKQRTFDNGSIPHQIHLGELHAILRRQEDFYPFLKDNREKIEKILTFRIPYYVGPLARGNSRFAWMTRKSEETITPWNFEEVVDKGASAQSFIERMTNFDKNLPNEKVLPKHSLLYEYFTVYNELTKVKYVTEGMRKPAFLSGEQKKAIVDLLFKTNRKVTVKQLKEDYFKKIECFDSVEISGVEDRFNASLGTYHDLLKIIKDKDFLDNEENEDILEDIVLTLTLFEDREMIEERLKTYAHLFDDKVMKQLKRRRYTGWGRLSRKLINGIRDKQSGKTILDFLKSDGFANRNFMQLIHDDSLTFKEDIQKAQVSGQGDSLHEHIANLAGSPAIKKGILQTVKVVDELVKVMGRHKPENIVIEMARENQTTQKGQKNSRERMKRIEEGIKELGSQILKEHPVENTQLQNEKLYLYYLQNGRDMYVDQELDINRLSDYDVDHIVPQSFLKDDSIDNKVLTRSDKARGKSDNVPSEEVVKKMKNYWRQLLNAKLITQRKFDNLTKAERGGLSELDKAGFIKRQLVETRQITKHVAQILDSRMNTKYDENDKLIREVKVITLKSKLVSDFRKDFQFYKVREINNYHHAHDAYLNAVVGTALIKKYPKLESEFVYGDYKVYDVRKMIAKSEQEIGKATAKYFFYSNIMNFFKTEITLANGEIRKRPLIETNGETGEIVWDKGRDFATVRKVLSMPQVNIVKKTEVQTGGFSKESILPKRNSDKLIARKKDWDPKKYGGFDSPTVAYSVLVVAKVEKGKSKKLKSVKELLGITIMERSSFEKNPIDFLEAKGYKEVKKDLIIKLPKYSLFELENGRKRMLASAGELQKGNELALPSKYVNFLYLASHYEKLKGSPEDNEQKQLFVEQHKHYLDEIIEQISEFSKRVILADANLDKVLSAYNKHRDKPIREQAENIIHLFTLTNLGAPAAFKYFDTTIDRKRYTSTKEVLDATLIHQSITGLYETRIDLSQLGGDGGGSSPAPGGGGGTLQLEEEYRLFEPESTQKQEMDIWLKNFPQAWAETGGMGTAHCQAPVLIQLKATATPISIRQYPMPHEAYQGIKPHIRRMLDQGILKPCQSPWNTPLLPVKKPGTEDYRPVQDLREVNKRVEDIHPTVPNPYNLLSTLPPSHPWYTVLDLKDAFFCLRLHSESQLLFAFEWRDPEIGLSGQLTWTRLPQGFKNSPTLFNEALHSDLADFRVRYPALVLLQYVDDLLLAAATRTECLEGTKALLETLGNKGYRASAKKAQICLQEVTYLGYSLKDGQRWLTKARKEAILSIPVPKNSRQVREFLGKAGYCRLFIPGFAELAAPLYPLTRPGTLFQWGTEQQLAFEDIKKALLSSPALGLPDITKPFELFIDENSGFAKGVLVQKLGPWKRPVAYLSKKLDTVASGWPPCLRMVAAIAILVKDAGKLTLGQPLTILTSHPVEALVRQPPNKWLSNARMTHYQAMLLDAERVHFGPTVSLNPATLLPLPSGGNHHDCLQILAETHGTRPDLTDQPLPDADLTWYTDGSSFIRNGEREAGAAVTTESEVIWAAPLPPGTSAQRAELIALTQALKMAEGKKLTVYTDSRYAFATTHVHGEIYRRRGWLTSEGKEIKNKNEILALLEALFLPKRLSIIHCPGHQKGDSPQAKGNRLADDTAKKAATETHSSLTVLPAGKRTADGSEFEKRTADGSEFESPKKKAKVE

SEQ ID NO: 1225 - protein, 2095 aa, synthetic construct
MPAAKRVKLDGGDKKYSIGLDIGTNSVGWAVITDEYKVPSKKFKVLGNTDRHSIKKNLIGALLFDSGETAEATRLKRTARRRYTRRKNRICYLQEIFSNEMAKVDDSFFHRLEESFLVEEDKKHERHPIFGNIVDEVAYHEKYPTIYHLRKKLVDSTDKADLRLIYLALAHMIKFRGHFLIEGDLNPDNSDVDKLFIQLVQTYNQLFEENPINASGVDAKAILSARLSKSRRLENLIAQLPGEKKNGLFGNLIALSLGLTPNFKSNFDLAEDAKLQLSKDTYDDDLDNLLAQIGDQYADLFLAAKNLSDAILLSDILRVNTEITKAPLSASMIKRYDEHHQDLTLLKALVRQQLPEKYKEIFFDQSKNGYAGYIDGGASQEEFYKFIKPILEKMDGTEELLVKLNREDLLRKQRTFDNGSIPHQIHLGELHAILRRQEDFYPFLKDNREKIEKILTFRIPYYVGPLARGNSRFAWMTRKSEETITPWNFEEVVDKGASAQSFIERMTNFDKNLPNEKVLPKHSLLYEYFTVYNELTKVKYVTEGMRKPAFLSGEQKKAIVDLLFKTNRKVTVKQLKEDYFKKIECFDSVEISGVEDRFNASLGTYHDLLKIIKDKDFLDNEENEDILEDIVLTLTLFEDREMIEERLKTYAHLFDDKVMKQLKRRRYTGWGRLSRKLINGIRDKQSGKTILDFLKSDGFANRNFMQLIHDDSLTFKEDIQKAQVSGQGDSLHEHIANLAGSPAIKKGILQTVKVVDELVKVMGRHKPENIVIEMARENQTTQKGQKNSRERMKRIEEGIKELGSQILKEHPVENTQLQNEKLYLYYLQNGRDMYVDQELDINRLSDYDVDHIVPQSFLKDDSIDNKVLTRSDKARGKSDNVPSEEVVKKMKNYWRQLLNAKLITQRKFDNLTKAERGGLSELDKAGFIKRQLVETRQITKHVAQILDSRMNTKYDENDKLIREVKVITLKSKLVSDFRKDFQFYKVREINNYHHAHDAYLNAVVGTALIKKYPKLESEFVYGDYKVYDVRKMIAKSEQEIGKATAKYFFYSNIMNFFKTEITLANGEIRKRPLIETNGETGEIVWDKGRDFATVRKVLSMPQVNIVKKTEVQTGGFSKESILPKRNSDKLIARKKDWDPKKYGGFDSPTVAYSVLVVAKVEKGKSKKLKSVKELLGITIMERSSFEKNPIDFLEAKGYKEVKKDLIIKLPKYSLFELENGRKRMLASAGELQKGNELALPSKYVNFLYLASHYEKLKGSPEDNEQKQLFVEQHKHYLDEIIEQISEFSKRVILADANLDKVLSAYNKHRDKPIREQAENIIHLFTLTNLGAPAAFKYFDTTIDRKRYTSTKEVLDATLIHQSITGLYETRIDLSQLGGDGGGSSPAPEAAAKGGTLQLEEEYRLFEPESTQKQEMDIWLKNFPQAWAETGGMGTAHCQAPVLIQLKATATPISIRQYPMPHEAYQGIKPHIRRMLDQGILKPCQSPWNTPLLPVKKPGTEDYRPVQDLREVNKRVEDIHPTVPNPYNLLSTLPPSHPWYTVLDLKDAFFCLRLHSESQLLFAFEWRDPEIGLSGQLTWTRLPQGFKNSPTLFNEALHSDLADFRVRYPALVLLQYVDDLLLAAATRTECLEGTKALLETLGNKGYRASAKKAQICLQEVTYLGYSLKDGQRWLTKARKEAILSIPVPKNSRQVREFLGKAGYCRLFIPGFAELAAPLYPLTRPGTLFQWGTEQQLAFEDIKKALLSSPALGLPDITKPFELFIDENSGFAKGVLVQKLGPWKRPVAYLSKKLDTVASGWPPCLRMVAAIAILVKDAGKLTLGQPLTILTSHPVEALVRQPPNKWLSNARMTHYQAMLLDAERVHFGPTVSLNPATLLPLPSGGNHHDCLQILAETHGTRPDLTDQPLPDADLTWYTDGSSFIRNGEREAGAAVTTESEVIWAAPLPPGTSAQRAELIALTQALKMAEGKKLTVYTDSRYAFATTHVHGEIYRRRGWLTSEGKEIKNKNEILALLEALFLPKRLSIIHCPGHQKGDSPQAKGNRLADDTAKKAATETHSSLTVLPAGKRTADGSEFEKRTADGSEFESPKKKAKVE

SEQ ID NO: 1226 - protein, 2087 aa, synthetic construct
MPAAKRVKLDGGDKKYSIGLDIGTNSVGWAVITDEYKVPSKKFKVLGNTDRHSIKKNLIGALLFDSGETAEATRLKRTARRRYTRRKNRICYLQEIFSNEMAKVDDSFFHRLEESFLVEEDKKHERHPIFGNIVDEVAYHEKYPTIYHLRKKLVDSTDKADLRLIYLALAHMIKFRGHFLIEGDLNPDNSDVDKLFIQLVQTYNQLFEENPINASGVDAKAILSARLSKSRRLENLIAQLPGEKKNGLFGNLIALSLGLTPNFKSNFDLAEDAKLQLSKDTYDDDLDNLLAQIGDQYADLFLAAKNLSDAILLSDILRVNTEITKAPLSASMIKRYDEHHQDLTLLKALVRQQLPEKYKEIFFDQSKNGYAGYIDGGASQEEFYKFIKPILEKMDGTEELLVKLNREDLLRKQRTFDNGSIPHQIHLGELHAILRRQEDFYPFLKDNREKIEKILTFRIPYYVGPLARGNSRFAWMTRKSEETITPWNFEEVVDKGASAQSFIERMTNFDKNLPNEKVLPKHSLLYEYFTVYNELTKVKYVTEGMRKPAFLSGEQKKAIVDLLFKTNRKVTVKQLKEDYFKKIECFDSVEISGVEDRFNASLGTYHDLLKIIKDKDFLDNEENEDILEDIVLTLTLFEDREMIEERLKTYAHLFDDKVMKQLKRRRYTGWGRLSRKLINGIRDKQSGKTILDFLKSDGFANRNFMQLIHDDSLTFKEDIQKAQVSGQGDSLHEHIANLAGSPAIKKGILQTVKVVDELVKVMGRHKPENIVIEMARENQTTQKGQKNSRERMKRIEEGIKELGSQILKEHPVENTQLQNEKLYLYYLQNGRDMYVDQELDINRLSDYDVDHIVPQSFLKDDSIDNKVLTRSDKARGKSDNVPSEEVVKKMKNYWRQLLNAKLITQRKFDNLTKAERGGLSELDKAGFIKRQLVETRQITKHVAQILDSRMNTKYDENDKLIREVKVITLKSKLVSDFRKDFQFYKVREINNYHHAHDAYLNAVVGTALIKKYPKLESEFVYGDYKVYDVRKMIAKSEQEIGKATAKYFFYSNIMNFFKTEITLANGEIRKRPLIETNGETGEIVWDKGRDFATVRKVLSMPQVNIVKKTEVQTGGFSKESILPKRNSDKLIARKKDWDPKKYGGFDSPTVAYSVLVVAKVEKGKSKKLKSVKELLGITIMERSSFEKNPIDFLEAKGYKEVKKDLIIKLPKYSLFELENGRKRMLASAGELQKGNELALPSKYVNFLYLASHYEKLKGSPEDNEQKQLFVEQHKHYLDEIIEQISEFSKRVILADANLDKVLSAYNKHRDKPIREQAENIIHLFTLTNLGAPAAFKYFDTTIDRKRYTSTKEVLDATLIHQSITGLYETRIDLSQLGGDGGGSSGGTLQLEEEYRLFEPESTQKQEMDIWLKNFPQAWAETGGMGTAHCQAPVLIQLKATATPISIRQYPMPHEAYQGIKPHIRRMLDQGILKPCQSPWNTPLLPVKKPGTEDYRPVQDLREVNKRVEDIHPTVPNPYNLLSTLPPSHPWYTVLDLKDAFFCLRLHSESQLLFAFEWRDPEIGLSGQLTWTRLPQGFKNSPTLFNEALHSDLADFRVRYPALVLLQYVDDLLLAAATRTECLEGTKALLETLGNKGYRASAKKAQICLQEVTYLGYSLKDGQRWLTKARKEAILSIPVPKNSRQVREFLGKAGYCRLFIPGFAELAAPLYPLTRPGTLFQWGTEQQLAFEDIKKALLSSPALGLPDITKPFELFIDENSGFAKGVLVQKLGPWKRPVAYLSKKLDTVASGWPPCLRMVAAIAILVKDAGKLTLGQPLTILTSHPVEALVRQPPNKWLSNARMTHYQAMLLDAERVHFGPTVSLNPATLLPLPSGGNHHDCLQILAETHGTRPDLTDQPLPDADLTWYTDGSSFIRNGEREAGAAVTTESEVIWAAPLPPGTSAQRAELIALTQALKMAEGKKLTVYTDSRYAFATTHVHGEIYRRRGWLTSEGKEIKNKNEILALLEALFLPKRLSIIHCPGHQKGDSPQAKGNRLADDTAKKAATETHSSLTVLPAGKRTADGSEFEKRTADGSEFESPKKKAKVE

SEQ ID NO: 1227 - protein, 2095 aa, synthetic construct
MPAAKRVKLDGGDKKYSIGLDIGTNSVGWAVITDEYKVPSKKFKVLGNTDRHSIKKNLIGALLFDSGETAEATRLKRTARRRYTRRKNRICYLQEIFSNEMAKVDDSFFHRLEESFLVEEDKKHERHPIFGNIVDEVAYHEKYPTIYHLRKKLVDSTDKADLRLIYLALAHMIKFRGHFLIEGDLNPDNSDVDKLFIQLVQTYNQLFEENPINASGVDAKAILSARLSKSRRLENLIAQLPGEKKNGLFGNLIALSLGLTPNFKSNFDLAEDAKLQLSKDTYDDDLDNLLAQIGDQYADLFLAAKNLSDAILLSDILRVNTEITKAPLSASMIKRYDEHHQDLTLLKALVRQQLPEKYKEIFFDQSKNGYAGYIDGGASQEEFYKFIKPILEKMDGTEELLVKLNREDLLRKQRTFDNGSIPHQIHLGELHAILRRQEDFYPFLKDNREKIEKILTFRIPYYVGPLARGNSRFAWMTRKSEETITPWNFEEVVDKGASAQSFIERMTNFDKNLPNEKVLPKHSLLYEYFTVYNELTKVKYVTEGMRKPAFLSGEQKKAIVDLLFKTNRKVTVKQLKEDYFKKIECFDSVEISGVEDRFNASLGTYHDLLKIIKDKDFLDNEENEDILEDIVLTLTLFEDREMIEERLKTYAHLFDDKVMKQLKRRRYTGWGRLSRKLINGIRDKQSGKTILDFLKSDGFANRNFMQLIHDDSLTFKEDIQKAQVSGQGDSLHEHIANLAGSPAIKKGILQTVKVVDELVKVMGRHKPENIVIEMARENQTTQKGQKNSRERMKRIEEGIKELGSQILKEHPVENTQLQNEKLYLYYLQNGRDMYVDQELDINRLSDYDVDHIVPQSFLKDDSIDNKVLTRSDKARGKSDNVPSEEVVKKMKNYWRQLLNAKLITQRKFDNLTKAERGGLSELDKAGFIKRQLVETRQITKHVAQILDSRMNTKYDENDKLIREVKVITLKSKLVSDFRKDFQFYKVREINNYHHAHDAYLNAVVGTALIKKYPKLESEFVYGDYKVYDVRKMIAKSEQEIGKATAKYFFYSNIMNFFKTEITLANGEIRKRPLIETNGETGEIVWDKGRDFATVRKVLSMPQVNIVKKTEVQTGGFSKESILPKRNSDKLIARKKDWDPKKYGGFDSPTVAYSVLVVAKVEKGKSKKLKSVKELLGITIMERSSFEKNPIDFLEAKGYKEVKKDLIIKLPKYSLFELENGRKRMLASAGELQKGNELALPSKYVNFLYLASHYEKLKGSPEDNEQKQLFVEQHKHYLDEIIEQISEFSKRVILADANLDKVLSAYNKHRDKPIREQAENIIHLFTLTNLGAPAAFKYFDTTIDRKRYTSTKEVLDATLIHQSITGLYETRIDLSQLGGDGGGSSGGGEAAAKGGTLQLEEEYRLFEPESTQKQEMDIWLKNFPQAWAETGGMGTAHCQAPVLIQLKATATPISIRQYPMPHEAYQGIKPHIRRMLDQGILKPCQSPWNTPLLPVKKPGTEDYRPVQDLREVNKRVEDIHPTVPNPYNLLSTLPPSHPWYTVLDLKDAFFCLRLHSESQLLFAFEWRDPEIGLSGQLTWTRLPQGFKNSPTLFNEALHSDLADFRVRYPALVLLQYVDDLLLAAATRTECLEGTKALLETLGNKGYRASAKKAQICLQEVTYLGYSLKDGQRWLTKARKEAILSIPVPKNSRQVREFLGKAGYCRLFIPGFAELAAPLYPLTRPGTLFQWGTEQQLAFEDIKKALLSSPALGLPDITKPFELFIDENSGFAKGVLVQKLGPWKRPVAYLSKKLDTVASGWPPCLRMVAAIAILVKDAGKLTLGQPLTILTSHPVEALVRQPPNKWLSNARMTHYQAMLLDAERVHFGPTVSLNPATLLPLPSGGNHHDCLQILAETHGTRPDLTDQPLPDADLTWYTDGSSFIRNGEREAGAAVTTESEVIWAAPLPPGTSAQRAELIALTQALKMAEGKKLTVYTDSRYAFATTHVHGEIYRRRGWLTSEGKEIKNKNEILALLEALFLPKRLSIIHCPGHQKGDSPQAKGNRLADDTAKKAATETHSSLTVLPAGKRTADGSEFEKRTADGSEFESPKKKAKVE

SEQ ID NO: 1228 - protein, 2090 aa, synthetic construct
MPAAKRVKLDGGDKKYSIGLDIGTNSVGWAVITDEYKVPSKKFKVLGNTDRHSIKKNLIGALLFDSGETAEATRLKRTARRRYTRRKNRICYLQEIFSNEMAKVDDSFFHRLEESFLVEEDKKHERHPIFGNIVDEVAYHEKYPTIYHLRKKLVDSTDKADLRLIYLALAHMIKFRGHFLIEGDLNPDNSDVDKLFIQLVQTYNQLFEENPINASGVDAKAILSARLSKSRRLENLIAQLPGEKKNGLFGNLIALSLGLTPNFKSNFDLAEDAKLQLSKDTYDDDLDNLLAQIGDQYADLFLAAKNLSDAILLSDILRVNTEITKAPLSASMIKRYDEHHQDLTLLKALVRQQLPEKYKEIFFDQSKNGYAGYIDGGASQEEFYKFIKPILEKMDGTEELLVKLNREDLLRKQRTFDNGSIPHQIHLGELHAILRRQEDFYPFLKDNREKIEKILTFRIPYYVGPLARGNSRFAWMTRKSEETITPWNFEEVVDKGASAQSFIERMTNFDKNLPNEKVLPKHSLLYEYFTVYNELTKVKYVTEGMRKPAFLSGEQKKAIVDLLFKTNRKVTVKQLKEDYFKKIECFDSVEISGVEDRFNASLGTYHDLLKIIKDKDFLDNEENEDILEDIVLTLTLFEDREMIEERLKTYAHLFDDKVMKQLKRRRYTGWGRLSRKLINGIRDKQSGKTILDFLKSDGFANRNFMQLIHDDSLTFKEDIQKAQVSGQGDSLHEHIANLAGSPAIKKGILQTVKVVDELVKVMGRHKPENIVIEMARENQTTQKGQKNSRERMKRIEEGIKELGSQILKEHPVENTQLQNEKLYLYYLQNGRDMYVDQELDINRLSDYDVDHIVPQSFLKDDSIDNKVLTRSDKARGKSDNVPSEEVVKKMKNYWRQLLNAKLITQRKFDNLTKAERGGLSELDKAGFIKRQLVETRQITKHVAQILDSRMNTKYDENDKLIREVKVITLKSKLVSDFRKDFQFYKVREINNYHHAHDAYLNAVVGTALIKKYPKLESEFVYGDYKVYDVRKMIAKSEQEIGKATAKYFFYSNIMNFFKTEITLANGEIRKRPLIETNGETGEIVWDKGRDFATVRKVLSMPQVNIVKKTEVQTGGFSKESILPKRNSDKLIARKKDWDPKKYGGFDSPTVAYSVLVVAKVEKGKSKKLKSVKELLGITIMERSSFEKNPIDFLEAKGYKEVKKDLIIKLPKYSLFELENGRKRMLASAGELQKGNELALPSKYVNFLYLASHYEKLKGSPEDNEQKQLFVEQHKHYLDEIIEQISEFSKRVILADANLDKVLSAYNKHRDKPIREQAENIIHLFTLTNLGAPAAFKYFDTTIDRKRYTSTKEVLDATLIHQSITGLYETRIDLSQLGGDGGPAPGGSGGTLQLEEEYRLFEPESTQKQEMDIWLKNFPQAWAETGGMGTAHCQAPVLIQLKATATPISIRQYPMPHEAYQGIKPHIRRMLDQGILKPCQSPWNTPLLPVKKPGTEDYRPVQDLREVNKRVEDIHPTVPNPYNLLSTLPPSHPWYTVLDLKDAFFCLRLHSESQLLFAFEWRDPEIGLSGQLTWTRLPQGFKNSPTLFNEALHSDLADFRVRYPALVLLQYVDDLLLAAATRTECLEGTKALLETLGNKGYRASAKKAQICLQEVTYLGYSLKDGQRWLTKARKEAILSIPVPKNSRQVREFLGKAGYCRLFIPGFAELAAPLYPLTRPGTLFQWGTEQQLAFEDIKKALLSSPALGLPDITKPFELFIDENSGFAKGVLVQKLGPWKRPVAYLSKKLDTVASGWPPCLRMVAAIAILVKDAGKLTLGQPLTILTSHPVEALVRQPPNKWLSNARMTHYQAMLLDAERVHFGPTVSLNPATLLPLPSGGNHHDCLQILAETHGTRPDLTDQPLPDADLTWYTDGSSFIRNGEREAGAAVTTESEVIWAAPLPPGTSAQRAELIALTQALKMAEGKKLTVYTDSRYAFATTHVHGEIYRRRGWLTSEGKEIKNKNEILALLEALFLPKRLSIIHCPGHQKGDSPQAKGNRLADDTAKKAATETHSSLTVLPAGKRTADGSEFEKRTADGSEFESPKKKAKVE

SEQ ID NO: 1229 - protein, 2090 aa, synthetic construct
MPAAKRVKLDGGDKKYSIGLDIGTNSVGWAVITDEYKVPSKKFKVLGNTDRHSIKKNLIGALLFDSGETAEATRLKRTARRRYTRRKNRICYLQEIFSNEMAKVDDSFFHRLEESFLVEEDKKHERHPIFGNIVDEVAYHEKYPTIYHLRKKLVDSTDKADLRLIYLALAHMIKFRGHFLIEGDLNPDNSDVDKLFIQLVQTYNQLFEENPINASGVDAKAILSARLSKSRRLENLIAQLPGEKKNGLFGNLIALSLGLTPNFKSNFDLAEDAKLQLSKDTYDDDLDNLLAQIGDQYADLFLAAKNLSDAILLSDILRVNTEITKAPLSASMIKRYDEHHQDLTLLKALVRQQLPEKYKEIFFDQSKNGYAGYIDGGASQEEFYKFIKPILEKMDGTEELLVKLNREDLLRKQRTFDNGSIPHQIHLGELHAILRRQEDFYPFLKDNREKIEKILTFRIPYYVGPLARGNSRFAWMTRKSEETITPWNFEEVVDKGASAQSFIERMTNFDKNLPNEKVLPKHSLLYEYFTVYNELTKVKYVTEGMRKPAFLSGEQKKAIVDLLFKTNRKVTVKQLKEDYFKKIECFDSVEISGVEDRFNASLGTYHDLLKIIKDKDFLDNEENEDILEDIVLTLTLFEDREMIEERLKTYAHLFDDKVMKQLKRRRYTGWGRLSRKLINGIRDKQSGKTILDFLKSDGFANRNFMQLIHDDSLTFKEDIQKAQVSGQGDSLHEHIANLAGSPAIKKGILQTVKVVDELVKVMGRHKPENIVIEMARENQTTQKGQKNSRERMKRIEEGIKELGSQILKEHPVENTQLQNEKLYLYYLQNGRDMYVDQELDINRLSDYDVDHIVPQSFLKDDSIDNKVLTRSDKARGKSDNVPSEEVVKKMKNYWRQLLNAKLITQRKFDNLTKAERGGLSELDKAGFIKRQLVETRQITKHVAQILDSRMNTKYDENDKLIREVKVITLKSKLVSDFRKDFQFYKVREINNYHHAHDAYLNAVVGTALIKKYPKLESEFVYGDYKVYDVRKMIAKSEQEIGKATAKYFFYSNIMNFFKTEITLANGEIRKRPLIETNGETGEIVWDKGRDFATVRKVLSMPQVNIVKKTEVQTGGFSKESILPKRNSDKLIARKKDWDPKKYGGFDSPTVAYSVLVVAKVEKGKSKKLKSVKELLGITIMERSSFEKNPIDFLEAKGYKEVKKDLIIKLPKYSLFELENGRKRMLASAGELQKGNELALPSKYVNFLYLASHYEKLKGSPEDNEQKQLFVEQHKHYLDEIIEQISEFSKRVILADANLDKVLSAYNKHRDKPIREQAENIIHLFTLTNLGAPAAFKYFDTTIDRKRYTSTKEVLDATLIHQSITGLYETRIDLSQLGGDGGGGGPAPGGTLQLEEEYRLFEPESTQKQEMDIWLKNFPQAWAETGGMGTAHCQAPVLIQLKATATPISIRQYPMPHEAYQGIKPHIRRMLDQGILKPCQSPWNTPLLPVKKPGTEDYRPVQDLREVNKRVEDIHPTVPNPYNLLSTLPPSHPWYTVLDLKDAFFCLRLHSESQLLFAFEWRDPEIGLSGQLTWTRLPQGFKNSPTLFNEALHSDLADFRVRYPALVLLQYVDDLLLAAATRTECLEGTKALLETLGNKGYRASAKKAQICLQEVTYLGYSLKDGQRWLTKARKEAILSIPVPKNSRQVREFLGKAGYCRLFIPGFAELAAPLYPLTRPGTLFQWGTEQQLAFEDIKKALLSSPALGLPDITKPFELFIDENSGFAKGVLVQKLGPWKRPVAYLSKKLDTVASGWPPCLRMVAAIAILVKDAGKLTLGQPLTILTSHPVEALVRQPPNKWLSNARMTHYQAMLLDAERVHFGPTVSLNPATLLPLPSGGNHHDCLQILAETHGTRPDLTDQPLPDADLTWYTDGSSFIRNGEREAGAAVTTESEVIWAAPLPPGTSAQRAELIALTQALKMAEGKKLTVYTDSRYAFATTHVHGEIYRRRGWLTSEGKEIKNKNEILALLEALFLPKRLSIIHCPGHQKGDSPQAKGNRLADDTAKKAATETHSSLTVLPAGKRTADGSEFEKRTADGSEFESPKKKAKVE

SEQ ID NO: 1230 - protein, 2092 aa, synthetic construct
MPAAKRVKLDGGDKKYSIGLDIGTNSVGWAVITDEYKVPSKKFKVLGNTDRHSIKKNLIGALLFDSGETAEATRLKRTARRRYTRRKNRICYLQEIFSNEMAKVDDSFFHRLEESFLVEEDKKHERHPIFGNIVDEVAYHEKYPTIYHLRKKLVDSTDKADLRLIYLALAHMIKFRGHFLIEGDLNPDNSDVDKLFIQLVQTYNQLFEENPINASGVDAKAILSARLSKSRRLENLIAQLPGEKKNGLFGNLIALSLGLTPNFKSNFDLAEDAKLQLSKDTYDDDLDNLLAQIGDQYADLFLAAKNLSDAILLSDILRVNTEITKAPLSASMIKRYDEHHQDLTLLKALVRQQLPEKYKEIFFDQSKNGYAGYIDGGASQEEFYKFIKPILEKMDGTEELLVKLNREDLLRKQRTFDNGSIPHQIHLGELHAILRRQEDFYPFLKDNREKIEKILTFRIPYYVGPLARGNSRFAWMTRKSEETITPWNFEEVVDKGASAQSFIERMTNFDKNLPNEKVLPKHSLLYEYFTVYNELTKVKYVTEGMRKPAFLSGEQKKAIVDLLFKTNRKVTVKQLKEDYFKKIECFDSVEISGVEDRFNASLGTYHDLLKIIKDKDFLDNEENEDILEDIVLTLTLFEDREMIEERLKTYAHLFDDKVMKQLKRRRYTGWGRLSRKLINGIRDKQSGKTILDFLKSDGFANRNFMQLIHDDSLTFKEDIQKAQVSGQGDSLHEHIANLAGSPAIKKGILQTVKVVDELVKVMGRHKPENIVIEMARENQTTQKGQKNSRERMKRIEEGIKELGSQILKEHPVENTQLQNEKLYLYYLQNGRDMYVDQELDINRLSDYDVDHIVPQSFLKDDSIDNKVLTRSDKARGKSDNVPSEEVVKKMKNYWRQLLNAKLITQRKFDNLTKAERGGLSELDKAGFIKRQLVETRQITKHVAQILDSRMNTKYDENDKLIREVKVITLKSKLVSDFRKDFQFYKVREINNYHHAHDAYLNAVVGTALIKKYPKLESEFVYGDYKVYDVRKMIAKSEQEIGKATAKYFFYSNIMNFFKTEITLANGEIRKRPLIETNGETGEIVWDKGRDFATVRKVLSMPQVNIVKKTEVQTGGFSKESILPKRNSDKLIARKKDWDPKKYGGFDSPTVAYSVLVVAKVEKGKSKKLKSVKELLGITIMERSSFEKNPIDFLEAKGYKEVKKDLIIKLPKYSLFELENGRKRMLASAGELQKGNELALPSKYVNFLYLASHYEKLKGSPEDNEQKQLFVEQHKHYLDEIIEQISEFSKRVILADANLDKVLSAYNKHRDKPIREQAENIIHLFTLTNLGAPAAFKYFDTTIDRKRYTSTKEVLDATLIHQSITGLYETRIDLSQLGGDGGPAPEAAAKGGTLQLEEEYRLFEPESTQKQEMDIWLKNFPQAWAETGGMGTAHCQAPVLIQLKATATPISIRQYPMPHEAYQGIKPHIRRMLDQGILKPCQSPWNTPLLPVKKPGTEDYRPVQDLREVNKRVEDIHPTVPNPYNLLSTLPPSHPWYTVLDLKDAFFCLRLHSESQLLFAFEWRDPEIGLSGQLTWTRLPQGFKNSPTLFNEALHSDLADFRVRYPALVLLQYVDDLLLAAATRTECLEGTKALLETLGNKGYRASAKKAQICLQEVTYLGYSLKDGQRWLTKARKEAILSIPVPKNSRQVREFLGKAGYCRLFIPGFAELAAPLYPLTRPGTLFQWGTEQQLAFEDIKKALLSSPALGLPDITKPFELFIDENSGFAKGVLVQKLGPWKRPVAYLSKKLDTVASGWPPCLRMVAAIAILVKDAGKLTLGQPLTILTSHPVEALVRQPPNKWLSNARMTHYQAMLLDAERVHFGPTVSLNPATLLPLPSGGNHHDCLQILAETHGTRPDLTDQPLPDADLTWYTDGSSFIRNGEREAGAAVTTESEVIWAAPLPPGTSAQRAELIALTQALKMAEGKKLTVYTDSRYAFATTHVHGEIYRRRGWLTSEGKEIKNKNEILALLEALFLPKRLSIIHCPGHQKGDSPQAKGNRLADDTAKKAATETHSSLTVLPAGKRTADGSEFEKRTADGSEFESPKKKAKVE

SEQ ID NO: 1231 - protein, 2099 aa, synthetic construct
MPAAKRVKLDGGDKKYSIGLDIGTNSVGWAVITDEYKVPSKKFKVLGNTDRHSIKKNLIGALLFDSGETAEATRLKRTARRRYTRRKNRICYLQEIFSNEMAKVDDSFFHRLEESFLVEEDKKHERHPIFGNIVDEVAYHEKYPTIYHLRKKLVDSTDKADLRLIYLALAHMIKFRGHFLIEGDLNPDNSDVDKLFIQLVQTYNQLFEENPINASGVDAKAILSARLSKSRRLENLIAQLPGEKKNGLFGNLIALSLGLTPNFKSNFDLAEDAKLQLSKDTYDDDLDNLLAQIGDQYADLFLAAKNLSDAILLSDILRVNTEITKAPLSASMIKRYDEHHQDLTLLKALVRQQLPEKYKEIFFDQSKNGYAGYIDGGASQEEFYKFIKPILEKMDGTEELLVKLNREDLLRKQRTFDNGSIPHQIHLGELHAILRRQEDFYPFLKDNREKIEKILTFRIPYYVGPLARGNSRFAWMTRKSEETITPWNFEEVVDKGASAQSFIERMTNFDKNLPNEKVLPKHSLLYEYFTVYNELTKVKYVTEGMRKPAFLSGEQKKAIVDLLFKTNRKVTVKQLKEDYFKKIECFDSVEISGVEDRFNASLGTYHDLLKIIKDKDFLDNEENEDILEDIVLTLTLFEDREMIEERLKTYAHLFDDKVMKQLKRRRYTGWGRLSRKLINGIRDKQSGKTILDFLKSDGFANRNFMQLIHDDSLTFKEDIQKAQVSGQGDSLHEHIANLAGSPAIKKGILQTVKVVDELVKVMGRHKPENIVIEMARENQTTQKGQKNSRERMKRIEEGIKELGSQILKEHPVENTQLQNEKLYLYYLQNGRDMYVDQELDINRLSDYDVDHIVPQSFLKDDSIDNKVLTRSDKARGKSDNVPSEEVVKKMKNYWRQLLNAKLITQRKFDNLTKAERGGLSELDKAGFIKRQLVETRQITKHVAQILDSRMNTKYDENDKLIREVKVITLKSKLVSDFRKDFQFYKVREINNYHHAHDAYLNAVVGTALIKKYPKLESEFVYGDYKVYDVRKMIAKSEQEIGKATAKYFFYSNIMNFFKTEITLANGEIRKRPLIETNGETGEIVWDKGRDFATVRKVLSMPQVNIVKKTEVQTGGFSKESILPKRNSDKLIARKKDWDPKKYGGFDSPTVAYSVLVVAKVEKGKSKKLKSVKELLGITIMERSSFEKNPIDFLEAKGYKEVKKDLIIKLPKYSLFELENGRKRMLASAGELQKGNELALPSKYVNFLYLASHYEKLKGSPEDNEQKQLFVEQHKHYLDEIIEQISEFSKRVILADANLDKVLSAYNKHRDKPIREQAENIIHLFTLTNLGAPAAFKYFDTTIDRKRYTSTKEVLDATLIHQSITGLYETRIDLSQLGGDGGGGGGSGGGGSGGGGSGGTLQLEEEYRLFEPESTQKQEMDIWLKNFPQAWAETGGMGTAHCQAPVLIQLKATATPISIRQYPMPHEAYQGIKPHIRRMLDQGILKPCQSPWNTPLLPVKKPGTEDYRPVQDLREVNKRVEDIHPTVPNPYNLLSTLPPSHPWYTVLDLKDAFFCLRLHSESQLLFAFEWRDPEIGLSGQLTWTRLPQGFKNSPTLFNEALHSDLADFRVRYPALVLLQYVDDLLLAAATRTECLEGTKALLETLGNKGYRASAKKAQICLQEVTYLGYSLKDGQRWLTKARKEAILSIPVPKNSRQVREFLGKAGYCRLFIPGFAELAAPLYPLTRPGTLFQWGTEQQLAFEDIKKALLSSPALGLPDITKPFELFIDENSGFAKGVLVQKLGPWKRPVAYLSKKLDTVASGWPPCLRMVAAIAILVKDAGKLTLGQPLTILTSHPVEALVRQPPNKWLSNARMTHYQAMLLDAERVHFGPTVSLNPATLLPLPSGGNHHDCLQILAETHGTRPDLTDQPLPDADLTWYTDGSSFIRNGEREAGAAVTTESEVIWAAPLPPGTSAQRAELIALTQALKMAEGKKLTVYTDSRYAFATTHVHGEIYRRRGWLTSEGKEIKNKNEILALLEALFLPKRLSIIHCPGHQKGDSPQAKGNRLADDTAKKAATETHSSLTVLPAGKRTADGSEFEKRTADGSEFESPKKKAKVE

SEQ ID NO: 1232 - protein, 2095 aa, synthetic construct
MPAAKRVKLDGGDKKYSIGLDIGTNSVGWAVITDEYKVPSKKFKVLGNTDRHSIKKNLIGALLFDSGETAEATRLKRTARRRYTRRKNRICYLQEIFSNEMAKVDDSFFHRLEESFLVEEDKKHERHPIFGNIVDEVAYHEKYPTIYHLRKKLVDSTDKADLRLIYLALAHMIKFRGHFLIEGDLNPDNSDVDKLFIQLVQTYNQLFEENPINASGVDAKAILSARLSKSRRLENLIAQLPGEKKNGLFGNLIALSLGLTPNFKSNFDLAEDAKLQLSKDTYDDDLDNLLAQIGDQYADLFLAAKNLSDAILLSDILRVNTEITKAPLSASMIKRYDEHHQDLTLLKALVRQQLPEKYKEIFFDQSKNGYAGYIDGGASQEEFYKFIKPILEKMDGTEELLVKLNREDLLRKQRTFDNGSIPHQIHLGELHAILRRQEDFYPFLKDNREKIEKILTFRIPYYVGPLARGNSRFAWMTRKSEETITPWNFEEVVDKGASAQSFIERMTNFDKNLPNEKVLPKHSLLYEYFTVYNELTKVKYVTEGMRKPAFLSGEQKKAIVDLLFKTNRKVTVKQLKEDYFKKIECFDSVEISGVEDRFNASLGTYHDLLKIIKDKDFLDNEENEDILEDIVLTLTLFEDREMIEERLKTYAHLFDDKVMKQLKRRRYTGWGRLSRKLINGIRDKQSGKTILDFLKSDGFANRNFMQLIHDDSLTFKEDIQKAQVSGQGDSLHEHIANLAGSPAIKKGILQTVKVVDELVKVMGRHKPENIVIEMARENQTTQKGQKNSRERMKRIEEGIKELGSQILKEHPVENTQLQNEKLYLYYLQNGRDMYVDQELDINRLSDYDVDHIVPQSFLKDDSIDNKVLTRSDKARGKSDNVPSEEVVKKMKNYWRQLLNAKLITQRKFDNLTKAERGGLSELDKAGFIKRQLVETRQITKHVAQILDSRMNTKYDENDKLIREVKVITLKSKLVSDFRKDFQFYKVREINNYHHAHDAYLNAVVGTALIKKYPKLESEFVYGDYKVYDVRKMIAKSEQEIGKATAKYFFYSNIMNFFKTEITLANGEIRKRPLIETNGETGEIVWDKGRDFATVRKVLSMPQVNIVKKTEVQTGGFSKESILPKRNSDKLIARKKDWDPKKYGGFDSPTVAYSVLVVAKVEKGKSKKLKSVKELLGITIMERSSFEKNPIDFLEAKGYKEVKKDLIIKLPKYSLFELENGRKRMLASAGELQKGNELALPSKYVNFLYLASHYEKLKGSPEDNEQKQLFVEQHKHYLDEIIEQISEFSKRVILADANLDKVLSAYNKHRDKPIREQAENIIHLFTLTNLGAPAAFKYFDTTIDRKRYTSTKEVLDATLIHQSITGLYETRIDLSQLGGDGGPAPAPAPAPAPGGTLQLEEEYRLFEPESTQKQEMDIWLKNFPQAWAETGGMGTAHCQAPVLIQLKATATPISIRQYPMPHEAYQGIKPHIRRMLDQGILKPCQSPWNTPLLPVKKPGTEDYRPVQDLREVNKRVEDIHPTVPNPYNLLSTLPPSHPWYTVLDLKDAFFCLRLHSESQLLFAFEWRDPEIGLSGQLTWTRLPQGFKNSPTLFNEALHSDLADFRVRYPALVLLQYVDDLLLAAATRTECLEGTKALLETLGNKGYRASAKKAQICLQEVTYLGYSLKDGQRWLTKARKEAILSIPVPKNSRQVREFLGKAGYCRLFIPGFAELAAPLYPLTRPGTLFQWGTEQQLAFEDIKKALLSSPALGLPDITKPFELFIDENSGFAKGVLVQKLGPWKRPVAYLSKKLDTVASGWPPCLRMVAAIAILVKDAGKLTLGQPLTILTSHPVEALVRQPPNKWLSNARMTHYQAMLLDAERVHFGPTVSLNPATLLPLPSGGNHHDCLQILAETHGTRPDLTDQPLPDADLTWYTDGSSFIRNGEREAGAAVTTESEVIWAAPLPPGTSAQRAELIALTQALKMAEGKKLTVYTDSRYAFATTHVHGEIYRRRGWLTSEGKEIKNKNEILALLEALFLPKRLSIIHCPGHQKGDSPQAKGNRLADDTAKKAATETHSSLTVLPAGKRTADGSEFEKRTADGSEFESPKKKAKVE

SEQ ID NO: 1233 - protein, 2094 aa, synthetic construct
MPAAKRVKLDGGDKKYSIGLDIGTNSVGWAVITDEYKVPSKKFKVLGNTDRHSIKKNLIGALLFDSGETAEATRLKRTARRRYTRRKNRICYLQEIFSNEMAKVDDSFFHRLEESFLVEEDKKHERHPIFGNIVDEVAYHEKYPTIYHLRKKLVDSTDKADLRLIYLALAHMIKFRGHFLIEGDLNPDNSDVDKLFIQLVQTYNQLFEENPINASGVDAKAILSARLSKSRRLENLIAQLPGEKKNGLFGNLIALSLGLTPNFKSNFDLAEDAKLQLSKDTYDDDLDNLLAQIGDQYADLFLAAKNLSDAILLSDILRVNTEITKAPLSASMIKRYDEHHQDLTLLKALVRQQLPEKYKEIFFDQSKNGYAGYIDGGASQEEFYKFIKPILEKMDGTEELLVKLNREDLLRKQRTFDNGSIPHQIHLGELHAILRRQEDFYPFLKDNREKIEKILTFRIPYYVGPLARGNSRFAWMTRKSEETITPWNFEEVVDKGASAQSFIERMTNFDKNLPNEKVLPKHSLLYEYFTVYNELTKVKYVTEGMRKPAFLSGEQKKAIVDLLFKTNRKVTVKQLKEDYFKKIECFDSVEISGVEDRFNASLGTYHDLLKIIKDKDFLDNEENEDILEDIVLTLTLFEDREMIEERLKTYAHLFDDKVMKQLKRRRYTGWGRLSRKLINGIRDKQSGKTILDFLKSDGFANRNFMQLIHDDSLTFKEDIQKAQVSGQGDSLHEHIANLAGSPAIKKGILQTVKVVDELVKVMGRHKPENIVIEMARENQTTQKGQKNSRERMKRIEEGIKELGSQILKEHPVENTQLQNEKLYLYYLQNGRDMYVDQELDINRLSDYDVDHIVPQSFLKDDSIDNKVLTRSDKARGKSDNVPSEEVVKKMKNYWRQLLNAKLITQRKFDNLTKAERGGLSELDKAGFIKRQLVETRQITKHVAQILDSRMNTKYDENDKLIREVKVITLKSKLVSDFRKDFQFYKVREINNYHHAHDAYLNAVVGTALIKKYPKLESEFVYGDYKVYDVRKMIAKSEQEIGKATAKYFFYSNIMNFFKTEITLANGEIRKRPLIETNGETGEIVWDKGRDFATVRKVLSMPQVNIVKKTEVQTGGFSKESILPKRNSDKLIARKKDWDPKKYGGFDSPTVAYSVLVVAKVEKGKSKKLKSVKELLGITIMERSSFEKNPIDFLEAKGYKEVKKDLIIKLPKYSLFELENGRKRMLASAGELQKGNELALPSKYVNFLYLASHYEKLKGSPEDNEQKQLFVEQHKHYLDEIIEQISEFSKRVILADANLDKVLSAYNKHRDKPIREQAENIIHLFTLTNLGAPAAFKYFDTTIDRKRYTSTKEVLDATLIHQSITGLYETRIDLSQLGGDGGGGGGSGGGGSGGTLQLEEEYRLFEPESTQKQEMDIWLKNFPQAWAETGGMGTAHCQAPVLIQLKATATPISIRQYPMPHEAYQGIKPHIRRMLDQGILKPCQSPWNTPLLPVKKPGTEDYRPVQDLREVNKRVEDIHPTVPNPYNLLSTLPPSHPWYTVLDLKDAFFCLRLHSESQLLFAFEWRDPEIGLSGQLTWTRLPQGFKNSPTLFNEALHSDLADFRVRYPALVLLQYVDDLLLAAATRTECLEGTKALLETLGNKGYRASAKKAQICLQEVTYLGYSLKDGQRWLTKARKEAILSIPVPKNSRQVREFLGKAGYCRLFIPGFAELAAPLYPLTRPGTLFQWGTEQQLAFEDIKKALLSSPALGLPDITKPFELFIDENSGFAKGVLVQKLGPWKRPVAYLSKKLDTVASGWPPCLRMVAAIAILVKDAGKLTLGQPLTILTSHPVEALVRQPPNKWLSNARMTHYQAMLLDAERVHFGPTVSLNPATLLPLPSGGNHHDCLQILAETHGTRPDLTDQPLPDADLTWYTDGSSFIRNGEREAGAAVTTESEVIWAAPLPPGTSAQRAELIALTQALKMAEGKKLTVYTDSRYAFATTHVHGEIYRRRGWLTSEGKEIKNKNEILALLEALFLPKRLSIIHCPGHQKGDSPQAKGNRLADDTAKKAATETHSSLTVLPAGKRTADGSEFEKRTADGSEFESPKKKAKVE

SEQ ID NO: 1234 - protein, 2095 aa, synthetic construct
MPAAKRVKLDGGDKKYSIGLDIGTNSVGWAVITDEYKVPSKKFKVLGNTDRHSIKKNLIGALLFDSGETAEATRLKRTARRRYTRRKNRICYLQEIFSNEMAKVDDSFFHRLEESFLVEEDKKHERHPIFGNIVDEVAYHEKYPTIYHLRKKLVDSTDKADLRLIYLALAHMIKFRGHFLIEGDLNPDNSDVDKLFIQLVQTYNQLFEENPINASGVDAKAILSARLSKSRRLENLIAQLPGEKKNGLFGNLIALSLGLTPNFKSNFDLAEDAKLQLSKDTYDDDLDNLLAQIGDQYADLFLAAKNLSDAILLSDILRVNTEITKAPLSASMIKRYDEHHQDLTLLKALVRQQLPEKYKEIFFDQSKNGYAGYIDGGASQEEFYKFIKPILEKMDGTEELLVKLNREDLLRKQRTFDNGSIPHQIHLGELHAILRRQEDFYPFLKDNREKIEKILTFRIPYYVGPLARGNSRFAWMTRKSEETITPWNFEEVVDKGASAQSFIERMTNFDKNLPNEKVLPKHSLLYEYFTVYNELTKVKYVTEGMRKPAFLSGEQKKAIVDLLFKTNRKVTVKQLKEDYFKKIECFDSVEISGVEDRFNASLGTYHDLLKIIKDKDFLDNEENEDILEDIVLTLTLFEDREMIEERLKTYAHLFDDKVMKQLKRRRYTGWGRLSRKLINGIRDKQSGKTILDFLKSDGFANRNFMQLIHDDSLTFKEDIQKAQVSGQGDSLHEHIANLAGSPAIKKGILQTVKVVDELVKVMGRHKPENIVIEMARENQTTQKGQKNSRERMKRIEEGIKELGSQILKEHPVENTQLQNEKLYLYYLQNGRDMYVDQELDINRLSDYDVDHIVPQSFLKDDSIDNKVLTRSDKARGKSDNVPSEEVVKKMKNYWRQLLNAKLITQRKFDNLTKAERGGLSELDKAGFIKRQLVETRQITKHVAQILDSRMNTKYDENDKLIREVKVITLKSKLVSDFRKDFQFYKVREINNYHHAHDAYLNAVVGTALIKKYPKLESEFVYGDYKVYDVRKMIAKSEQEIGKATAKYFFYSNIMNFFKTEITLANGEIRKRPLIETNGETGEIVWDKGRDFATVRKVLSMPQVNIVKKTEVQTGGFSKESILPKRNSDKLIARKKDWDPKKYGGFDSPTVAYSVLVVAKVEKGKSKKLKSVKELLGITIMERSSFEKNPIDFLEAKGYKEVKKDLIIKLPKYSLFELENGRKRMLASAGELQKGNELALPSKYVNFLYLASHYEKLKGSPEDNEQKQLFVEQHKHYLDEIIEQISEFSKRVILADANLDKVLSAYNKHRDKPIREQAENIIHLFTLTNLGAPAAFKYFDTTIDRKRYTSTKEVLDATLIHQSITGLYETRIDLSQLGGDGGEAAAKGSSGGSGGTLQLEEEYRLFEPESTQKQEMDIWLKNFPQAWAETGGMGTAHCQAPVLIQLKATATPISIRQYPMPHEAYQGIKPHIRRMLDQGILKPCQSPWNTPLLPVKKPGTEDYRPVQDLREVNKRVEDIHPTVPNPYNLLSTLPPSHPWYTVLDLKDAFFCLRLHSESQLLFAFEWRDPEIGLSGQLTWTRLPQGFKNSPTLFNEALHSDLADFRVRYPALVLLQYVDDLLLAAATRTECLEGTKALLETLGNKGYRASAKKAQICLQEVTYLGYSLKDGQRWLTKARKEAILSIPVPKNSRQVREFLGKAGYCRLFIPGFAELAAPLYPLTRPGTLFQWGTEQQLAFEDIKKALLSSPALGLPDITKPFELFIDENSGFAKGVLVQKLGPWKRPVAYLSKKLDTVASGWPPCLRMVAAIAILVKDAGKLTLGQPLTILTSHPVEALVRQPPNKWLSNARMTHYQAMLLDAERVHFGPTVSLNPATLLPLPSGGNHHDCLQILAETHGTRPDLTDQPLPDADLTWYTDGSSFIRNGEREAGAAVTTESEVIWAAPLPPGTSAQRAELIALTQALKMAEGKKLTVYTDSRYAFATTHVHGEIYRRRGWLTSEGKEIKNKNEILALLEALFLPKRLSIIHCPGHQKGDSPQAKGNRLADDTAKKAATETHSSLTVLPAGKRTADGSEFEKRTADGSEFESPKKKAKVE

SEQ ID NO: 1235 - protein, 2095 aa, synthetic construct
MPAAKRVKLDGGDKKYSIGLDIGTNSVGWAVITDEYKVPSKKFKVLGNTDRHSIKKNLIGALLFDSGETAEATRLKRTARRRYTRRKNRICYLQEIFSNEMAKVDDSFFHRLEESFLVEEDKKHERHPIFGNIVDEVAYHEKYPTIYHLRKKLVDSTDKADLRLIYLALAHMIKFRGHFLIEGDLNPDNSDVDKLFIQLVQTYNQLFEENPINASGVDAKAILSARLSKSRRLENLIAQLPGEKKNGLFGNLIALSLGLTPNFKSNFDLAEDAKLQLSKDTYDDDLDNLLAQIGDQYADLFLAAKNLSDAILLSDILRVNTEITKAPLSASMIKRYDEHHQDLTLLKALVRQQLPEKYKEIFFDQSKNGYAGYIDGGASQEEFYKFIKPILEKMDGTEELLVKLNREDLLRKQRTFDNGSIPHQIHLGELHAILRRQEDFYPFLKDNREKIEKILTFRIPYYVGPLARGNSRFAWMTRKSEETITPWNFEEVVDKGASAQSFIERMTNFDKNLPNEKVLPKHSLLYEYFTVYNELTKVKYVTEGMRKPAFLSGEQKKAIVDLLFKTNRKVTVKQLKEDYFKKIECFDSVEISGVEDRFNASLGTYHDLLKIIKDKDFLDNEENEDILEDIVLTLTLFEDREMIEERLKTYAHLFDDKVMKQLKRRRYTGWGRLSRKLINGIRDKQSGKTILDFLKSDGFANRNFMQLIHDDSLTFKEDIQKAQVSGQGDSLHEHIANLAGSPAIKKGILQTVKVVDELVKVMGRHKPENIVIEMARENQTTQKGQKNSRERMKRIEEGIKELGSQILKEHPVENTQLQNEKLYLYYLQNGRDMYVDQELDINRLSDYDVDHIVPQSFLKDDSIDNKVLTRSDKARGKSDNVPSEEVVKKMKNYWRQLLNAKLITQRKFDNLTKAERGGLSELDKAGFIKRQLVETRQITKHVAQILDSRMNTKYDENDKLIREVKVITLKSKLVSDFRKDFQFYKVREINNYHHAHDAYLNAVVGTALIKKYPKLESEFVYGDYKVYDVRKMIAKSEQEIGKATAKYFFYSNIMNFFKTEITLANGEIRKRPLIETNGETGEIVWDKGRDFATVRKVLSMPQVNIVKKTEVQTGGFSKESILPKRNSDKLIARKKDWDPKKYGGFDSPTVAYSVLVVAKVEKGKSKKLKSVKELLGITIMERSSFEKNPIDFLEAKGYKEVKKDLIIKLPKYSLFELENGRKRMLASAGELQKGNELALPSKYVNFLYLASHYEKLKGSPEDNEQKQLFVEQHKHYLDEIIEQISEFSKRVILADANLDKVLSAYNKHRDKPIREQAENIIHLFTLTNLGAPAAFKYFDTTIDRKRYTSTKEVLDATLIHQSITGLYETRIDLSQLGGDGGEAAAKGGGGGSGGTLQLEEEYRLFEPESTQKQEMDIWLKNFPQAWAETGGMGTAHCQAPVLIQLKATATPISIRQYPMPHEAYQGIKPHIRRMLDQGILKPCQSPWNTPLLPVKKPGTEDYRPVQDLREVNKRVEDIHPTVPNPYNLLSTLPPSHPWYTVLDLKDAFFCLRLHSESQLLFAFEWRDPEIGLSGQLTWTRLPQGFKNSPTLFNEALHSDLADFRVRYPALVLLQYVDDLLLAAATRTECLEGTKALLETLGNKGYRASAKKAQICLQEVTYLGYSLKDGQRWLTKARKEAILSIPVPKNSRQVREFLGKAGYCRLFIPGFAELAAPLYPLTRPGTLFQWGTEQQLAFEDIKKALLSSPALGLPDITKPFELFIDENSGFAKGVLVQKLGPWKRPVAYLSKKLDTVASGWPPCLRMVAAIAILVKDAGKLTLGQPLTILTSHPVEALVRQPPNKWLSNARMTHYQAMLLDAERVHFGPTVSLNPATLLPLPSGGNHHDCLQILAETHGTRPDLTDQPLPDADLTWYTDGSSFIRNGEREAGAAVTTESEVIWAAPLPPGTSAQRAELIALTQALKMAEGKKLTVYTDSRYAFATTHVHGEIYRRRGWLTSEGKEIKNKNEILALLEALFLPKRLSIIHCPGHQKGDSPQAKGNRLADDTAKKAATETHSSLTVLPAGKRTADGSEFEKRTADGSEFESPKKKAKVE

SEQ ID NO: 1236 - protein, 2092 aa, synthetic construct
MPAAKRVKLDGGDKKYSIGLDIGTNSVGWAVITDEYKVPSKKFKVLGNTDRHSIKKNLIGALLFDSGETAEATRLKRTARRRYTRRKNRICYLQEIFSNEMAKVDDSFFHRLEESFLVEEDKKHERHPIFGNIVDEVAYHEKYPTIYHLRKKLVDSTDKADLRLIYLALAHMIKFRGHFLIEGDLNPDNSDVDKLFIQLVQTYNQLFEENPINASGVDAKAILSARLSKSRRLENLIAQLPGEKKNGLFGNLIALSLGLTPNFKSNFDLAEDAKLQLSKDTYDDDLDNLLAQIGDQYADLFLAAKNLSDAILLSDILRVNTEITKAPLSASMIKRYDEHHQDLTLLKALVRQQLPEKYKEIFFDQSKNGYAGYIDGGASQEEFYKFIKPILEKMDGTEELLVKLNREDLLRKQRTFDNGSIPHQIHLGELHAILRRQEDFYPFLKDNREKIEKILTFRIPYYVGPLARGNSRFAWMTRKSEETITPWNFEEVVDKGASAQSFIERMTNFDKNLPNEKVLPKHSLLYEYFTVYNELTKVKYVTEGMRKPAFLSGEQKKAIVDLLFKTNRKVTVKQLKEDYFKKIECFDSVEISGVEDRFNASLGTYHDLLKIIKDKDFLDNEENEDILEDIVLTLTLFEDREMIEERLKTYAHLFDDKVMKQLKRRRYTGWGRLSRKLINGIRDKQSGKTILDFLKSDGFANRNFMQLIHDDSLTFKEDIQKAQVSGQGDSLHEHIANLAGSPAIKKGILQTVKVVDELVKVMGRHKPENIVIEMARENQTTQKGQKNSRERMKRIEEGIKELGSQILKEHPVENTQLQNEKLYLYYLQNGRDMYVDQELDINRLSDYDVDHIVPQSFLKDDSIDNKVLTRSDKARGKSDNVPSEEVVKKMKNYWRQLLNAKLITQRKFDNLTKAERGGLSELDKAGFIKRQLVETRQITKHVAQILDSRMNTKYDENDKLIREVKVITLKSKLVSDFRKDFQFYKVREINNYHHAHDAYLNAVVGTALIKKYPKLESEFVYGDYKVYDVRKMIAKSEQEIGKATAKYFFYSNIMNFFKTEITLANGEIRKRPLIETNGETGEIVWDKGRDFATVRKVLSMPQVNIVKKTEVQTGGFSKESILPKRNSDKLIARKKDWDPKKYGGFDSPTVAYSVLVVAKVEKGKSKKLKSVKELLGITIMERSSFEKNPIDFLEAKGYKEVKKDLIIKLPKYSLFELENGRKRMLASAGELQKGNELALPSKYVNFLYLASHYEKLKGSPEDNEQKQLFVEQHKHYLDEIIEQISEFSKRVILADANLDKVLSAYNKHRDKPIREQAENIIHLFTLTNLGAPAAFKYFDTTIDRKRYTSTKEVLDATLIHQSITGLYETRIDLSQLGGDGGGSSEAAAKGGTLQLEEEYRLFEPESTQKQEMDIWLKNFPQAWAETGGMGTAHCQAPVLIQLKATATPISIRQYPMPHEAYQGIKPHIRRMLDQGILKPCQSPWNTPLLPVKKPGTEDYRPVQDLREVNKRVEDIHPTVPNPYNLLSTLPPSHPWYTVLDLKDAFFCLRLHSESQLLFAFEWRDPEIGLSGQLTWTRLPQGFKNSPTLFNEALHSDLADFRVRYPALVLLQYVDDLLLAAATRTECLEGTKALLETLGNKGYRASAKKAQICLQEVTYLGYSLKDGQRWLTKARKEAILSIPVPKNSRQVREFLGKAGYCRLFIPGFAELAAPLYPLTRPGTLFQWGTEQQLAFEDIKKALLSSPALGLPDITKPFELFIDENSGFAKGVLVQKLGPWKRPVAYLSKKLDTVASGWPPCLRMVAAIAILVKDAGKLTLGQPLTILTSHPVEALVRQPPNKWLSNARMTHYQAMLLDAERVHFGPTVSLNPATLLPLPSGGNHHDCLQILAETHGTRPDLTDQPLPDADLTWYTDGSSFIRNGEREAGAAVTTESEVIWAAPLPPGTSAQRAELIALTQALKMAEGKKLTVYTDSRYAFATTHVHGEIYRRRGWLTSEGKEIKNKNEILALLEALFLPKRLSIIHCPGHQKGDSPQAKGNRLADDTAKKAATETHSSLTVLPAGKRTADGSEFEKRTADGSEFESPKKKAKVE

SEQ ID NO: 1237 - protein, 2095 aa, synthetic construct
MPAAKRVKLDGGDKKYSIGLDIGTNSVGWAVITDEYKVPSKKFKVLGNTDRHSIKKNLIGALLFDSGETAEATRLKRTARRRYTRRKNRICYLQEIFSNEMAKVDDSFFHRLEESFLVEEDKKHERHPIFGNIVDEVAYHEKYPTIYHLRKKLVDSTDKADLRLIYLALAHMIKFRGHFLIEGDLNPDNSDVDKLFIQLVQTYNQLFEENPINASGVDAKAILSARLSKSRRLENLIAQLPGEKKNGLFGNLIALSLGLTPNFKSNFDLAEDAKLQLSKDTYDDDLDNLLAQIGDQYADLFLAAKNLSDAILLSDILRVNTEITKAPLSASMIKRYDEHHQDLTLLKALVRQQLPEKYKEIFFDQSKNGYAGYIDGGASQEEFYKFIKPILEKMDGTEELLVKLNREDLLRKQRTFDNGSIPHQIHLGELHAILRRQEDFYPFLKDNREKIEKILTFRIPYYVGPLARGNSRFAWMTRKSEETITPWNFEEVVDKGASAQSFIERMTNFDKNLPNEKVLPKHSLLYEYFTVYNELTKVKYVTEGMRKPAFLSGEQKKAIVDLLFKTNRKVTVKQLKEDYFKKIECFDSVEISGVEDRFNASLGTYHDLLKIIKDKDFLDNEENEDILEDIVLTLTLFEDREMIEERLKTYAHLFDDKVMKQLKRRRYTGWGRLSRKLINGIRDKQSGKTILDFLKSDGFANRNFMQLIHDDSLTFKEDIQKAQVSGQGDSLHEHIANLAGSPAIKKGILQTVKVVDELVKVMGRHKPENIVIEMARENQTTQKGQKNSRERMKRIEEGIKELGSQILKEHPVENTQLQNEKLYLYYLQNGRDMYVDQELDINRLSDYDVDHIVPQSFLKDDSIDNKVLTRSDKARGKSDNVPSEEVVKKMKNYWRQLLNAKLITQRKFDNLTKAERGGLSELDKAGFIKRQLVETRQITKHVAQILDSRMNTKYDENDKLIREVKVITLKSKLVSDFRKDFQFYKVREINNYHHAHDAYLNAVVGTALIKKYPKLESEFVYGDYKVYDVRKMIAKSEQEIGKATAKYFFYSNIMNFFKTEITLANGEIRKRPLIETNGETGEIVWDKGRDFATVRKVLSMPQVNIVKKTEVQTGGFSKESILPKRNSDKLIARKKDWDPKKYGGFDSPTVAYSVLVVAKVEKGKSKKLKSVKELLGITIMERSSFEKNPIDFLEAKGYKEVKKDLIIKLPKYSLFELENGRKRMLASAGELQKGNELALPSKYVNFLYLASHYEKLKGSPEDNEQKQLFVEQHKHYLDEIIEQISEFSKRVILADANLDKVLSAYNKHRDKPIREQAENIIHLFTLTNLGAPAAFKYFDTTIDRKRYTSTKEVLDATLIHQSITGLYETRIDLSQLGGDGGGGSEAAAKGGGGGTLQLEEEYRLFEPESTQKQEMDIWLKNFPQAWAETGGMGTAHCQAPVLIQLKATATPISIRQYPMPHEAYQGIKPHIRRMLDQGILKPCQSPWNTPLLPVKKPGTEDYRPVQDLREVNKRVEDIHPTVPNPYNLLSTLPPSHPWYTVLDLKDAFFCLRLHSESQLLFAFEWRDPEIGLSGQLTWTRLPQGFKNSPTLFNEALHSDLADFRVRYPALVLLQYVDDLLLAAATRTECLEGTKALLETLGNKGYRASAKKAQICLQEVTYLGYSLKDGQRWLTKARKEAILSIPVPKNSRQVREFLGKAGYCRLFIPGFAELAAPLYPLTRPGTLFQWGTEQQLAFEDIKKALLSSPALGLPDITKPFELFIDENSGFAKGVLVQKLGPWKRPVAYLSKKLDTVASGWPPCLRMVAAIAILVKDAGKLTLGQPLTILTSHPVEALVRQPPNKWLSNARMTHYQAMLLDAERVHFGPTVSLNPATLLPLPSGGNHHDCLQILAETHGTRPDLTDQPLPDADLTWYTDGSSFIRNGEREAGAAVTTESEVIWAAPLPPGTSAQRAELIALTQALKMAEGKKLTVYTDSRYAFATTHVHGEIYRRRGWLTSEGKEIKNKNEILALLEALFLPKRLSIIHCPGHQKGDSPQAKGNRLADDTAKKAATETHSSLTVLPAGKRTADGSEFEKRTADGSEFESPKKKAKVE

SEQ ID NO: 1238 - protein, 2093 aa, synthetic construct
MPAAKRVKLDGGDKKYSIGLDIGTNSVGWAVITDEYKVPSKKFKVLGNTDRHSIKKNLIGALLFDSGETAEATRLKRTARRRYTRRKNRICYLQEIFSNEMAKVDDSFFHRLEESFLVEEDKKHERHPIFGNIVDEVAYHEKYPTIYHLRKKLVDSTDKADLRLIYLALAHMIKFRGHFLIEGDLNPDNSDVDKLFIQLVQTYNQLFEENPINASGVDAKAILSARLSKSRRLENLIAQLPGEKKNGLFGNLIALSLGLTPNFKSNFDLAEDAKLQLSKDTYDDDLDNLLAQIGDQYADLFLAAKNLSDAILLSDILRVNTEITKAPLSASMIKRYDEHHQDLTLLKALVRQQLPEKYKEIFFDQSKNGYAGYIDGGASQEEFYKFIKPILEKMDGTEELLVKLNREDLLRKQRTFDNGSIPHQIHLGELHAILRRQEDFYPFLKDNREKIEKILTFRIPYYVGPLARGNSRFAWMTRKSEETITPWNFEEVVDKGASAQSFIERMTNFDKNLPNEKVLPKHSLLYEYFTVYNELTKVKYVTEGMRKPAFLSGEQKKAIVDLLFKTNRKVTVKQLKEDYFKKIECFDSVEISGVEDRFNASLGTYHDLLKIIKDKDFLDNEENEDILEDIVLTLTLFEDREMIEERLKTYAHLFDDKVMKQLKRRRYTGWGRLSRKLINGIRDKQSGKTILDFLKSDGFANRNFMQLIHDDSLTFKEDIQKAQVSGQGDSLHEHIANLAGSPAIKKGILQTVKVVDELVKVMGRHKPENIVIEMARENQTTQKGQKNSRERMKRIEEGIKELGSQILKEHPVENTQLQNEKLYLYYLQNGRDMYVDQELDINRLSDYDVDHIVPQSFLKDDSIDNKVLTRSDKARGKSDNVPSEEVVKKMKNYWRQLLNAKLITQRKFDNLTKAERGGLSELDKAGFIKRQLVETRQITKHVAQILDSRMNTKYDENDKLIREVKVITLKSKLVSDFRKDFQFYKVREINNYHHAHDAYLNAVVGTALIKKYPKLESEFVYGDYKVYDVRKMIAKSEQEIGKATAKYFFYSNIMNFFKTEITLANGEIRKRPLIETNGETGEIVWDKGRDFATVRKVLSMPQVNIVKKTEVQTGGFSKESILPKRNSDKLIARKKDWDPKKYGGFDSPTVAYSVLVVAKVEKGKSKKLKSVKELLGITIMERSSFEKNPIDFLEAKGYKEVKKDLIIKLPKYSLFELENGRKRMLASAGELQKGNELALPSKYVNFLYLASHYEKLKGSPEDNEQKQLFVEQHKHYLDEIIEQISEFSKRVILADANLDKVLSAYNKHRDKPIREQAENIIHLFTLTNLGAPAAFKYFDTTIDRKRYTSTKEVLDATLIHQSITGLYETRIDLSQLGGDGGPAPGSSGGGGGTLQLEEEYRLFEPESTQKQEMDIWLKNFPQAWAETGGMGTAHCQAPVLIQLKATATPISIRQYPMPHEAYQGIKPHIRRMLDQGILKPCQSPWNTPLLPVKKPGTEDYRPVQDLREVNKRVEDIHPTVPNPYNLLSTLPPSHPWYTVLDLKDAFFCLRLHSESQLLFAFEWRDPEIGLSGQLTWTRLPQGFKNSPTLFNEALHSDLADFRVRYPALVLLQYVDDLLLAAATRTECLEGTKALLETLGNKGYRASAKKAQICLQEVTYLGYSLKDGQRWLTKARKEAILSIPVPKNSRQVREFLGKAGYCRLFIPGFAELAAPLYPLTRPGTLFQWGTEQQLAFEDIKKALLSSPALGLPDITKPFELFIDENSGFAKGVLVQKLGPWKRPVAYLSKKLDTVASGWPPCLRMVAAIAILVKDAGKLTLGQPLTILTSHPVEALVRQPPNKWLSNARMTHYQAMLLDAERVHFGPTVSLNPATLLPLPSGGNHHDCLQILAETHGTRPDLTDQPLPDADLTWYTDGSSFIRNGEREAGAAVTTESEVIWAAPLPPGTSAQRAELIALTQALKMAEGKKLTVYTDSRYAFATTHVHGEIYRRRGWLTSEGKEIKNKNEILALLEALFLPKRLSIIHCPGHQKGDSPQAKGNRLADDTAKKAATETHSSLTVLPAGKRTADGSEFEKRTADGSEFESPKKKAKVE

SEQ ID NO: 1239 - protein, 2095 aa, synthetic construct
MPAAKRVKLDGGDKKYSIGLDIGTNSVGWAVITDEYKVPSKKFKVLGNTDRHSIKKNLIGALLFDSGETAEATRLKRTARRRYTRRKNRICYLQEIFSNEMAKVDDSFFHRLEESFLVEEDKKHERHPIFGNIVDEVAYHEKYPTIYHLRKKLVDSTDKADLRLIYLALAHMIKFRGHFLIEGDLNPDNSDVDKLFIQLVQTYNQLFEENPINASGVDAKAILSARLSKSRRLENLIAQLPGEKKNGLFGNLIALSLGLTPNFKSNFDLAEDAKLQLSKDTYDDDLDNLLAQIGDQYADLFLAAKNLSDAILLSDILRVNTEITKAPLSASMIKRYDEHHQDLTLLKALVRQQLPEKYKEIFFDQSKNGYAGYIDGGASQEEFYKFIKPILEKMDGTEELLVKLNREDLLRKQRTFDNGSIPHQIHLGELHAILRRQEDFYPFLKDNREKIEKILTFRIPYYVGPLARGNSRFAWMTRKSEETITPWNFEEVVDKGASAQSFIERMTNFDKNLPNEKVLPKHSLLYEYFTVYNELTKVKYVTEGMRKPAFLSGEQKKAIVDLLFKTNRKVTVKQLKEDYFKKIECFDSVEISGVEDRFNASLGTYHDLLKIIKDKDFLDNEENEDILEDIVLTLTLFEDREMIEERLKTYAHLFDDKVMKQLKRRRYTGWGRLSRKLINGIRDKQSGKTILDFLKSDGFANRNFMQLIHDDSLTFKEDIQKAQVSGQGDSLHEHIANLAGSPAIKKGILQTVKVVDELVKVMGRHKPENIVIEMARENQTTQKGQKNSRERMKRIEEGIKELGSQILKEHPVENTQLQNEKLYLYYLQNGRDMYVDQELDINRLSDYDVDHIVPQSFLKDDSIDNKVLTRSDKARGKSDNVPSEEVVKKMKNYWRQLLNAKLITQRKFDNLTKAERGGLSELDKAGFIKRQLVETRQITKHVAQILDSRMNTKYDENDKLIREVKVITLKSKLVSDFRKDFQFYKVREINNYHHAHDAYLNAVVGTALIKKYPKLESEFVYGDYKVYDVRKMIAKSEQEIGKATAKYFFYSNIMNFFKTEITLANGEIRKRPLIETNGETGEIVWDKGRDFATVRKVLSMPQVNIVKKTEVQTGGFSKESILPKRNSDKLIARKKDWDPKKYGGFDSPTVAYSVLVVAKVEKGKSKKLKSVKELLGITIMERSSFEKNPIDFLEAKGYKEVKKDLIIKLPKYSLFELENGRKRMLASAGELQKGNELALPSKYVNFLYLASHYEKLKGSPEDNEQKQLFVEQHKHYLDEIIEQISEFSKRVILADANLDKVLSAYNKHRDKPIREQAENIIHLFTLTNLGAPAAFKYFDTTIDRKRYTSTKEVLDATLIHQSITGLYETRIDLSQLGGDGGPAPGGSEAAAKGGTLQLEEEYRLFEPESTQKQEMDIWLKNFPQAWAETGGMGTAHCQAPVLIQLKATATPISIRQYPMPHEAYQGIKPHIRRMLDQGILKPCQSPWNTPLLPVKKPGTEDYRPVQDLREVNKRVEDIHPTVPNPYNLLSTLPPSHPWYTVLDLKDAFFCLRLHSESQLLFAFEWRDPEIGLSGQLTWTRLPQGFKNSPTLFNEALHSDLADFRVRYPALVLLQYVDDLLLAAATRTECLEGTKALLETLGNKGYRASAKKAQICLQEVTYLGYSLKDGQRWLTKARKEAILSIPVPKNSRQVREFLGKAGYCRLFIPGFAELAAPLYPLTRPGTLFQWGTEQQLAFEDIKKALLSSPALGLPDITKPFELFIDENSGFAKGVLVQKLGPWKRPVAYLSKKLDTVASGWPPCLRMVAAIAILVKDAGKLTLGQPLTILTSHPVEALVRQPPNKWLSNARMTHYQAMLLDAERVHFGPTVSLNPATLLPLPSGGNHHDCLQILAETHGTRPDLTDQPLPDADLTWYTDGSSFIRNGEREAGAAVTTESEVIWAAPLPPGTSAQRAELIALTQALKMAEGKKLTVYTDSRYAFATTHVHGEIYRRRGWLTSEGKEIKNKNEILALLEALFLPKRLSIIHCPGHQKGDSPQAKGNRLADDTAKKAATETHSSLTVLPAGKRTADGSEFEKRTADGSEFESPKKKAKVE

SEQ ID NO: 1240 - protein, 2093 aa, synthetic construct
MPAAKRVKLDGGDKKYSIGLDIGTNSVGWAVITDEYKVPSKKFKVLGNTDRHSIKKNLIGALLFDSGETAEATRLKRTARRRYTRRKNRICYLQEIFSNEMAKVDDSFFHRLEESFLVEEDKKHERHPIFGNIVDEVAYHEKYPTIYHLRKKLVDSTDKADLRLIYLALAHMIKFRGHFLIEGDLNPDNSDVDKLFIQLVQTYNQLFEENPINASGVDAKAILSARLSKSRRLENLIAQLPGEKKNGLFGNLIALSLGLTPNFKSNFDLAEDAKLQLSKDTYDDDLDNLLAQIGDQYADLFLAAKNLSDAILLSDILRVNTEITKAPLSASMIKRYDEHHQDLTLLKALVRQQLPEKYKEIFFDQSKNGYAGYIDGGASQEEFYKFIKPILEKMDGTEELLVKLNREDLLRKQRTFDNGSIPHQIHLGELHAILRRQEDFYPFLKDNREKIEKILTFRIPYYVGPLARGNSRFAWMTRKSEETITPWNFEEVVDKGASAQSFIERMTNFDKNLPNEKVLPKHSLLYEYFTVYNELTKVKYVTEGMRKPAFLSGEQKKAIVDLLFKTNRKVTVKQLKEDYFKKIECFDSVEISGVEDRFNASLGTYHDLLKIIKDKDFLDNEENEDILEDIVLTLTLFEDREMIEERLKTYAHLFDDKVMKQLKRRRYTGWGRLSRKLINGIRDKQSGKTILDFLKSDGFANRNFMQLIHDDSLTFKEDIQKAQVSGQGDSLHEHIANLAGSPAIKKGILQTVKVVDELVKVMGRHKPENIVIEMARENQTTQKGQKNSRERMKRIEEGIKELGSQILKEHPVENTQLQNEKLYLYYLQNGRDMYVDQELDINRLSDYDVDHIVPQSFLKDDSIDNKVLTRSDKARGKSDNVPSEEVVKKMKNYWRQLLNAKLITQRKFDNLTKAERGGLSELDKAGFIKRQLVETRQITKHVAQILDSRMNTKYDENDKLIREVKVITLKSKLVSDFRKDFQFYKVREINNYHHAHDAYLNAVVGTALIKKYPKLESEFVYGDYKVYDVRKMIAKSEQEIGKATAKYFFYSNIMNFFKTEITLANGEIRKRPLIETNGETGEIVWDKGRDFATVRKVLSMPQVNIVKKTEVQTGGFSKESILPKRNSDKLIARKKDWDPKKYGGFDSPTVAYSVLVVAKVEKGKSKKLKSVKELLGITIMERSSFEKNPIDFLEAKGYKEVKKDLIIKLPKYSLFELENGRKRMLASAGELQKGNELALPSKYVNFLYLASHYEKLKGSPEDNEQKQLFVEQHKHYLDEIIEQISEFSKRVILADANLDKVLSAYNKHRDKPIREQAENIIHLFTLTNLGAPAAFKYFDTTIDRKRYTSTKEVLDATLIHQSITGLYETRIDLSQLGGDGGGSSGGGPAPGGTLQLEEEYRLFEPESTQKQEMDIWLKNFPQAWAETGGMGTAHCQAPVLIQLKATATPISIRQYPMPHEAYQGIKPHIRRMLDQGILKPCQSPWNTPLLPVKKPGTEDYRPVQDLREVNKRVEDIHPTVPNPYNLLSTLPPSHPWYTVLDLKDAFFCLRLHSESQLLFAFEWRDPEIGLSGQLTWTRLPQGFKNSPTLFNEALHSDLADFRVRYPALVLLQYVDDLLLAAATRTECLEGTKALLETLGNKGYRASAKKAQICLQEVTYLGYSLKDGQRWLTKARKEAILSIPVPKNSRQVREFLGKAGYCRLFIPGFAELAAPLYPLTRPGTLFQWGTEQQLAFEDIKKALLSSPALGLPDITKPFELFIDENSGFAKGVLVQKLGPWKRPVAYLSKKLDTVASGWPPCLRMVAAIAILVKDAGKLTLGQPLTILTSHPVEALVRQPPNKWLSNARMTHYQAMLLDAERVHFGPTVSLNPATLLPLPSGGNHHDCLQILAETHGTRPDLTDQPLPDADLTWYTDGSSFIRNGEREAGAAVTTESEVIWAAPLPPGTSAQRAELIALTQALKMAEGKKLTVYTDSRYAFATTHVHGEIYRRRGWLTSEGKEIKNKNEILALLEALFLPKRLSIIHCPGHQKGDSPQAKGNRLADDTAKKAATETHSSLTVLPAGKRTADGSEFEKRTADGSEFESPKKKAKVE

SEQ ID NO: 1241 - protein, 2095 aa, synthetic construct
MPAAKRVKLDGGDKKYSIGLDIGTNSVGWAVITDEYKVPSKKFKVLGNTDRHSIKKNLIGALLFDSGETAEATRLKRTARRRYTRRKNRICYLQEIFSNEMAKVDDSFFHRLEESFLVEEDKKHERHPIFGNIVDEVAYHEKYPTIYHLRKKLVDSTDKADLRLIYLALAHMIKFRGHFLIEGDLNPDNSDVDKLFIQLVQTYNQLFEENPINASGVDAKAILSARLSKSRRLENLIAQLPGEKKNGLFGNLIALSLGLTPNFKSNFDLAEDAKLQLSKDTYDDDLDNLLAQIGDQYADLFLAAKNLSDAILLSDILRVNTEITKAPLSASMIKRYDEHHQDLTLLKALVRQQLPEKYKEIFFDQSKNGYAGYIDGGASQEEFYKFIKPILEKMDGTEELLVKLNREDLLRKQRTFDNGSIPHQIHLGELHAILRRQEDFYPFLKDNREKIEKILTFRIPYYVGPLARGNSRFAWMTRKSEETITPWNFEEVVDKGASAQSFIERMTNFDKNLPNEKVLPKHSLLYEYFTVYNELTKVKYVTEGMRKPAFLSGEQKKAIVDLLFKTNRKVTVKQLKEDYFKKIECFDSVEISGVEDRFNASLGTYHDLLKIIKDKDFLDNEENEDILEDIVLTLTLFEDREMIEERLKTYAHLFDDKVMKQLKRRRYTGWGRLSRKLINGIRDKQSGKTILDFLKSDGFANRNFMQLIHDDSLTFKEDIQKAQVSGQGDSLHEHIANLAGSPAIKKGILQTVKVVDELVKVMGRHKPENIVIEMARENQTTQKGQKNSRERMKRIEEGIKELGSQILKEHPVENTQLQNEKLYLYYLQNGRDMYVDQELDINRLSDYDVDHIVPQSFLKDDSIDNKVLTRSDKARGKSDNVPSEEVVKKMKNYWRQLLNAKLITQRKFDNLTKAERGGLSELDKAGFIKRQLVETRQITKHVAQILDSRMNTKYDENDKLIREVKVITLKSKLVSDFRKDFQFYKVREINNYHHAHDAYLNAVVGTALIKKYPKLESEFVYGDYKVYDVRKMIAKSEQEIGKATAKYFFYSNIMNFFKTEITLANGEIRKRPLIETNGETGEIVWDKGRDFATVRKVLSMPQVNIVKKTEVQTGGFSKESILPKRNSDKLIARKKDWDPKKYGGFDSPTVAYSVLVVAKVEKGKSKKLKSVKELLGITIMERSSFEKNPIDFLEAKGYKEVKKDLIIKLPKYSLFELENGRKRMLASAGELQKGNELALPSKYVNFLYLASHYEKLKGSPEDNEQKQLFVEQHKHYLDEIIEQISEFSKRVILADANLDKVLSAYNKHRDKPIREQAENIIHLFTLTNLGAPAAFKYFDTTIDRKRYTSTKEVLDATLIHQSITGLYETRIDLSQLGGDGGEAAAKGGSGSSGGTLQLEEEYRLFEPESTQKQEMDIWLKNFPQAWAETGGMGTAHCQAPVLIQLKATATPISIRQYPMPHEAYQGIKPHIRRMLDQGILKPCQSPWNTPLLPVKKPGTEDYRPVQDLREVNKRVEDIHPTVPNPYNLLSTLPPSHPWYTVLDLKDAFFCLRLHSESQLLFAFEWRDPEIGLSGQLTWTRLPQGFKNSPTLFNEALHSDLADFRVRYPALVLLQYVDDLLLAAATRTECLEGTKALLETLGNKGYRASAKKAQICLQEVTYLGYSLKDGQRWLTKARKEAILSIPVPKNSRQVREFLGKAGYCRLFIPGFAELAAPLYPLTRPGTLFQWGTEQQLAFEDIKKALLSSPALGLPDITKPFELFIDENSGFAKGVLVQKLGPWKRPVAYLSKKLDTVASGWPPCLRMVAAIAILVKDAGKLTLGQPLTILTSHPVEALVRQPPNKWLSNARMTHYQAMLLDAERVHFGPTVSLNPATLLPLPSGGNHHDCLQILAETHGTRPDLTDQPLPDADLTWYTDGSSFIRNGEREAGAAVTTESEVIWAAPLPPGTSAQRAELIALTQALKMAEGKKLTVYTDSRYAFATTHVHGEIYRRRGWLTSEGKEIKNKNEILALLEALFLPKRLSIIHCPGHQKGDSPQAKGNRLADDTAKKAATETHSSLTVLPAGKRTADGSEFEKRTADGSEFESPKKKAKVE

SEQ ID NO: 1242 - protein, 2095 aa, synthetic construct
MPAAKRVKLDGGDKKYSIGLDIGTNSVGWAVITDEYKVPSKKFKVLGNTDRHSIKKNLIGALLFDSGETAEATRLKRTARRRYTRRKNRICYLQEIFSNEMAKVDDSFFHRLEESFLVEEDKKHERHPIFGNIVDEVAYHEKYPTIYHLRKKLVDSTDKADLRLIYLALAHMIKFRGHFLIEGDLNPDNSDVDKLFIQLVQTYNQLFEENPINASGVDAKAILSARLSKSRRLENLIAQLPGEKKNGLFGNLIALSLGLTPNFKSNFDLAEDAKLQLSKDTYDDDLDNLLAQIGDQYADLFLAAKNLSDAILLSDILRVNTEITKAPLSASMIKRYDEHHQDLTLLKALVRQQLPEKYKEIFFDQSKNGYAGYIDGGASQEEFYKFIKPILEKMDGTEELLVKLNREDLLRKQRTFDNGSIPHQIHLGELHAILRRQEDFYPFLKDNREKIEKILTFRIPYYVGPLARGNSRFAWMTRKSEETITPWNFEEVVDKGASAQSFIERMTNFDKNLPNEKVLPKHSLLYEYFTVYNELTKVKYVTEGMRKPAFLSGEQKKAIVDLLFKTNRKVTVKQLKEDYFKKIECFDSVEISGVEDRFNASLGTYHDLLKIIKDKDFLDNEENEDILEDIVLTLTLFEDREMIEERLKTYAHLFDDKVMKQLKRRRYTGWGRLSRKLINGIRDKQSGKTILDFLKSDGFANRNFMQLIHDDSLTFKEDIQKAQVSGQGDSLHEHIANLAGSPAIKKGILQTVKVVDELVKVMGRHKPENIVIEMARENQTTQKGQKNSRERMKRIEEGIKELGSQILKEHPVENTQLQNEKLYLYYLQNGRDMYVDQELDINRLSDYDVDHIVPQSFLKDDSIDNKVLTRSDKARGKSDNVPSEEVVKKMKNYWRQLLNAKLITQRKFDNLTKAERGGLSELDKAGFIKRQLVETRQITKHVAQILDSRMNTKYDENDKLIREVKVITLKSKLVSDFRKDFQFYKVREINNYHHAHDAYLNAVVGTALIKKYPKLESEFVYGDYKVYDVRKMIAKSEQEIGKATAKYFFYSNIMNFFKTEITLANGEIRKRPLIETNGETGEIVWDKGRDFATVRKVLSMPQVNIVKKTEVQTGGFSKESILPKRNSDKLIARKKDWDPKKYGGFDSPTVAYSVLVVAKVEKGKSKKLKSVKELLGITIMERSSFEKNPIDFLEAKGYKEVKKDLIIKLPKYSLFELENGRKRMLASAGELQKGNELALPSKYVNFLYLASHYEKLKGSPEDNEQKQLFVEQHKHYLDEIIEQISEFSKRVILADANLDKVLSAYNKHRDKPIREQAENIIHLFTLTNLGAPAAFKYFDTTIDRKRYTSTKEVLDATLIHQSITGLYETRIDLSQLGGDGGGSSGGSEAAAKGGTLQLEEEYRLFEPESTQKQEMDIWLKNFPQAWAETGGMGTAHCQAPVLIQLKATATPISIRQYPMPHEAYQGIKPHIRRMLDQGILKPCQSPWNTPLLPVKKPGTEDYRPVQDLREVNKRVEDIHPTVPNPYNLLSTLPPSHPWYTVLDLKDAFFCLRLHSESQLLFAFEWRDPEIGLSGQLTWTRLPQGFKNSPTLFNEALHSDLADFRVRYPALVLLQYVDDLLLAAATRTECLEGTKALLETLGNKGYRASAKKAQICLQEVTYLGYSLKDGQRWLTKARKEAILSIPVPKNSRQVREFLGKAGYCRLFIPGFAELAAPLYPLTRPGTLFQWGTEQQLAFEDIKKALLSSPALGLPDITKPFELFIDENSGFAKGVLVQKLGPWKRPVAYLSKKLDTVASGWPPCLRMVAAIAILVKDAGKLTLGQPLTILTSHPVEALVRQPPNKWLSNARMTHYQAMLLDAERVHFGPTVSLNPATLLPLPSGGNHHDCLQILAETHGTRPDLTDQPLPDADLTWYTDGSSFIRNGEREAGAAVTTESEVIWAAPLPPGTSAQRAELIALTQALKMAEGKKLTVYTDSRYAFATTHVHGEIYRRRGWLTSEGKEIKNKNEILALLEALFLPKRLSIIHCPGHQKGDSPQAKGNRLADDTAKKAATETHSSLTVLPAGKRTADGSEFEKRTADGSEFESPKKKAKVE

SEQ ID NO: 1243 - protein, 2099 aa, synthetic construct
MPAAKRVKLDGGDKKYSIGLDIGTNSVGWAVITDEYKVPSKKFKVLGNTDRHSIKKNLIGALLFDSGETAEATRLKRTARRRYTRRKNRICYLQEIFSNEMAKVDDSFFHRLEESFLVEEDKKHERHPIFGNIVDEVAYHEKYPTIYHLRKKLVDSTDKADLRLIYLALAHMIKFRGHFLIEGDLNPDNSDVDKLFIQLVQTYNQLFEENPINASGVDAKAILSARLSKSRRLENLIAQLPGEKKNGLFGNLIALSLGLTPNFKSNFDLAEDAKLQLSKDTYDDDLDNLLAQIGDQYADLFLAAKNLSDAILLSDILRVNTEITKAPLSASMIKRYDEHHQDLTLLKALVRQQLPEKYKEIFFDQSKNGYAGYIDGGASQEEFYKFIKPILEKMDGTEELLVKLNREDLLRKQRTFDNGSIPHQIHLGELHAILRRQEDFYPFLKDNREKIEKILTFRIPYYVGPLARGNSRFAWMTRKSEETITPWNFEEVVDKGASAQSFIERMTNFDKNLPNEKVLPKHSLLYEYFTVYNELTKVKYVTEGMRKPAFLSGEQKKAIVDLLFKTNRKVTVKQLKEDYFKKIECFDSVEISGVEDRFNASLGTYHDLLKIIKDKDFLDNEENEDILEDIVLTLTLFEDREMIEERLKTYAHLFDDKVMKQLKRRRYTGWGRLSRKLINGIRDKQSGKTILDFLKSDGFANRNFMQLIHDDSLTFKEDIQKAQVSGQGDSLHEHIANLAGSPAIKKGILQTVKVVDELVKVMGRHKPENIVIEMARENQTTQKGQKNSRERMKRIEEGIKELGSQILKEHPVENTQLQNEKLYLYYLQNGRDMYVDQELDINRLSDYDVDHIVPQSFLKDDSIDNKVLTRSDKARGKSDNVPSEEVVKKMKNYWRQLLNAKLITQRKFDNLTKAERGGLSELDKAGFIKRQLVETRQITKHVAQILDSRMNTKYDENDKLIREVKVITLKSKLVSDFRKDFQFYKVREINNYHHAHDAYLNAVVGTALIKKYPKLESEFVYGDYKVYDVRKMIAKSEQEIGKATAKYFFYSNIMNFFKTEITLANGEIRKRPLIETNGETGEIVWDKGRDFATVRKVLSMPQVNIVKKTEVQTGGFSKESILPKRNSDKLIARKKDWDPKKYGGFDSPTVAYSVLVVAKVEKGKSKKLKSVKELLGITIMERSSFEKNPIDFLEAKGYKEVKKDLIIKLPKYSLFELENGRKRMLASAGELQKGNELALPSKYVNFLYLASHYEKLKGSPEDNEQKQLFVEQHKHYLDEIIEQISEFSKRVILADANLDKVLSAYNKHRDKPIREQAENIIHLFTLTNLGAPAAFKYFDTTIDRKRYTSTKEVLDATLIHQSITGLYETRIDLSQLGGDGGEAAAKGGGGSEAAAKGGTLQLEEEYRLFEPESTQKQEMDIWLKNFPQAWAETGGMGTAHCQAPVLIQLKATATPISIRQYPMPHEAYQGIKPHIRRMLDQGILKPCQSPWNTPLLPVKKPGTEDYRPVQDLREVNKRVEDIHPTVPNPYNLLSTLPPSHPWYTVLDLKDAFFCLRLHSESQLLFAFEWRDPEIGLSGQLTWTRLPQGFKNSPTLFNEALHSDLADFRVRYPALVLLQYVDDLLLAAATRTECLEGTKALLETLGNKGYRASAKKAQICLQEVTYLGYSLKDGQRWLTKARKEAILSIPVPKNSRQVREFLGKAGYCRLFIPGFAELAAPLYPLTRPGTLFQWGTEQQLAFEDIKKALLSSPALGLPDITKPFELFIDENSGFAKGVLVQKLGPWKRPVAYLSKKLDTVASGWPPCLRMVAAIAILVKDAGKLTLGQPLTILTSHPVEALVRQPPNKWLSNARMTHYQAMLLDAERVHFGPTVSLNPATLLPLPSGGNHHDCLQILAETHGTRPDLTDQPLPDADLTWYTDGSSFIRNGEREAGAAVTTESEVIWAAPLPPGTSAQRAELIALTQALKMAEGKKLTVYTDSRYAFATTHVHGEIYRRRGWLTSEGKEIKNKNEILALLEALFLPKRLSIIHCPGHQKGDSPQAKGNRLADDTAKKAATETHSSLTVLPAGKRTADGSEFEKRTADGSEFESPKKKAKVE

SEQ ID NO: 1244 - protein, 2093 aa, synthetic construct
MPAAKRVKLDGGDKKYSIGLDIGTNSVGWAVITDEYKVPSKKFKVLGNTDRHSIKKNLIGALLFDSGETAEATRLKRTARRRYTRRKNRICYLQEIFSNEMAKVDDSFFHRLEESFLVEEDKKHERHPIFGNIVDEVAYHEKYPTIYHLRKKLVDSTDKADLRLIYLALAHMIKFRGHFLIEGDLNPDNSDVDKLFIQLVQTYNQLFEENPINASGVDAKAILSARLSKSRRLENLIAQLPGEKKNGLFGNLIALSLGLTPNFKSNFDLAEDAKLQLSKDTYDDDLDNLLAQIGDQYADLFLAAKNLSDAILLSDILRVNTEITKAPLSASMIKRYDEHHQDLTLLKALVRQQLPEKYKEIFFDQSKNGYAGYIDGGASQEEFYKFIKPILEKMDGTEELLVKLNREDLLRKQRTFDNGSIPHQIHLGELHAILRRQEDFYPFLKDNREKIEKILTFRIPYYVGPLARGNSRFAWMTRKSEETITPWNFEEVVDKGASAQSFIERMTNFDKNLPNEKVLPKHSLLYEYFTVYNELTKVKYVTEGMRKPAFLSGEQKKAIVDLLFKTNRKVTVKQLKEDYFKKIECFDSVEISGVEDRFNASLGTYHDLLKIIKDKDFLDNEENEDILEDIVLTLTLFEDREMIEERLKTYAHLFDDKVMKQLKRRRYTGWGRLSRKLINGIRDKQSGKTILDFLKSDGFANRNFMQLIHDDSLTFKEDIQKAQVSGQGDSLHEHIANLAGSPAIKKGILQTVKVVDELVKVMGRHKPENIVIEMARENQTTQKGQKNSRERMKRIEEGIKELGSQILKEHPVENTQLQNEKLYLYYLQNGRDMYVDQELDINRLSDYDVDHIVPQSFLKDDSIDNKVLTRSDKARGKSDNVPSEEVVKKMKNYWRQLLNAKLITQRKFDNLTKAERGGLSELDKAGFIKRQLVETRQITKHVAQILDSRMNTKYDENDKLIREVKVITLKSKLVSDFRKDFQFYKVREINNYHHAHDAYLNAVVGTALIKKYPKLESEFVYGDYKVYDVRKMIAKSEQEIGKATAKYFFYSNIMNFFKTEITLANGEIRKRPLIETNGETGEIVWDKGRDFATVRKVLSMPQVNIVKKTEVQTGGFSKESILPKRNSDKLIARKKDWDPKKYGGFDSPTVAYSVLVVAKVEKGKSKKLKSVKELLGITIMERSSFEKNPIDFLEAKGYKEVKKDLIIKLPKYSLFELENGRKRMLASAGELQKGNELALPSKYVNFLYLASHYEKLKGSPEDNEQKQLFVEQHKHYLDEIIEQISEFSKRVILADANLDKVLSAYNKHRDKPIREQAENIIHLFTLTNLGAPAAFKYFDTTIDRKRYTSTKEVLDATLIHQSITGLYETRIDLSQLGGDGGGGSGSSPAPGGTLQLEEEYRLFEPESTQKQEMDIWLKNFPQAWAETGGMGTAHCQAPVLIQLKATATPISIRQYPMPHEAYQGIKPHIRRMLDQGILKPCQSPWNTPLLPVKKPGTEDYRPVQDLREVNKRVEDIHPTVPNPYNLLSTLPPSHPWYTVLDLKDAFFCLRLHSESQLLFAFEWRDPEIGLSGQLTWTRLPQGFKNSPTLFNEALHSDLADFRVRYPALVLLQYVDDLLLAAATRTECLEGTKALLETLGNKGYRASAKKAQICLQEVTYLGYSLKDGQRWLTKARKEAILSIPVPKNSRQVREFLGKAGYCRLFIPGFAELAAPLYPLTRPGTLFQWGTEQQLAFEDIKKALLSSPALGLPDITKPFELFIDENSGFAKGVLVQKLGPWKRPVAYLSKKLDTVASGWPPCLRMVAAIAILVKDAGKLTLGQPLTILTSHPVEALVRQPPNKWLSNARMTHYQAMLLDAERVHFGPTVSLNPATLLPLPSGGNHHDCLQILAETHGTRPDLTDQPLPDADLTWYTDGSSFIRNGEREAGAAVTTESEVIWAAPLPPGTSAQRAELIALTQALKMAEGKKLTVYTDSRYAFATTHVHGEIYRRRGWLTSEGKEIKNKNEILALLEALFLPKRLSIIHCPGHQKGDSPQAKGNRLADDTAKKAATETHSSLTVLPAGKRTADGSEFEKRTADGSEFESPKKKAKVE

SEQ ID NO: 1245 - protein, 2090 aa, synthetic construct
MPAAKRVKLDGGDKKYSIGLDIGTNSVGWAVITDEYKVPSKKFKVLGNTDRHSIKKNLIGALLFDSGETAEATRLKRTARRRYTRRKNRICYLQEIFSNEMAKVDDSFFHRLEESFLVEEDKKHERHPIFGNIVDEVAYHEKYPTIYHLRKKLVDSTDKADLRLIYLALAHMIKFRGHFLIEGDLNPDNSDVDKLFIQLVQTYNQLFEENPINASGVDAKAILSARLSKSRRLENLIAQLPGEKKNGLFGNLIALSLGLTPNFKSNFDLAEDAKLQLSKDTYDDDLDNLLAQIGDQYADLFLAAKNLSDAILLSDILRVNTEITKAPLSASMIKRYDEHHQDLTLLKALVRQQLPEKYKEIFFDQSKNGYAGYIDGGASQEEFYKFIKPILEKMDGTEELLVKLNREDLLRKQRTFDNGSIPHQIHLGELHAILRRQEDFYPFLKDNREKIEKILTFRIPYYVGPLARGNSRFAWMTRKSEETITPWNFEEVVDKGASAQSFIERMTNFDKNLPNEKVLPKHSLLYEYFTVYNELTKVKYVTEGMRKPAFLSGEQKKAIVDLLFKTNRKVTVKQLKEDYFKKIECFDSVEISGVEDRFNASLGTYHDLLKIIKDKDFLDNEENEDILEDIVLTLTLFEDREMIEERLKTYAHLFDDKVMKQLKRRRYTGWGRLSRKLINGIRDKQSGKTILDFLKSDGFANRNFMQLIHDDSLTFKEDIQKAQVSGQGDSLHEHIANLAGSPAIKKGILQTVKVVDELVKVMGRHKPENIVIEMARENQTTQKGQKNSRERMKRIEEGIKELGSQILKEHPVENTQLQNEKLYLYYLQNGRDMYVDQELDINRLSDYDVDHIVPQSFLKDDSIDNKVLTRSDKARGKSDNVPSEEVVKKMKNYWRQLLNAKLITQRKFDNLTKAERGGLSELDKAGFIKRQLVETRQITKHVAQILDSRMNTKYDENDKLIREVKVITLKSKLVSDFRKDFQFYKVREINNYHHAHDAYLNAVVGTALIKKYPKLESEFVYGDYKVYDVRKMIAKSEQEIGKATAKYFFYSNIMNFFKTEITLANGEIRKRPLIETNGETGEIVWDKGRDFATVRKVLSMPQVNIVKKTEVQTGGFSKESILPKRNSDKLIARKKDWDPKKYGGFDSPTVAYSVLVVAKVEKGKSKKLKSVKELLGITIMERSSFEKNPIDFLEAKGYKEVKKDLIIKLPKYSLFELENGRKRMLASAGELQKGNELALPSKYVNFLYLASHYEKLKGSPEDNEQKQLFVEQHKHYLDEIIEQISEFSKRVILADANLDKVLSAYNKHRDKPIREQAENIIHLFTLTNLGAPAAFKYFDTTIDRKRYTSTKEVLDATLIHQSITGLYETRIDLSQLGGDGGGSSPAPGGTLQLEEEYRLFEPESTQKQEMDIWLKNFPQAWAETGGMGTAHCQAPVLIQLKATATPISIRQYPMPHEAYQGIKPHIRRMLDQGILKPCQSPWNTPLLPVKKPGTEDYRPVQDLREVNKRVEDIHPTVPNPYNLLSTLPPSHPWYTVLDLKDAFFCLRLHSESQLLFAFEWRDPEIGLSGQLTWTRLPQGFKNSPTLFNEALHSDLADFRVRYPALVLLQYVDDLLLAAATRTECLEGTKALLETLGNKGYRASAKKAQICLQEVTYLGYSLKDGQRWLTKARKEAILSIPVPKNSRQVREFLGKAGYCRLFIPGFAELAAPLYPLTRPGTLFQWGTEQQLAFEDIKKALLSSPALGLPDITKPFELFIDENSGFAKGVLVQKLGPWKRPVAYLSKKLDTVASGWPPCLRMVAAIAILVKDAGKLTLGQPLTILTSHPVEALVRQPPNKWLSNARMTHYQAMLLDAERVHFGPTVSLNPATLLPLPSGGNHHDCLQILAETHGTRPDLTDQPLPDADLTWYTDGSSFIRNGEREAGAAVTTESEVIWAAPLPPGTSAQRAELIALTQALKMAEGKKLTVYTDSRYAFATTHVHGEIYRRRGWLTSEGKEIKNKNEILALLEALFLPKRLSIIHCPGHQKGDSPQAKGNRLADDTAKKAATETHSSLTVLPAGKRTADGSEFEKRTADGSEFESPKKKAKVE

SEQ ID NO: 1246 - protein, 2089 aa, synthetic construct
MPAAKRVKLDGGDKKYSIGLDIGTNSVGWAVITDEYKVPSKKFKVLGNTDRHSIKKNLIGALLFDSGETAEATRLKRTARRRYTRRKNRICYLQEIFSNEMAKVDDSFFHRLEESFLVEEDKKHERHPIFGNIVDEVAYHEKYPTIYHLRKKLVDSTDKADLRLIYLALAHMIKFRGHFLIEGDLNPDNSDVDKLFIQLVQTYNQLFEENPINASGVDAKAILSARLSKSRRLENLIAQLPGEKKNGLFGNLIALSLGLTPNFKSNFDLAEDAKLQLSKDTYDDDLDNLLAQIGDQYADLFLAAKNLSDAILLSDILRVNTEITKAPLSASMIKRYDEHHQDLTLLKALVRQQLPEKYKEIFFDQSKNGYAGYIDGGASQEEFYKFIKPILEKMDGTEELLVKLNREDLLRKQRTFDNGSIPHQIHLGELHAILRRQEDFYPFLKDNREKIEKILTFRIPYYVGPLARGNSRFAWMTRKSEETITPWNFEEVVDKGASAQSFIERMTNFDKNLPNEKVLPKHSLLYEYFTVYNELTKVKYVTEGMRKPAFLSGEQKKAIVDLLFKTNRKVTVKQLKEDYFKKIECFDSVEISGVEDRFNASLGTYHDLLKIIKDKDFLDNEENEDILEDIVLTLTLFEDREMIEERLKTYAHLFDDKVMKQLKRRRYTGWGRLSRKLINGIRDKQSGKTILDFLKSDGFANRNFMQLIHDDSLTFKEDIQKAQVSGQGDSLHEHIANLAGSPAIKKGILQTVKVVDELVKVMGRHKPENIVIEMARENQTTQKGQKNSRERMKRIEEGIKELGSQILKEHPVENTQLQNEKLYLYYLQNGRDMYVDQELDINRLSDYDVDHIVPQSFLKDDSIDNKVLTRSDKARGKSDNVPSEEVVKKMKNYWRQLLNAKLITQRKFDNLTKAERGGLSELDKAGFIKRQLVETRQITKHVAQILDSRMNTKYDENDKLIREVKVITLKSKLVSDFRKDFQFYKVREINNYHHAHDAYLNAVVGTALIKKYPKLESEFVYGDYKVYDVRKMIAKSEQEIGKATAKYFFYSNIMNFFKTEITLANGEIRKRPLIETNGETGEIVWDKGRDFATVRKVLSMPQVNIVKKTEVQTGGFSKESILPKRNSDKLIARKKDWDPKKYGGFDSPTVAYSVLVVAKVEKGKSKKLKSVKELLGITIMERSSFEKNPIDFLEAKGYKEVKKDLIIKLPKYSLFELENGRKRMLASAGELQKGNELALPSKYVNFLYLASHYEKLKGSPEDNEQKQLFVEQHKHYLDEIIEQISEFSKRVILADANLDKVLSAYNKHRDKPIREQAENIIHLFTLTNLGAPAAFKYFDTTIDRKRYTSTKEVLDATLIHQSITGLYETRIDLSQLGGDGGPAPAPGGTLQLEEEYRLFEPESTQKQEMDIWLKNFPQAWAETGGMGTAHCQAPVLIQLKATATPISIRQYPMPHEAYQGIKPHIRRMLDQGILKPCQSPWNTPLLPVKKPGTEDYRPVQDLREVNKRVEDIHPTVPNPYNLLSTLPPSHPWYTVLDLKDAFFCLRLHSESQLLFAFEWRDPEIGLSGQLTWTRLPQGFKNSPTLFNEALHSDLADFRVRYPALVLLQYVDDLLLAAATRTECLEGTKALLETLGNKGYRASAKKAQICLQEVTYLGYSLKDGQRWLTKARKEAILSIPVPKNSRQVREFLGKAGYCRLFIPGFAELAAPLYPLTRPGTLFQWGTEQQLAFEDIKKALLSSPALGLPDITKPFELFIDENSGFAKGVLVQKLGPWKRPVAYLSKKLDTVASGWPPCLRMVAAIAILVKDAGKLTLGQPLTILTSHPVEALVRQPPNKWLSNARMTHYQAMLLDAERVHFGPTVSLNPATLLPLPSGGNHHDCLQILAETHGTRPDLTDQPLPDADLTWYTDGSSFIRNGEREAGAAVTTESEVIWAAPLPPGTSAQRAELIALTQALKMAEGKKLTVYTDSRYAFATTHVHGEIYRRRGWLTSEGKEIKNKNEILALLEALFLPKRLSIIHCPGHQKGDSPQAKGNRLADDTAKKAATETHSSLTVLPAGKRTADGSEFEKRTADGSEFESPKKKAKVE

SEQ ID NO: 1247 - protein, 2093 aa, synthetic construct
MPAAKRVKLDGGDKKYSIGLDIGTNSVGWAVITDEYKVPSKKFKVLGNTDRHSIKKNLIGALLFDSGETAEATRLKRTARRRYTRRKNRICYLQEIFSNEMAKVDDSFFHRLEESFLVEEDKKHERHPIFGNIVDEVAYHEKYPTIYHLRKKLVDSTDKADLRLIYLALAHMIKFRGHFLIEGDLNPDNSDVDKLFIQLVQTYNQLFEENPINASGVDAKAILSARLSKSRRLENLIAQLPGEKKNGLFGNLIALSLGLTPNFKSNFDLAEDAKLQLSKDTYDDDLDNLLAQIGDQYADLFLAAKNLSDAILLSDILRVNTEITKAPLSASMIKRYDEHHQDLTLLKALVRQQLPEKYKEIFFDQSKNGYAGYIDGGASQEEFYKFIKPILEKMDGTEELLVKLNREDLLRKQRTFDNGSIPHQIHLGELHAILRRQEDFYPFLKDNREKIEKILTFRIPYYVGPLARGNSRFAWMTRKSEETITPWNFEEVVDKGASAQSFIERMTNFDKNLPNEKVLPKHSLLYEYFTVYNELTKVKYVTEGMRKPAFLSGEQKKAIVDLLFKTNRKVTVKQLKEDYFKKIECFDSVEISGVEDRFNASLGTYHDLLKIIKDKDFLDNEENEDILEDIVLTLTLFEDREMIEERLKTYAHLFDDKVMKQLKRRRYTGWGRLSRKLINGIRDKQSGKTILDFLKSDGFANRNFMQLIHDDSLTFKEDIQKAQVSGQGDSLHEHIANLAGSPAIKKGILQTVKVVDELVKVMGRHKPENIVIEMARENQTTQKGQKNSRERMKRIEEGIKELGSQILKEHPVENTQLQNEKLYLYYLQNGRDMYVDQELDINRLSDYDVDHIVPQSFLKDDSIDNKVLTRSDKARGKSDNVPSEEVVKKMKNYWRQLLNAKLITQRKFDNLTKAERGGLSELDKAGFIKRQLVETRQITKHVAQILDSRMNTKYDENDKLIREVKVITLKSKLVSDFRKDFQFYKVREINNYHHAHDAYLNAVVGTALIKKYPKLESEFVYGDYKVYDVRKMIAKSEQEIGKATAKYFFYSNIMNFFKTEITLANGEIRKRPLIETNGETGEIVWDKGRDFATVRKVLSMPQVNIVKKTEVQTGGFSKESILPKRNSDKLIARKKDWDPKKYGGFDSPTVAYSVLVVAKVEKGKSKKLKSVKELLGITIMERSSFEKNPIDFLEAKGYKEVKKDLIIKLPKYSLFELENGRKRMLASAGELQKGNELALPSKYVNFLYLASHYEKLKGSPEDNEQKQLFVEQHKHYLDEIIEQISEFSKRVILADANLDKVLSAYNKHRDKPIREQAENIIHLFTLTNLGAPAAFKYFDTTIDRKRYTSTKEVLDATLIHQSITGLYETRIDLSQLGGDGGGGGGSSGGSGGTLQLEEEYRLFEPESTQKQEMDIWLKNFPQAWAETGGMGTAHCQAPVLIQLKATATPISIRQYPMPHEAYQGIKPHIRRMLDQGILKPCQSPWNTPLLPVKKPGTEDYRPVQDLREVNKRVEDIHPTVPNPYNLLSTLPPSHPWYTVLDLKDAFFCLRLHSESQLLFAFEWRDPEIGLSGQLTWTRLPQGFKNSPTLFNEALHSDLADFRVRYPALVLLQYVDDLLLAAATRTECLEGTKALLETLGNKGYRASAKKAQICLQEVTYLGYSLKDGQRWLTKARKEAILSIPVPKNSRQVREFLGKAGYCRLFIPGFAELAAPLYPLTRPGTLFQWGTEQQLAFEDIKKALLSSPALGLPDITKPFELFIDENSGFAKGVLVQKLGPWKRPVAYLSKKLDTVASGWPPCLRMVAAIAILVKDAGKLTLGQPLTILTSHPVEALVRQPPNKWLSNARMTHYQAMLLDAERVHFGPTVSLNPATLLPLPSGGNHHDCLQILAETHGTRPDLTDQPLPDADLTWYTDGSSFIRNGEREAGAAVTTESEVIWAAPLPPGTSAQRAELIALTQALKMAEGKKLTVYTDSRYAFATTHVHGEIYRRRGWLTSEGKEIKNKNEILALLEALFLPKRLSIIHCPGHQKGDSPQAKGNRLADDTAKKAATETHSSLTVLPAGKRTADGSEFEKRTADGSEFESPKKKAKVE

SEQ ID NO: 1248 - protein, 2090 aa, synthetic construct
MPAAKRVKLDGGDKKYSIGLDIGTNSVGWAVITDEYKVPSKKFKVLGNTDRHSIKKNLIGALLFDSGETAEATRLKRTARRRYTRRKNRICYLQEIFSNEMAKVDDSFFHRLEESFLVEEDKKHERHPIFGNIVDEVAYHEKYPTIYHLRKKLVDSTDKADLRLIYLALAHMIKFRGHFLIEGDLNPDNSDVDKLFIQLVQTYNQLFEENPINASGVDAKAILSARLSKSRRLENLIAQLPGEKKNGLFGNLIALSLGLTPNFKSNFDLAEDAKLQLSKDTYDDDLDNLLAQIGDQYADLFLAAKNLSDAILLSDILRVNTEITKAPLSASMIKRYDEHHQDLTLLKALVRQQLPEKYKEIFFDQSKNGYAGYIDGGASQEEFYKFIKPILEKMDGTEELLVKLNREDLLRKQRTFDNGSIPHQIHLGELHAILRRQEDFYPFLKDNREKIEKILTFRIPYYVGPLARGNSRFAWMTRKSEETITPWNFEEVVDKGASAQSFIERMTNFDKNLPNEKVLPKHSLLYEYFTVYNELTKVKYVTEGMRKPAFLSGEQKKAIVDLLFKTNRKVTVKQLKEDYFKKIECFDSVEISGVEDRFNASLGTYHDLLKIIKDKDFLDNEENEDILEDIVLTLTLFEDREMIEERLKTYAHLFDDKVMKQLKRRRYTGWGRLSRKLINGIRDKQSGKTILDFLKSDGFANRNFMQLIHDDSLTFKEDIQKAQVSGQGDSLHEHIANLAGSPAIKKGILQTVKVVDELVKVMGRHKPENIVIEMARENQTTQKGQKNSRERMKRIEEGIKELGSQILKEHPVENTQLQNEKLYLYYLQNGRDMYVDQELDINRLSDYDVDHIVPQSFLKDDSIDNKVLTRSDKARGKSDNVPSEEVVKKMKNYWRQLLNAKLITQRKFDNLTKAERGGLSELDKAGFIKRQLVETRQITKHVAQILDSRMNTKYDENDKLIREVKVITLKSKLVSDFRKDFQFYKVREINNYHHAHDAYLNAVVGTALIKKYPKLESEFVYGDYKVYDVRKMIAKSEQEIGKATAKYFFYSNIMNFFKTEITLANGEIRKRPLIETNGETGEIVWDKGRDFATVRKVLSMPQVNIVKKTEVQTGGFSKESILPKRNSDKLIARKKDWDPKKYGGFDSPTVAYSVLVVAKVEKGKSKKLKSVKELLGITIMERSSFEKNPIDFLEAKGYKEVKKDLIIKLPKYSLFELENGRKRMLASAGELQKGNELALPSKYVNFLYLASHYEKLKGSPEDNEQKQLFVEQHKHYLDEIIEQISEFSKRVILADANLDKVLSAYNKHRDKPIREQAENIIHLFTLTNLGAPAAFKYFDTTIDRKRYTSTKEVLDATLIHQSITGLYETRIDLSQLGGDGGPAPGGGGGTLQLEEEYRLFEPESTQKQEMDIWLKNFPQAWAETGGMGTAHCQAPVLIQLKATATPISIRQYPMPHEAYQGIKPHIRRMLDQGILKPCQSPWNTPLLPVKKPGTEDYRPVQDLREVNKRVEDIHPTVPNPYNLLSTLPPSHPWYTVLDLKDAFFCLRLHSESQLLFAFEWRDPEIGLSGQLTWTRLPQGFKNSPTLFNEALHSDLADFRVRYPALVLLQYVDDLLLAAATRTECLEGTKALLETLGNKGYRASAKKAQICLQEVTYLGYSLKDGQRWLTKARKEAILSIPVPKNSRQVREFLGKAGYCRLFIPGFAELAAPLYPLTRPGTLFQWGTEQQLAFEDIKKALLSSPALGLPDITKPFELFIDENSGFAKGVLVQKLGPWKRPVAYLSKKLDTVASGWPPCLRMVAAIAILVKDAGKLTLGQPLTILTSHPVEALVRQPPNKWLSNARMTHYQAMLLDAERVHFGPTVSLNPATLLPLPSGGNHHDCLQILAETHGTRPDLTDQPLPDADLTWYTDGSSFIRNGEREAGAAVTTESEVIWAAPLPPGTSAQRAELIALTQALKMAEGKKLTVYTDSRYAFATTHVHGEIYRRRGWLTSEGKEIKNKNEILALLEALFLPKRLSIIHCPGHQKGDSPQAKGNRLADDTAKKAATETHSSLTVLPAGKRTADGSEFEKRTADGSEFESPKKKAKVE

SEQ ID NO: 1249 - protein, 2090 aa, synthetic construct
MPAAKRVKLDGGDKKYSIGLDIGTNSVGWAVITDEYKVPSKKFKVLGNTDRHSIKKNLIGALLFDSGETAEATRLKRTARRRYTRRKNRICYLQEIFSNEMAKVDDSFFHRLEESFLVEEDKKHERHPIFGNIVDEVAYHEKYPTIYHLRKKLVDSTDKADLRLIYLALAHMIKFRGHFLIEGDLNPDNSDVDKLFIQLVQTYNQLFEENPINASGVDAKAILSARLSKSRRLENLIAQLPGEKKNGLFGNLIALSLGLTPNFKSNFDLAEDAKLQLSKDTYDDDLDNLLAQIGDQYADLFLAAKNLSDAILLSDILRVNTEITKAPLSASMIKRYDEHHQDLTLLKALVRQQLPEKYKEIFFDQSKNGYAGYIDGGASQEEFYKFIKPILEKMDGTEELLVKLNREDLLRKQRTFDNGSIPHQIHLGELHAILRRQEDFYPFLKDNREKIEKILTFRIPYYVGPLARGNSRFAWMTRKSEETITPWNFEEVVDKGASAQSFIERMTNFDKNLPNEKVLPKHSLLYEYFTVYNELTKVKYVTEGMRKPAFLSGEQKKAIVDLLFKTNRKVTVKQLKEDYFKKIECFDSVEISGVEDRFNASLGTYHDLLKIIKDKDFLDNEENEDILEDIVLTLTLFEDREMIEERLKTYAHLFDDKVMKQLKRRRYTGWGRLSRKLINGIRDKQSGKTILDFLKSDGFANRNFMQLIHDDSLTFKEDIQKAQVSGQGDSLHEHIANLAGSPAIKKGILQTVKVVDELVKVMGRHKPENIVIEMARENQTTQKGQKNSRERMKRIEEGIKELGSQILKEHPVENTQLQNEKLYLYYLQNGRDMYVDQELDINRLSDYDVDHIVPQSFLKDDSIDNKVLTRSDKARGKSDNVPSEEVVKKMKNYWRQLLNAKLITQRKFDNLTKAERGGLSELDKAGFIKRQLVETRQITKHVAQILDSRMNTKYDENDKLIREVKVITLKSKLVSDFRKDFQFYKVREINNYHHAHDAYLNAVVGTALIKKYPKLESEFVYGDYKVYDVRKMIAKSEQEIGKATAKYFFYSNIMNFFKTEITLANGEIRKRPLIETNGETGEIVWDKGRDFATVRKVLSMPQVNIVKKTEVQTGGFSKESILPKRNSDKLIARKKDWDPKKYGGFDSPTVAYSVLVVAKVEKGKSKKLKSVKELLGITIMERSSFEKNPIDFLEAKGYKEVKKDLIIKLPKYSLFELENGRKRMLASAGELQKGNELALPSKYVNFLYLASHYEKLKGSPEDNEQKQLFVEQHKHYLDEIIEQISEFSKRVILADANLDKVLSAYNKHRDKPIREQAENIIHLFTLTNLGAPAAFKYFDTTIDRKRYTSTKEVLDATLIHQSITGLYETRIDLSQLGGDGGGSSGGGGGTLQLEEEYRLFEPESTQKQEMDIWLKNFPQAWAETGGMGTAHCQAPVLIQLKATATPISIRQYPMPHEAYQGIKPHIRRMLDQGILKPCQSPWNTPLLPVKKPGTEDYRPVQDLREVNKRVEDIHPTVPNPYNLLSTLPPSHPWYTVLDLKDAFFCLRLHSESQLLFAFEWRDPEIGLSGQLTWTRLPQGFKNSPTLFNEALHSDLADFRVRYPALVLLQYVDDLLLAAATRTECLEGTKALLETLGNKGYRASAKKAQICLQEVTYLGYSLKDGQRWLTKARKEAILSIPVPKNSRQVREFLGKAGYCRLFIPGFAELAAPLYPLTRPGTLFQWGTEQQLAFEDIKKALLSSPALGLPDITKPFELFIDENSGFAKGVLVQKLGPWKRPVAYLSKKLDTVASGWPPCLRMVAAIAILVKDAGKLTLGQPLTILTSHPVEALVRQPPNKWLSNARMTHYQAMLLDAERVHFGPTVSLNPATLLPLPSGGNHHDCLQILAETHGTRPDLTDQPLPDADLTWYTDGSSFIRNGEREAGAAVTTESEVIWAAPLPPGTSAQRAELIALTQALKMAEGKKLTVYTDSRYAFATTHVHGEIYRRRGWLTSEGKEIKNKNEILALLEALFLPKRLSIIHCPGHQKGDSPQAKGNRLADDTAKKAATETHSSLTVLPAGKRTADGSEFEKRTADGSEFESPKKKAKVE

SEQ ID NO: 1250 - protein, 2090 aa, synthetic construct
MPAAKRVKLDGGDKKYSIGLDIGTNSVGWAVITDEYKVPSKKFKVLGNTDRHSIKKNLIGALLFDSGETAEATRLKRTARRRYTRRKNRICYLQEIFSNEMAKVDDSFFHRLEESFLVEEDKKHERHPIFGNIVDEVAYHEKYPTIYHLRKKLVDSTDKADLRLIYLALAHMIKFRGHFLIEGDLNPDNSDVDKLFIQLVQTYNQLFEENPINASGVDAKAILSARLSKSRRLENLIAQLPGEKKNGLFGNLIALSLGLTPNFKSNFDLAEDAKLQLSKDTYDDDLDNLLAQIGDQYADLFLAAKNLSDAILLSDILRVNTEITKAPLSASMIKRYDEHHQDLTLLKALVRQQLPEKYKEIFFDQSKNGYAGYIDGGASQEEFYKFIKPILEKMDGTEELLVKLNREDLLRKQRTFDNGSIPHQIHLGELHAILRRQEDFYPFLKDNREKIEKILTFRIPYYVGPLARGNSRFAWMTRKSEETITPWNFEEVVDKGASAQSFIERMTNFDKNLPNEKVLPKHSLLYEYFTVYNELTKVKYVTEGMRKPAFLSGEQKKAIVDLLFKTNRKVTVKQLKEDYFKKIECFDSVEISGVEDRFNASLGTYHDLLKIIKDKDFLDNEENEDILEDIVLTLTLFEDREMIEERLKTYAHLFDDKVMKQLKRRRYTGWGRLSRKLINGIRDKQSGKTILDFLKSDGFANRNFMQLIHDDSLTFKEDIQKAQVSGQGDSLHEHIANLAGSPAIKKGILQTVKVVDELVKVMGRHKPENIVIEMARENQTTQKGQKNSRERMKRIEEGIKELGSQILKEHPVENTQLQNEKLYLYYLQNGRDMYVDQELDINRLSDYDVDHIVPQSFLKDDSIDNKVLTRSDKARGKSDNVPSEEVVKKMKNYWRQLLNAKLITQRKFDNLTKAERGGLSELDKAGFIKRQLVETRQITKHVAQILDSRMNTKYDENDKLIREVKVITLKSKLVSDFRKDFQFYKVREINNYHHAHDAYLNAVVGTALIKKYPKLESEFVYGDYKVYDVRKMIAKSEQEIGKATAKYFFYSNIMNFFKTEITLANGEIRKRPLIETNGETGEIVWDKGRDFATVRKVLSMPQVNIVKKTEVQTGGFSKESILPKRNSDKLIARKKDWDPKKYGGFDSPTVAYSVLVVAKVEKGKSKKLKSVKELLGITIMERSSFEKNPIDFLEAKGYKEVKKDLIIKLPKYSLFELENGRKRMLASAGELQKGNELALPSKYVNFLYLASHYEKLKGSPEDNEQKQLFVEQHKHYLDEIIEQISEFSKRVILADANLDKVLSAYNKHRDKPIREQAENIIHLFTLTNLGAPAAFKYFDTTIDRKRYTSTKEVLDATLIHQSITGLYETRIDLSQLGGDGGGSSGSSGGTLQLEEEYRLFEPESTQKQEMDIWLKNFPQAWAETGGMGTAHCQAPVLIQLKATATPISIRQYPMPHEAYQGIKPHIRRMLDQGILKPCQSPWNTPLLPVKKPGTEDYRPVQDLREVNKRVEDIHPTVPNPYNLLSTLPPSHPWYTVLDLKDAFFCLRLHSESQLLFAFEWRDPEIGLSGQLTWTRLPQGFKNSPTLFNEALHSDLADFRVRYPALVLLQYVDDLLLAAATRTECLEGTKALLETLGNKGYRASAKKAQICLQEVTYLGYSLKDGQRWLTKARKEAILSIPVPKNSRQVREFLGKAGYCRLFIPGFAELAAPLYPLTRPGTLFQWGTEQQLAFEDIKKALLSSPALGLPDITKPFELFIDENSGFAKGVLVQKLGPWKRPVAYLSKKLDTVASGWPPCLRMVAAIAILVKDAGKLTLGQPLTILTSHPVEALVRQPPNKWLSNARMTHYQAMLLDAERVHFGPTVSLNPATLLPLPSGGNHHDCLQILAETHGTRPDLTDQPLPDADLTWYTDGSSFIRNGEREAGAAVTTESEVIWAAPLPPGTSAQRAELIALTQALKMAEGKKLTVYTDSRYAFATTHVHGEIYRRRGWLTSEGKEIKNKNEILALLEALFLPKRLSIIHCPGHQKGDSPQAKGNRLADDTAKKAATETHSSLTVLPAGKRTADGSEFEKRTADGSEFESPKKKAKVE

SEQ ID NO: 1251 - protein, 2088 aa, synthetic construct
MPAAKRVKLDGGDKKYSIGLDIGTNSVGWAVITDEYKVPSKKFKVLGNTDRHSIKKNLIGALLFDSGETAEATRLKRTARRRYTRRKNRICYLQEIFSNEMAKVDDSFFHRLEESFLVEEDKKHERHPIFGNIVDEVAYHEKYPTIYHLRKKLVDSTDKADLRLIYLALAHMIKFRGHFLIEGDLNPDNSDVDKLFIQLVQTYNQLFEENPINASGVDAKAILSARLSKSRRLENLIAQLPGEKKNGLFGNLIALSLGLTPNFKSNFDLAEDAKLQLSKDTYDDDLDNLLAQIGDQYADLFLAAKNLSDAILLSDILRVNTEITKAPLSASMIKRYDEHHQDLTLLKALVRQQLPEKYKEIFFDQSKNGYAGYIDGGASQEEFYKFIKPILEKMDGTEELLVKLNREDLLRKQRTFDNGSIPHQIHLGELHAILRRQEDFYPFLKDNREKIEKILTFRIPYYVGPLARGNSRFAWMTRKSEETITPWNFEEVVDKGASAQSFIERMTNFDKNLPNEKVLPKHSLLYEYFTVYNELTKVKYVTEGMRKPAFLSGEQKKAIVDLLFKTNRKVTVKQLKEDYFKKIECFDSVEISGVEDRFNASLGTYHDLLKIIKDKDFLDNEENEDILEDIVLTLTLFEDREMIEERLKTYAHLFDDKVMKQLKRRRYTGWGRLSRKLINGIRDKQSGKTILDFLKSDGFANRNFMQLIHDDSLTFKEDIQKAQVSGQGDSLHEHIANLAGSPAIKKGILQTVKVVDELVKVMGRHKPENIVIEMARENQTTQKGQKNSRERMKRIEEGIKELGSQILKEHPVENTQLQNEKLYLYYLQNGRDMYVDQELDINRLSDYDVDHIVPQSFLKDDSIDNKVLTRSDKARGKSDNVPSEEVVKKMKNYWRQLLNAKLITQRKFDNLTKAERGGLSELDKAGFIKRQLVETRQITKHVAQILDSRMNTKYDENDKLIREVKVITLKSKLVSDFRKDFQFYKVREINNYHHAHDAYLNAVVGTALIKKYPKLESEFVYGDYKVYDVRKMIAKSEQEIGKATAKYFFYSNIMNFFKTEITLANGEIRKRPLIETNGETGEIVWDKGRDFATVRKVLSMPQVNIVKKTEVQTGGFSKESILPKRNSDKLIARKKDWDPKKYGGFDSPTVAYSVLVVAKVEKGKSKKLKSVKELLGITIMERSSFEKNPIDFLEAKGYKEVKKDLIIKLPKYSLFELENGRKRMLASAGELQKGNELALPSKYVNFLYLASHYEKLKGSPEDNEQKQLFVEQHKHYLDEIIEQISEFSKRVILADANLDKVLSAYNKHRDKPIREQAENIIHLFTLTNLGAPAAFKYFDTTIDRKRYTSTKEVLDATLIHQSITGLYETRIDLSQLGGDGGGGGGGGTLQLEEEYRLFEPESTQKQEMDIWLKNFPQAWAETGGMGTAHCQAPVLIQLKATATPISIRQYPMPHEAYQGIKPHIRRMLDQGILKPCQSPWNTPLLPVKKPGTEDYRPVQDLREVNKRVEDIHPTVPNPYNLLSTLPPSHPWYTVLDLKDAFFCLRLHSESQLLFAFEWRDPEIGLSGQLTWTRLPQGFKNSPTLFNEALHSDLADFRVRYPALVLLQYVDDLLLAAATRTECLEGTKALLETLGNKGYRASAKKAQICLQEVTYLGYSLKDGQRWLTKARKEAILSIPVPKNSRQVREFLGKAGYCRLFIPGFAELAAPLYPLTRPGTLFQWGTEQQLAFEDIKKALLSSPALGLPDITKPFELFIDENSGFAKGVLVQKLGPWKRPVAYLSKKLDTVASGWPPCLRMVAAIAILVKDAGKLTLGQPLTILTSHPVEALVRQPPNKWLSNARMTHYQAMLLDAERVHFGPTVSLNPATLLPLPSGGNHHDCLQILAETHGTRPDLTDQPLPDADLTWYTDGSSFIRNGEREAGAAVTTESEVIWAAPLPPGTSAQRAELIALTQALKMAEGKKLTVYTDSRYAFATTHVHGEIYRRRGWLTSEGKEIKNKNEILALLEALFLPKRLSIIHCPGHQKGDSPQAKGNRLADDTAKKAATETHSSLTVLPAGKRTADGSEFEKRTADGSEFESPKKKAKVE

SEQ ID NO: 1252 - protein, 2090 aa, synthetic construct
MPAAKRVKLDGGDKKYSIGLDIGTNSVGWAVITDEYKVPSKKFKVLGNTDRHSIKKNLIGALLFDSGETAEATRLKRTARRRYTRRKNRICYLQEIFSNEMAKVDDSFFHRLEESFLVEEDKKHERHPIFGNIVDEVAYHEKYPTIYHLRKKLVDSTDKADLRLIYLALAHMIKFRGHFLIEGDLNPDNSDVDKLFIQLVQTYNQLFEENPINASGVDAKAILSARLSKSRRLENLIAQLPGEKKNGLFGNLIALSLGLTPNFKSNFDLAEDAKLQLSKDTYDDDLDNLLAQIGDQYADLFLAAKNLSDAILLSDILRVNTEITKAPLSASMIKRYDEHHQDLTLLKALVRQQLPEKYKEIFFDQSKNGYAGYIDGGASQEEFYKFIKPILEKMDGTEELLVKLNREDLLRKQRTFDNGSIPHQIHLGELHAILRRQEDFYPFLKDNREKIEKILTFRIPYYVGPLARGNSRFAWMTRKSEETITPWNFEEVVDKGASAQSFIERMTNFDKNLPNEKVLPKHSLLYEYFTVYNELTKVKYVTEGMRKPAFLSGEQKKAIVDLLFKTNRKVTVKQLKEDYFKKIECFDSVEISGVEDRFNASLGTYHDLLKIIKDKDFLDNEENEDILEDIVLTLTLFEDREMIEERLKTYAHLFDDKVMKQLKRRRYTGWGRLSRKLINGIRDKQSGKTILDFLKSDGFANRNFMQLIHDDSLTFKEDIQKAQVSGQGDSLHEHIANLAGSPAIKKGILQTVKVVDELVKVMGRHKPENIVIEMARENQTTQKGQKNSRERMKRIEEGIKELGSQILKEHPVENTQLQNEKLYLYYLQNGRDMYVDQELDINRLSDYDVDHIVPQSFLKDDSIDNKVLTRSDKARGKSDNVPSEEVVKKMKNYWRQLLNAKLITQRKFDNLTKAERGGLSELDKAGFIKRQLVETRQITKHVAQILDSRMNTKYDENDKLIREVKVITLKSKLVSDFRKDFQFYKVREINNYHHAHDAYLNAVVGTALIKKYPKLESEFVYGDYKVYDVRKMIAKSEQEIGKATAKYFFYSNIMNFFKTEITLANGEIRKRPLIETNGETGEIVWDKGRDFATVRKVLSMPQVNIVKKTEVQTGGFSKESILPKRNSDKLIARKKDWDPKKYGGFDSPTVAYSVLVVAKVEKGKSKKLKSVKELLGITIMERSSFEKNPIDFLEAKGYKEVKKDLIIKLPKYSLFELENGRKRMLASAGELQKGNELALPSKYVNFLYLASHYEKLKGSPEDNEQKQLFVEQHKHYLDEIIEQISEFSKRVILADANLDKVLSAYNKHRDKPIREQAENIIHLFTLTNLGAPAAFKYFDTTIDRKRYTSTKEVLDATLIHQSITGLYETRIDLSQLGGDGGPAPGSSGGTLQLEEEYRLFEPESTQKQEMDIWLKNFPQAWAETGGMGTAHCQAPVLIQLKATATPISIRQYPMPHEAYQGIKPHIRRMLDQGILKPCQSPWNTPLLPVKKPGTEDYRPVQDLREVNKRVEDIHPTVPNPYNLLSTLPPSHPWYTVLDLKDAFFCLRLHSESQLLFAFEWRDPEIGLSGQLTWTRLPQGFKNSPTLFNEALHSDLADFRVRYPALVLLQYVDDLLLAAATRTECLEGTKALLETLGNKGYRASAKKAQICLQEVTYLGYSLKDGQRWLTKARKEAILSIPVPKNSRQVREFLGKAGYCRLFIPGFAELAAPLYPLTRPGTLFQWGTEQQLAFEDIKKALLSSPALGLPDITKPFELFIDENSGFAKGVLVQKLGPWKRPVAYLSKKLDTVASGWPPCLRMVAAIAILVKDAGKLTLGQPLTILTSHPVEALVRQPPNKWLSNARMTHYQAMLLDAERVHFGPTVSLNPATLLPLPSGGNHHDCLQILAETHGTRPDLTDQPLPDADLTWYTDGSSFIRNGEREAGAAVTTESEVIWAAPLPPGTSAQRAELIALTQALKMAEGKKLTVYTDSRYAFATTHVHGEIYRRRGWLTSEGKEIKNKNEILALLEALFLPKRLSIIHCPGHQKGDSPQAKGNRLADDTAKKAATETHSSLTVLPAGKRTADGSEFEKRTADGSEFESPKKKAKVE

SEQ ID NO: 1253 - protein, 2095 aa, synthetic construct
MPAAKRVKLDGGDKKYSIGLDIGTNSVGWAVITDEYKVPSKKFKVLGNTDRHSIKKNLIGALLFDSGETAEATRLKRTARRRYTRRKNRICYLQEIFSNEMAKVDDSFFHRLEESFLVEEDKKHERHPIFGNIVDEVAYHEKYPTIYHLRKKLVDSTDKADLRLIYLALAHMIKFRGHFLIEGDLNPDNSDVDKLFIQLVQTYNQLFEENPINASGVDAKAILSARLSKSRRLENLIAQLPGEKKNGLFGNLIALSLGLTPNFKSNFDLAEDAKLQLSKDTYDDDLDNLLAQIGDQYADLFLAAKNLSDAILLSDILRVNTEITKAPLSASMIKRYDEHHQDLTLLKALVRQQLPEKYKEIFFDQSKNGYAGYIDGGASQEEFYKFIKPILEKMDGTEELLVKLNREDLLRKQRTFDNGSIPHQIHLGELHAILRRQEDFYPFLKDNREKIEKILTFRIPYYVGPLARGNSRFAWMTRKSEETITPWNFEEVVDKGASAQSFIERMTNFDKNLPNEKVLPKHSLLYEYFTVYNELTKVKYVTEGMRKPAFLSGEQKKAIVDLLFKTNRKVTVKQLKEDYFKKIECFDSVEISGVEDRFNASLGTYHDLLKIIKDKDFLDNEENEDILEDIVLTLTLFEDREMIEERLKTYAHLFDDKVMKQLKRRRYTGWGRLSRKLINGIRDKQSGKTILDFLKSDGFANRNFMQLIHDDSLTFKEDIQKAQVSGQGDSLHEHIANLAGSPAIKKGILQTVKVVDELVKVMGRHKPENIVIEMARENQTTQKGQKNSRERMKRIEEGIKELGSQILKEHPVENTQLQNEKLYLYYLQNGRDMYVDQELDINRLSDYDVDHIVPQSFLKDDSIDNKVLTRSDKARGKSDNVPSEEVVKKMKNYWRQLLNAKLITQRKFDNLTKAERGGLSELDKAGFIKRQLVETRQITKHVAQILDSRMNTKYDENDKLIREVKVITLKSKLVSDFRKDFQFYKVREINNYHHAHDAYLNAVVGTALIKKYPKLESEFVYGDYKVYDVRKMIAKSEQEIGKATAKYFFYSNIMNFFKTEITLANGEIRKRPLIETNGETGEIVWDKGRDFATVRKVLSMPQVNIVKKTEVQTGGFSKESILPKRNSDKLIARKKDWDPKKYGGFDSPTVAYSVLVVAKVEKGKSKKLKSVKELLGITIMERSSFEKNPIDFLEAKGYKEVKKDLIIKLPKYSLFELENGRKRMLASAGELQKGNELALPSKYVNFLYLASHYEKLKGSPEDNEQKQLFVEQHKHYLDEIIEQISEFSKRVILADANLDKVLSAYNKHRDKPIREQAENIIHLFTLTNLGAPAAFKYFDTTIDRKRYTSTKEVLDATLIHQSITGLYETRIDLSQLGGDGGEAAAKGGGPAPGGTLQLEEEYRLFEPESTQKQEMDIWLKNFPQAWAETGGMGTAHCQAPVLIQLKATATPISIRQYPMPHEAYQGIKPHIRRMLDQGILKPCQSPWNTPLLPVKKPGTEDYRPVQDLREVNKRVEDIHPTVPNPYNLLSTLPPSHPWYTVLDLKDAFFCLRLHSESQLLFAFEWRDPEIGLSGQLTWTRLPQGFKNSPTLFNEALHSDLADFRVRYPALVLLQYVDDLLLAAATRTECLEGTKALLETLGNKGYRASAKKAQICLQEVTYLGYSLKDGQRWLTKARKEAILSIPVPKNSRQVREFLGKAGYCRLFIPGFAELAAPLYPLTRPGTLFQWGTEQQLAFEDIKKALLSSPALGLPDITKPFELFIDENSGFAKGVLVQKLGPWKRPVAYLSKKLDTVASGWPPCLRMVAAIAILVKDAGKLTLGQPLTILTSHPVEALVRQPPNKWLSNARMTHYQAMLLDAERVHFGPTVSLNPATLLPLPSGGNHHDCLQILAETHGTRPDLTDQPLPDADLTWYTDGSSFIRNGEREAGAAVTTESEVIWAAPLPPGTSAQRAELIALTQALKMAEGKKLTVYTDSRYAFATTHVHGEIYRRRGWLTSEGKEIKNKNEILALLEALFLPKRLSIIHCPGHQKGDSPQAKGNRLADDTAKKAATETHSSLTVLPAGKRTADGSEFEKRTADGSEFESPKKKAKVE

SEQ ID NO: 1254 - protein, 2095 aa, synthetic construct
MPAAKRVKLDGGDKKYSIGLDIGTNSVGWAVITDEYKVPSKKFKVLGNTDRHSIKKNLIGALLFDSGETAEATRLKRTARRRYTRRKNRICYLQEIFSNEMAKVDDSFFHRLEESFLVEEDKKHERHPIFGNIVDEVAYHEKYPTIYHLRKKLVDSTDKADLRLIYLALAHMIKFRGHFLIEGDLNPDNSDVDKLFIQLVQTYNQLFEENPINASGVDAKAILSARLSKSRRLENLIAQLPGEKKNGLFGNLIALSLGLTPNFKSNFDLAEDAKLQLSKDTYDDDLDNLLAQIGDQYADLFLAAKNLSDAILLSDILRVNTEITKAPLSASMIKRYDEHHQDLTLLKALVRQQLPEKYKEIFFDQSKNGYAGYIDGGASQEEFYKFIKPILEKMDGTEELLVKLNREDLLRKQRTFDNGSIPHQIHLGELHAILRRQEDFYPFLKDNREKIEKILTFRIPYYVGPLARGNSRFAWMTRKSEETITPWNFEEVVDKGASAQSFIERMTNFDKNLPNEKVLPKHSLLYEYFTVYNELTKVKYVTEGMRKPAFLSGEQKKAIVDLLFKTNRKVTVKQLKEDYFKKIECFDSVEISGVEDRFNASLGTYHDLLKIIKDKDFLDNEENEDILEDIVLTLTLFEDREMIEERLKTYAHLFDDKVMKQLKRRRYTGWGRLSRKLINGIRDKQSGKTILDFLKSDGFANRNFMQLIHDDSLTFKEDIQKAQVSGQGDSLHEHIANLAGSPAIKKGILQTVKVVDELVKVMGRHKPENIVIEMARENQTTQKGQKNSRERMKRIEEGIKELGSQILKEHPVENTQLQNEKLYLYYLQNGRDMYVDQELDINRLSDYDVDHIVPQSFLKDDSIDNKVLTRSDKARGKSDNVPSEEVVKKMKNYWRQLLNAKLITQRKFDNLTKAERGGLSELDKAGFIKRQLVETRQITKHVAQILDSRMNTKYDENDKLIREVKVITLKSKLVSDFRKDFQFYKVREINNYHHAHDAYLNAVVGTALIKKYPKLESEFVYGDYKVYDVRKMIAKSEQEIGKATAKYFFYSNIMNFFKTEITLANGEIRKRPLIETNGETGEIVWDKGRDFATVRKVLSMPQVNIVKKTEVQTGGFSKESILPKRNSDKLIARKKDWDPKKYGGFDSPTVAYSVLVVAKVEKGKSKKLKSVKELLGITIMERSSFEKNPIDFLEAKGYKEVKKDLIIKLPKYSLFELENGRKRMLASAGELQKGNELALPSKYVNFLYLASHYEKLKGSPEDNEQKQLFVEQHKHYLDEIIEQISEFSKRVILADANLDKVLSAYNKHRDKPIREQAENIIHLFTLTNLGAPAAFKYFDTTIDRKRYTSTKEVLDATLIHQSITGLYETRIDLSQLGGDGGEAAAKPAPGGSGGTLQLEEEYRLFEPESTQKQEMDIWLKNFPQAWAETGGMGTAHCQAPVLIQLKATATPISIRQYPMPHEAYQGIKPHIRRMLDQGILKPCQSPWNTPLLPVKKPGTEDYRPVQDLREVNKRVEDIHPTVPNPYNLLSTLPPSHPWYTVLDLKDAFFCLRLHSESQLLFAFEWRDPEIGLSGQLTWTRLPQGFKNSPTLFNEALHSDLADFRVRYPALVLLQYVDDLLLAAATRTECLEGTKALLETLGNKGYRASAKKAQICLQEVTYLGYSLKDGQRWLTKARKEAILSIPVPKNSRQVREFLGKAGYCRLFIPGFAELAAPLYPLTRPGTLFQWGTEQQLAFEDIKKALLSSPALGLPDITKPFELFIDENSGFAKGVLVQKLGPWKRPVAYLSKKLDTVASGWPPCLRMVAAIAILVKDAGKLTLGQPLTILTSHPVEALVRQPPNKWLSNARMTHYQAMLLDAERVHFGPTVSLNPATLLPLPSGGNHHDCLQILAETHGTRPDLTDQPLPDADLTWYTDGSSFIRNGEREAGAAVTTESEVIWAAPLPPGTSAQRAELIALTQALKMAEGKKLTVYTDSRYAFATTHVHGEIYRRRGWLTSEGKEIKNKNEILALLEALFLPKRLSIIHCPGHQKGDSPQAKGNRLADDTAKKAATETHSSLTVLPAGKRTADGSEFEKRTADGSEFESPKKKAKVE

SEQ ID NO: 1255 - protein, 2093 aa, synthetic construct
MPAAKRVKLDGGDKKYSIGLDIGTNSVGWAVITDEYKVPSKKFKVLGNTDRHSIKKNLIGALLFDSGETAEATRLKRTARRRYTRRKNRICYLQEIFSNEMAKVDDSFFHRLEESFLVEEDKKHERHPIFGNIVDEVAYHEKYPTIYHLRKKLVDSTDKADLRLIYLALAHMIKFRGHFLIEGDLNPDNSDVDKLFIQLVQTYNQLFEENPINASGVDAKAILSARLSKSRRLENLIAQLPGEKKNGLFGNLIALSLGLTPNFKSNFDLAEDAKLQLSKDTYDDDLDNLLAQIGDQYADLFLAAKNLSDAILLSDILRVNTEITKAPLSASMIKRYDEHHQDLTLLKALVRQQLPEKYKEIFFDQSKNGYAGYIDGGASQEEFYKFIKPILEKMDGTEELLVKLNREDLLRKQRTFDNGSIPHQIHLGELHAILRRQEDFYPFLKDNREKIEKILTFRIPYYVGPLARGNSRFAWMTRKSEETITPWNFEEVVDKGASAQSFIERMTNFDKNLPNEKVLPKHSLLYEYFTVYNELTKVKYVTEGMRKPAFLSGEQKKAIVDLLFKTNRKVTVKQLKEDYFKKIECFDSVEISGVEDRFNASLGTYHDLLKIIKDKDFLDNEENEDILEDIVLTLTLFEDREMIEERLKTYAHLFDDKVMKQLKRRRYTGWGRLSRKLINGIRDKQSGKTILDFLKSDGFANRNFMQLIHDDSLTFKEDIQKAQVSGQGDSLHEHIANLAGSPAIKKGILQTVKVVDELVKVMGRHKPENIVIEMARENQTTQKGQKNSRERMKRIEEGIKELGSQILKEHPVENTQLQNEKLYLYYLQNGRDMYVDQELDINRLSDYDVDHIVPQSFLKDDSIDNKVLTRSDKARGKSDNVPSEEVVKKMKNYWRQLLNAKLITQRKFDNLTKAERGGLSELDKAGFIKRQLVETRQITKHVAQILDSRMNTKYDENDKLIREVKVITLKSKLVSDFRKDFQFYKVREINNYHHAHDAYLNAVVGTALIKKYPKLESEFVYGDYKVYDVRKMIAKSEQEIGKATAKYFFYSNIMNFFKTEITLANGEIRKRPLIETNGETGEIVWDKGRDFATVRKVLSMPQVNIVKKTEVQTGGFSKESILPKRNSDKLIARKKDWDPKKYGGFDSPTVAYSVLVVAKVEKGKSKKLKSVKELLGITIMERSSFEKNPIDFLEAKGYKEVKKDLIIKLPKYSLFELENGRKRMLASAGELQKGNELALPSKYVNFLYLASHYEKLKGSPEDNEQKQLFVEQHKHYLDEIIEQISEFSKRVILADANLDKVLSAYNKHRDKPIREQAENIIHLFTLTNLGAPAAFKYFDTTIDRKRYTSTKEVLDATLIHQSITGLYETRIDLSQLGGDGGGSSGSSGSSGGTLQLEEEYRLFEPESTQKQEMDIWLKNFPQAWAETGGMGTAHCQAPVLIQLKATATPISIRQYPMPHEAYQGIKPHIRRMLDQGILKPCQSPWNTPLLPVKKPGTEDYRPVQDLREVNKRVEDIHPTVPNPYNLLSTLPPSHPWYTVLDLKDAFFCLRLHSESQLLFAFEWRDPEIGLSGQLTWTRLPQGFKNSPTLFNEALHSDLADFRVRYPALVLLQYVDDLLLAAATRTECLEGTKALLETLGNKGYRASAKKAQICLQEVTYLGYSLKDGQRWLTKARKEAILSIPVPKNSRQVREFLGKAGYCRLFIPGFAELAAPLYPLTRPGTLFQWGTEQQLAFEDIKKALLSSPALGLPDITKPFELFIDENSGFAKGVLVQKLGPWKRPVAYLSKKLDTVASGWPPCLRMVAAIAILVKDAGKLTLGQPLTILTSHPVEALVRQPPNKWLSNARMTHYQAMLLDAERVHFGPTVSLNPATLLPLPSGGNHHDCLQILAETHGTRPDLTDQPLPDADLTWYTDGSSFIRNGEREAGAAVTTESEVIWAAPLPPGTSAQRAELIALTQALKMAEGKKLTVYTDSRYAFATTHVHGEIYRRRGWLTSEGKEIKNKNEILALLEALFLPKRLSIIHCPGHQKGDSPQAKGNRLADDTAKKAATETHSSLTVLPAGKRTADGSEFEKRTADGSEFESPKKKAKVE

SEQ ID NO: 1256 - protein, 2093 aa, synthetic construct
MPAAKRVKLDGGDKKYSIGLDIGTNSVGWAVITDEYKVPSKKFKVLGNTDRHSIKKNLIGALLFDSGETAEATRLKRTARRRYTRRKNRICYLQEIFSNEMAKVDDSFFHRLEESFLVEEDKKHERHPIFGNIVDEVAYHEKYPTIYHLRKKLVDSTDKADLRLIYLALAHMIKFRGHFLIEGDLNPDNSDVDKLFIQLVQTYNQLFEENPINASGVDAKAILSARLSKSRRLENLIAQLPGEKKNGLFGNLIALSLGLTPNFKSNFDLAEDAKLQLSKDTYDDDLDNLLAQIGDQYADLFLAAKNLSDAILLSDILRVNTEITKAPLSASMIKRYDEHHQDLTLLKALVRQQLPEKYKEIFFDQSKNGYAGYIDGGASQEEFYKFIKPILEKMDGTEELLVKLNREDLLRKQRTFDNGSIPHQIHLGELHAILRRQEDFYPFLKDNREKIEKILTFRIPYYVGPLARGNSRFAWMTRKSEETITPWNFEEVVDKGASAQSFIERMTNFDKNLPNEKVLPKHSLLYEYFTVYNELTKVKYVTEGMRKPAFLSGEQKKAIVDLLFKTNRKVTVKQLKEDYFKKIECFDSVEISGVEDRFNASLGTYHDLLKIIKDKDFLDNEENEDILEDIVLTLTLFEDREMIEERLKTYAHLFDDKVMKQLKRRRYTGWGRLSRKLINGIRDKQSGKTILDFLKSDGFANRNFMQLIHDDSLTFKEDIQKAQVSGQGDSLHEHIANLAGSPAIKKGILQTVKVVDELVKVMGRHKPENIVIEMARENQTTQKGQKNSRERMKRIEEGIKELGSQILKEHPVENTQLQNEKLYLYYLQNGRDMYVDQELDINRLSDYDVDHIVPQSFLKDDSIDNKVLTRSDKARGKSDNVPSEEVVKKMKNYWRQLLNAKLITQRKFDNLTKAERGGLSELDKAGFIKRQLVETRQITKHVAQILDSRMNTKYDENDKLIREVKVITLKSKLVSDFRKDFQFYKVREINNYHHAHDAYLNAVVGTALIKKYPKLESEFVYGDYKVYDVRKMIAKSEQEIGKATAKYFFYSNIMNFFKTEITLANGEIRKRPLIETNGETGEIVWDKGRDFATVRKVLSMPQVNIVKKTEVQTGGFSKESILPKRNSDKLIARKKDWDPKKYGGFDSPTVAYSVLVVAKVEKGKSKKLKSVKELLGITIMERSSFEKNPIDFLEAKGYKEVKKDLIIKLPKYSLFELENGRKRMLASAGELQKGNELALPSKYVNFLYLASHYEKLKGSPEDNEQKQLFVEQHKHYLDEIIEQISEFSKRVILADANLDKVLSAYNKHRDKPIREQAENIIHLFTLTNLGAPAAFKYFDTTIDRKRYTSTKEVLDATLIHQSITGLYETRIDLSQLGGDGGPAPGGSGGGGGTLQLEEEYRLFEPESTQKQEMDIWLKNFPQAWAETGGMGTAHCQAPVLIQLKATATPISIRQYPMPHEAYQGIKPHIRRMLDQGILKPCQSPWNTPLLPVKKPGTEDYRPVQDLREVNKRVEDIHPTVPNPYNLLSTLPPSHPWYTVLDLKDAFFCLRLHSESQLLFAFEWRDPEIGLSGQLTWTRLPQGFKNSPTLFNEALHSDLADFRVRYPALVLLQYVDDLLLAAATRTECLEGTKALLETLGNKGYRASAKKAQICLQEVTYLGYSLKDGQRWLTKARKEAILSIPVPKNSRQVREFLGKAGYCRLFIPGFAELAAPLYPLTRPGTLFQWGTEQQLAFEDIKKALLSSPALGLPDITKPFELFIDENSGFAKGVLVQKLGPWKRPVAYLSKKLDTVASGWPPCLRMVAAIAILVKDAGKLTLGQPLTILTSHPVEALVRQPPNKWLSNARMTHYQAMLLDAERVHFGPTVSLNPATLLPLPSGGNHHDCLQILAETHGTRPDLTDQPLPDADLTWYTDGSSFIRNGEREAGAAVTTESEVIWAAPLPPGTSAQRAELIALTQALKMAEGKKLTVYTDSRYAFATTHVHGEIYRRRGWLTSEGKEIKNKNEILALLEALFLPKRLSIIHCPGHQKGDSPQAKGNRLADDTAKKAATETHSSLTVLPAGKRTADGSEFEKRTADGSEFESPKKKAKVE

SEQ ID NO: 1257 - protein, 2093 aa, synthetic construct
MPAAKRVKLDGGDKKYSIGLDIGTNSVGWAVITDEYKVPSKKFKVLGNTDRHSIKKNLIGALLFDSGETAEATRLKRTARRRYTRRKNRICYLQEIFSNEMAKVDDSFFHRLEESFLVEEDKKHERHPIFGNIVDEVAYHEKYPTIYHLRKKLVDSTDKADLRLIYLALAHMIKFRGHFLIEGDLNPDNSDVDKLFIQLVQTYNQLFEENPINASGVDAKAILSARLSKSRRLENLIAQLPGEKKNGLFGNLIALSLGLTPNFKSNFDLAEDAKLQLSKDTYDDDLDNLLAQIGDQYADLFLAAKNLSDAILLSDILRVNTEITKAPLSASMIKRYDEHHQDLTLLKALVRQQLPEKYKEIFFDQSKNGYAGYIDGGASQEEFYKFIKPILEKMDGTEELLVKLNREDLLRKQRTFDNGSIPHQIHLGELHAILRRQEDFYPFLKDNREKIEKILTFRIPYYVGPLARGNSRFAWMTRKSEETITPWNFEEVVDKGASAQSFIERMTNFDKNLPNEKVLPKHSLLYEYFTVYNELTKVKYVTEGMRKPAFLSGEQKKAIVDLLFKTNRKVTVKQLKEDYFKKIECFDSVEISGVEDRFNASLGTYHDLLKIIKDKDFLDNEENEDILEDIVLTLTLFEDREMIEERLKTYAHLFDDKVMKQLKRRRYTGWGRLSRKLINGIRDKQSGKTILDFLKSDGFANRNFMQLIHDDSLTFKEDIQKAQVSGQGDSLHEHIANLAGSPAIKKGILQTVKVVDELVKVMGRHKPENIVIEMARENQTTQKGQKNSRERMKRIEEGIKELGSQILKEHPVENTQLQNEKLYLYYLQNGRDMYVDQELDINRLSDYDVDHIVPQSFLKDDSIDNKVLTRSDKARGKSDNVPSEEVVKKMKNYWRQLLNAKLITQRKFDNLTKAERGGLSELDKAGFIKRQLVETRQITKHVAQILDSRMNTKYDENDKLIREVKVITLKSKLVSDFRKDFQFYKVREINNYHHAHDAYLNAVVGTALIKKYPKLESEFVYGDYKVYDVRKMIAKSEQEIGKATAKYFFYSNIMNFFKTEITLANGEIRKRPLIETNGETGEIVWDKGRDFATVRKVLSMPQVNIVKKTEVQTGGFSKESILPKRNSDKLIARKKDWDPKKYGGFDSPTVAYSVLVVAKVEKGKSKKLKSVKELLGITIMERSSFEKNPIDFLEAKGYKEVKKDLIIKLPKYSLFELENGRKRMLASAGELQKGNELALPSKYVNFLYLASHYEKLKGSPEDNEQKQLFVEQHKHYLDEIIEQISEFSKRVILADANLDKVLSAYNKHRDKPIREQAENIIHLFTLTNLGAPAAFKYFDTTIDRKRYTSTKEVLDATLIHQSITGLYETRIDLSQLGGDGGGGSPAPGGGGGTLQLEEEYRLFEPESTQKQEMDIWLKNFPQAWAETGGMGTAHCQAPVLIQLKATATPISIRQYPMPHEAYQGIKPHIRRMLDQGILKPCQSPWNTPLLPVKKPGTEDYRPVQDLREVNKRVEDIHPTVPNPYNLLSTLPPSHPWYTVLDLKDAFFCLRLHSESQLLFAFEWRDPEIGLSGQLTWTRLPQGFKNSPTLFNEALHSDLADFRVRYPALVLLQYVDDLLLAAATRTECLEGTKALLETLGNKGYRASAKKAQICLQEVTYLGYSLKDGQRWLTKARKEAILSIPVPKNSRQVREFLGKAGYCRLFIPGFAELAAPLYPLTRPGTLFQWGTEQQLAFEDIKKALLSSPALGLPDITKPFELFIDENSGFAKGVLVQKLGPWKRPVAYLSKKLDTVASGWPPCLRMVAAIAILVKDAGKLTLGQPLTILTSHPVEALVRQPPNKWLSNARMTHYQAMLLDAERVHFGPTVSLNPATLLPLPSGGNHHDCLQILAETHGTRPDLTDQPLPDADLTWYTDGSSFIRNGEREAGAAVTTESEVIWAAPLPPGTSAQRAELIALTQALKMAEGKKLTVYTDSRYAFATTHVHGEIYRRRGWLTSEGKEIKNKNEILALLEALFLPKRLSIIHCPGHQKGDSPQAKGNRLADDTAKKAATETHSSLTVLPAGKRTADGSEFEKRTADGSEFESPKKKAKVE

SEQ ID NO: 1258 - protein, 2093 aa, synthetic construct
MPAAKRVKLDGGDKKYSIGLDIGTNSVGWAVITDEYKVPSKKFKVLGNTDRHSIKKNLIGALLFDSGETAEATRLKRTARRRYTRRKNRICYLQEIFSNEMAKVDDSFFHRLEESFLVEEDKKHERHPIFGNIVDEVAYHEKYPTIYHLRKKLVDSTDKADLRLIYLALAHMIKFRGHFLIEGDLNPDNSDVDKLFIQLVQTYNQLFEENPINASGVDAKAILSARLSKSRRLENLIAQLPGEKKNGLFGNLIALSLGLTPNFKSNFDLAEDAKLQLSKDTYDDDLDNLLAQIGDQYADLFLAAKNLSDAILLSDILRVNTEITKAPLSASMIKRYDEHHQDLTLLKALVRQQLPEKYKEIFFDQSKNGYAGYIDGGASQEEFYKFIKPILEKMDGTEELLVKLNREDLLRKQRTFDNGSIPHQIHLGELHAILRRQEDFYPFLKDNREKIEKILTFRIPYYVGPLARGNSRFAWMTRKSEETITPWNFEEVVDKGASAQSFIERMTNFDKNLPNEKVLPKHSLLYEYFTVYNELTKVKYVTEGMRKPAFLSGEQKKAIVDLLFKTNRKVTVKQLKEDYFKKIECFDSVEISGVEDRFNASLGTYHDLLKIIKDKDFLDNEENEDILEDIVLTLTLFEDREMIEERLKTYAHLFDDKVMKQLKRRRYTGWGRLSRKLINGIRDKQSGKTILDFLKSDGFANRNFMQLIHDDSLTFKEDIQKAQVSGQGDSLHEHIANLAGSPAIKKGILQTVKVVDELVKVMGRHKPENIVIEMARENQTTQKGQKNSRERMKRIEEGIKELGSQILKEHPVENTQLQNEKLYLYYLQNGRDMYVDQELDINRLSDYDVDHIVPQSFLKDDSIDNKVLTRSDKARGKSDNVPSEEVVKKMKNYWRQLLNAKLITQRKFDNLTKAERGGLSELDKAGFIKRQLVETRQITKHVAQILDSRMNTKYDENDKLIREVKVITLKSKLVSDFRKDFQFYKVREINNYHHAHDAYLNAVVGTALIKKYPKLESEFVYGDYKVYDVRKMIAKSEQEIGKATAKYFFYSNIMNFFKTEITLANGEIRKRPLIETNGETGEIVWDKGRDFATVRKVLSMPQVNIVKKTEVQTGGFSKESILPKRNSDKLIARKKDWDPKKYGGFDSPTVAYSVLVVAKVEKGKSKKLKSVKELLGITIMERSSFEKNPIDFLEAKGYKEVKKDLIIKLPKYSLFELENGRKRMLASAGELQKGNELALPSKYVNFLYLASHYEKLKGSPEDNEQKQLFVEQHKHYLDEIIEQISEFSKRVILADANLDKVLSAYNKHRDKPIREQAENIIHLFTLTNLGAPAAFKYFDTTIDRKRYTSTKEVLDATLIHQSITGLYETRIDLSQLGGDGGGSSGGGGGSGGTLQLEEEYRLFEPESTQKQEMDIWLKNFPQAWAETGGMGTAHCQAPVLIQLKATATPISIRQYPMPHEAYQGIKPHIRRMLDQGILKPCQSPWNTPLLPVKKPGTEDYRPVQDLREVNKRVEDIHPTVPNPYNLLSTLPPSHPWYTVLDLKDAFFCLRLHSESQLLFAFEWRDPEIGLSGQLTWTRLPQGFKNSPTLFNEALHSDLADFRVRYPALVLLQYVDDLLLAAATRTECLEGTKALLETLGNKGYRASAKKAQICLQEVTYLGYSLKDGQRWLTKARKEAILSIPVPKNSRQVREFLGKAGYCRLFIPGFAELAAPLYPLTRPGTLFQWGTEQQLAFEDIKKALLSSPALGLPDITKPFELFIDENSGFAKGVLVQKLGPWKRPVAYLSKKLDTVASGWPPCLRMVAAIAILVKDAGKLTLGQPLTILTSHPVEALVRQPPNKWLSNARMTHYQAMLLDAERVHFGPTVSLNPATLLPLPSGGNHHDCLQILAETHGTRPDLTDQPLPDADLTWYTDGSSFIRNGEREAGAAVTTESEVIWAAPLPPGTSAQRAELIALTQALKMAEGKKLTVYTDSRYAFATTHVHGEIYRRRGWLTSEGKEIKNKNEILALLEALFLPKRLSIIHCPGHQKGDSPQAKGNRLADDTAKKAATETHSSLTVLPAGKRTADGSEFEKRTADGSEFESPKKKAKVE

SEQ ID NO: 1259 - protein, 2095 aa, synthetic construct
MPAAKRVKLDGGDKKYSIGLDIGTNSVGWAVITDEYKVPSKKFKVLGNTDRHSIKKNLIGALLFDSGETAEATRLKRTARRRYTRRKNRICYLQEIFSNEMAKVDDSFFHRLEESFLVEEDKKHERHPIFGNIVDEVAYHEKYPTIYHLRKKLVDSTDKADLRLIYLALAHMIKFRGHFLIEGDLNPDNSDVDKLFIQLVQTYNQLFEENPINASGVDAKAILSARLSKSRRLENLIAQLPGEKKNGLFGNLIALSLGLTPNFKSNFDLAEDAKLQLSKDTYDDDLDNLLAQIGDQYADLFLAAKNLSDAILLSDILRVNTEITKAPLSASMIKRYDEHHQDLTLLKALVRQQLPEKYKEIFFDQSKNGYAGYIDGGASQEEFYKFIKPILEKMDGTEELLVKLNREDLLRKQRTFDNGSIPHQIHLGELHAILRRQEDFYPFLKDNREKIEKILTFRIPYYVGPLARGNSRFAWMTRKSEETITPWNFEEVVDKGASAQSFIERMTNFDKNLPNEKVLPKHSLLYEYFTVYNELTKVKYVTEGMRKPAFLSGEQKKAIVDLLFKTNRKVTVKQLKEDYFKKIECFDSVEISGVEDRFNASLGTYHDLLKIIKDKDFLDNEENEDILEDIVLTLTLFEDREMIEERLKTYAHLFDDKVMKQLKRRRYTGWGRLSRKLINGIRDKQSGKTILDFLKSDGFANRNFMQLIHDDSLTFKEDIQKAQVSGQGDSLHEHIANLAGSPAIKKGILQTVKVVDELVKVMGRHKPENIVIEMARENQTTQKGQKNSRERMKRIEEGIKELGSQILKEHPVENTQLQNEKLYLYYLQNGRDMYVDQELDINRLSDYDVDHIVPQSFLKDDSIDNKVLTRSDKARGKSDNVPSEEVVKKMKNYWRQLLNAKLITQRKFDNLTKAERGGLSELDKAGFIKRQLVETRQITKHVAQILDSRMNTKYDENDKLIREVKVITLKSKLVSDFRKDFQFYKVREINNYHHAHDAYLNAVVGTALIKKYPKLESEFVYGDYKVYDVRKMIAKSEQEIGKATAKYFFYSNIMNFFKTEITLANGEIRKRPLIETNGETGEIVWDKGRDFATVRKVLSMPQVNIVKKTEVQTGGFSKESILPKRNSDKLIARKKDWDPKKYGGFDSPTVAYSVLVVAKVEKGKSKKLKSVKELLGITIMERSSFEKNPIDFLEAKGYKEVKKDLIIKLPKYSLFELENGRKRMLASAGELQKGNELALPSKYVNFLYLASHYEKLKGSPEDNEQKQLFVEQHKHYLDEIIEQISEFSKRVILADANLDKVLSAYNKHRDKPIREQAENIIHLFTLTNLGAPAAFKYFDTTIDRKRYTSTKEVLDATLIHQSITGLYETRIDLSQLGGDGGGGGEAAAKGGSGGTLQLEEEYRLFEPESTQKQEMDIWLKNFPQAWAETGGMGTAHCQAPVLIQLKATATPISIRQYPMPHEAYQGIKPHIRRMLDQGILKPCQSPWNTPLLPVKKPGTEDYRPVQDLREVNKRVEDIHPTVPNPYNLLSTLPPSHPWYTVLDLKDAFFCLRLHSESQLLFAFEWRDPEIGLSGQLTWTRLPQGFKNSPTLFNEALHSDLADFRVRYPALVLLQYVDDLLLAAATRTECLEGTKALLETLGNKGYRASAKKAQICLQEVTYLGYSLKDGQRWLTKARKEAILSIPVPKNSRQVREFLGKAGYCRLFIPGFAELAAPLYPLTRPGTLFQWGTEQQLAFEDIKKALLSSPALGLPDITKPFELFIDENSGFAKGVLVQKLGPWKRPVAYLSKKLDTVASGWPPCLRMVAAIAILVKDAGKLTLGQPLTILTSHPVEALVRQPPNKWLSNARMTHYQAMLLDAERVHFGPTVSLNPATLLPLPSGGNHHDCLQILAETHGTRPDLTDQPLPDADLTWYTDGSSFIRNGEREAGAAVTTESEVIWAAPLPPGTSAQRAELIALTQALKMAEGKKLTVYTDSRYAFATTHVHGEIYRRRGWLTSEGKEIKNKNEILALLEALFLPKRLSIIHCPGHQKGDSPQAKGNRLADDTAKKAATETHSSLTVLPAGKRTADGSEFEKRTADGSEFESPKKKAKVE

SEQ ID NO: 1260 - protein, 2089 aa, synthetic construct
MPAAKRVKLDGGDKKYSIGLDIGTNSVGWAVITDEYKVPSKKFKVLGNTDRHSIKKNLIGALLFDSGETAEATRLKRTARRRYTRRKNRICYLQEIFSNEMAKVDDSFFHRLEESFLVEEDKKHERHPIFGNIVDEVAYHEKYPTIYHLRKKLVDSTDKADLRLIYLALAHMIKFRGHFLIEGDLNPDNSDVDKLFIQLVQTYNQLFEENPINASGVDAKAILSARLSKSRRLENLIAQLPGEKKNGLFGNLIALSLGLTPNFKSNFDLAEDAKLQLSKDTYDDDLDNLLAQIGDQYADLFLAAKNLSDAILLSDILRVNTEITKAPLSASMIKRYDEHHQDLTLLKALVRQQLPEKYKEIFFDQSKNGYAGYIDGGASQEEFYKFIKPILEKMDGTEELLVKLNREDLLRKQRTFDNGSIPHQIHLGELHAILRRQEDFYPFLKDNREKIEKILTFRIPYYVGPLARGNSRFAWMTRKSEETITPWNFEEVVDKGASAQSFIERMTNFDKNLPNEKVLPKHSLLYEYFTVYNELTKVKYVTEGMRKPAFLSGEQKKAIVDLLFKTNRKVTVKQLKEDYFKKIECFDSVEISGVEDRFNASLGTYHDLLKIIKDKDFLDNEENEDILEDIVLTLTLFEDREMIEERLKTYAHLFDDKVMKQLKRRRYTGWGRLSRKLINGIRDKQSGKTILDFLKSDGFANRNFMQLIHDDSLTFKEDIQKAQVSGQGDSLHEHIANLAGSPAIKKGILQTVKVVDELVKVMGRHKPENIVIEMARENQTTQKGQKNSRERMKRIEEGIKELGSQILKEHPVENTQLQNEKLYLYYLQNGRDMYVDQELDINRLSDYDVDHIVPQSFLKDDSIDNKVLTRSDKARGKSDNVPSEEVVKKMKNYWRQLLNAKLITQRKFDNLTKAERGGLSELDKAGFIKRQLVETRQITKHVAQILDSRMNTKYDENDKLIREVKVITLKSKLVSDFRKDFQFYKVREINNYHHAHDAYLNAVVGTALIKKYPKLESEFVYGDYKVYDVRKMIAKSEQEIGKATAKYFFYSNIMNFFKTEITLANGEIRKRPLIETNGETGEIVWDKGRDFATVRKVLSMPQVNIVKKTEVQTGGFSKESILPKRNSDKLIARKKDWDPKKYGGFDSPTVAYSVLVVAKVEKGKSKKLKSVKELLGITIMERSSFEKNPIDFLEAKGYKEVKKDLIIKLPKYSLFELENGRKRMLASAGELQKGNELALPSKYVNFLYLASHYEKLKGSPEDNEQKQLFVEQHKHYLDEIIEQISEFSKRVILADANLDKVLSAYNKHRDKPIREQAENIIHLFTLTNLGAPAAFKYFDTTIDRKRYTSTKEVLDATLIHQSITGLYETRIDLSQLGGDGGEAAAKGGTLQLEEEYRLFEPESTQKQEMDIWLKNFPQAWAETGGMGTAHCQAPVLIQLKATATPISIRQYPMPHEAYQGIKPHIRRMLDQGILKPCQSPWNTPLLPVKKPGTEDYRPVQDLREVNKRVEDIHPTVPNPYNLLSTLPPSHPWYTVLDLKDAFFCLRLHSESQLLFAFEWRDPEIGLSGQLTWTRLPQGFKNSPTLFNEALHSDLADFRVRYPALVLLQYVDDLLLAAATRTECLEGTKALLETLGNKGYRASAKKAQICLQEVTYLGYSLKDGQRWLTKARKEAILSIPVPKNSRQVREFLGKAGYCRLFIPGFAELAAPLYPLTRPGTLFQWGTEQQLAFEDIKKALLSSPALGLPDITKPFELFIDENSGFAKGVLVQKLGPWKRPVAYLSKKLDTVASGWPPCLRMVAAIAILVKDAGKLTLGQPLTILTSHPVEALVRQPPNKWLSNARMTHYQAMLLDAERVHFGPTVSLNPATLLPLPSGGNHHDCLQILAETHGTRPDLTDQPLPDADLTWYTDGSSFIRNGEREAGAAVTTESEVIWAAPLPPGTSAQRAELIALTQALKMAEGKKLTVYTDSRYAFATTHVHGEIYRRRGWLTSEGKEIKNKNEILALLEALFLPKRLSIIHCPGHQKGDSPQAKGNRLADDTAKKAATETHSSLTVLPAGKRTADGSEFEKRTADGSEFESPKKKAKVE

SEQ ID NO: 1261 - protein, 2095 aa, synthetic construct
MPAAKRVKLDGGDKKYSIGLDIGTNSVGWAVITDEYKVPSKKFKVLGNTDRHSIKKNLIGALLFDSGETAEATRLKRTARRRYTRRKNRICYLQEIFSNEMAKVDDSFFHRLEESFLVEEDKKHERHPIFGNIVDEVAYHEKYPTIYHLRKKLVDSTDKADLRLIYLALAHMIKFRGHFLIEGDLNPDNSDVDKLFIQLVQTYNQLFEENPINASGVDAKAILSARLSKSRRLENLIAQLPGEKKNGLFGNLIALSLGLTPNFKSNFDLAEDAKLQLSKDTYDDDLDNLLAQIGDQYADLFLAAKNLSDAILLSDILRVNTEITKAPLSASMIKRYDEHHQDLTLLKALVRQQLPEKYKEIFFDQSKNGYAGYIDGGASQEEFYKFIKPILEKMDGTEELLVKLNREDLLRKQRTFDNGSIPHQIHLGELHAILRRQEDFYPFLKDNREKIEKILTFRIPYYVGPLARGNSRFAWMTRKSEETITPWNFEEVVDKGASAQSFIERMTNFDKNLPNEKVLPKHSLLYEYFTVYNELTKVKYVTEGMRKPAFLSGEQKKAIVDLLFKTNRKVTVKQLKEDYFKKIECFDSVEISGVEDRFNASLGTYHDLLKIIKDKDFLDNEENEDILEDIVLTLTLFEDREMIEERLKTYAHLFDDKVMKQLKRRRYTGWGRLSRKLINGIRDKQSGKTILDFLKSDGFANRNFMQLIHDDSLTFKEDIQKAQVSGQGDSLHEHIANLAGSPAIKKGILQTVKVVDELVKVMGRHKPENIVIEMARENQTTQKGQKNSRERMKRIEEGIKELGSQILKEHPVENTQLQNEKLYLYYLQNGRDMYVDQELDINRLSDYDVDHIVPQSFLKDDSIDNKVLTRSDKARGKSDNVPSEEVVKKMKNYWRQLLNAKLITQRKFDNLTKAERGGLSELDKAGFIKRQLVETRQITKHVAQILDSRMNTKYDENDKLIREVKVITLKSKLVSDFRKDFQFYKVREINNYHHAHDAYLNAVVGTALIKKYPKLESEFVYGDYKVYDVRKMIAKSEQEIGKATAKYFFYSNIMNFFKTEITLANGEIRKRPLIETNGETGEIVWDKGRDFATVRKVLSMPQVNIVKKTEVQTGGFSKESILPKRNSDKLIARKKDWDPKKYGGFDSPTVAYSVLVVAKVEKGKSKKLKSVKELLGITIMERSSFEKNPIDFLEAKGYKEVKKDLIIKLPKYSLFELENGRKRMLASAGELQKGNELALPSKYVNFLYLASHYEKLKGSPEDNEQKQLFVEQHKHYLDEIIEQISEFSKRVILADANLDKVLSAYNKHRDKPIREQAENIIHLFTLTNLGAPAAFKYFDTTIDRKRYTSTKEVLDATLIHQSITGLYETRIDLSQLGGDGGGGGGSSEAAAKGGTLQLEEEYRLFEPESTQKQEMDIWLKNFPQAWAETGGMGTAHCQAPVLIQLKATATPISIRQYPMPHEAYQGIKPHIRRMLDQGILKPCQSPWNTPLLPVKKPGTEDYRPVQDLREVNKRVEDIHPTVPNPYNLLSTLPPSHPWYTVLDLKDAFFCLRLHSESQLLFAFEWRDPEIGLSGQLTWTRLPQGFKNSPTLFNEALHSDLADFRVRYPALVLLQYVDDLLLAAATRTECLEGTKALLETLGNKGYRASAKKAQICLQEVTYLGYSLKDGQRWLTKARKEAILSIPVPKNSRQVREFLGKAGYCRLFIPGFAELAAPLYPLTRPGTLFQWGTEQQLAFEDIKKALLSSPALGLPDITKPFELFIDENSGFAKGVLVQKLGPWKRPVAYLSKKLDTVASGWPPCLRMVAAIAILVKDAGKLTLGQPLTILTSHPVEALVRQPPNKWLSNARMTHYQAMLLDAERVHFGPTVSLNPATLLPLPSGGNHHDCLQILAETHGTRPDLTDQPLPDADLTWYTDGSSFIRNGEREAGAAVTTESEVIWAAPLPPGTSAQRAELIALTQALKMAEGKKLTVYTDSRYAFATTHVHGEIYRRRGWLTSEGKEIKNKNEILALLEALFLPKRLSIIHCPGHQKGDSPQAKGNRLADDTAKKAATETHSSLTVLPAGKRTADGSEFEKRTADGSEFESPKKKAKVE

SEQ ID NO: 1262 - protein, 2095 aa, synthetic construct
MPAAKRVKLDGGDKKYSIGLDIGTNSVGWAVITDEYKVPSKKFKVLGNTDRHSIKKNLIGALLFDSGETAEATRLKRTARRRYTRRKNRICYLQEIFSNEMAKVDDSFFHRLEESFLVEEDKKHERHPIFGNIVDEVAYHEKYPTIYHLRKKLVDSTDKADLRLIYLALAHMIKFRGHFLIEGDLNPDNSDVDKLFIQLVQTYNQLFEENPINASGVDAKAILSARLSKSRRLENLIAQLPGEKKNGLFGNLIALSLGLTPNFKSNFDLAEDAKLQLSKDTYDDDLDNLLAQIGDQYADLFLAAKNLSDAILLSDILRVNTEITKAPLSASMIKRYDEHHQDLTLLKALVRQQLPEKYKEIFFDQSKNGYAGYIDGGASQEEFYKFIKPILEKMDGTEELLVKLNREDLLRKQRTFDNGSIPHQIHLGELHAILRRQEDFYPFLKDNREKIEKILTFRIPYYVGPLARGNSRFAWMTRKSEETITPWNFEEVVDKGASAQSFIERMTNFDKNLPNEKVLPKHSLLYEYFTVYNELTKVKYVTEGMRKPAFLSGEQKKAIVDLLFKTNRKVTVKQLKEDYFKKIECFDSVEISGVEDRFNASLGTYHDLLKIIKDKDFLDNEENEDILEDIVLTLTLFEDREMIEERLKTYAHLFDDKVMKQLKRRRYTGWGRLSRKLINGIRDKQSGKTILDFLKSDGFANRNFMQLIHDDSLTFKEDIQKAQVSGQGDSLHEHIANLAGSPAIKKGILQTVKVVDELVKVMGRHKPENIVIEMARENQTTQKGQKNSRERMKRIEEGIKELGSQILKEHPVENTQLQNEKLYLYYLQNGRDMYVDQELDINRLSDYDVDHIVPQSFLKDDSIDNKVLTRSDKARGKSDNVPSEEVVKKMKNYWRQLLNAKLITQRKFDNLTKAERGGLSELDKAGFIKRQLVETRQITKHVAQILDSRMNTKYDENDKLIREVKVITLKSKLVSDFRKDFQFYKVREINNYHHAHDAYLNAVVGTALIKKYPKLESEFVYGDYKVYDVRKMIAKSEQEIGKATAKYFFYSNIMNFFKTEITLANGEIRKRPLIETNGETGEIVWDKGRDFATVRKVLSMPQVNIVKKTEVQTGGFSKESILPKRNSDKLIARKKDWDPKKYGGFDSPTVAYSVLVVAKVEKGKSKKLKSVKELLGITIMERSSFEKNPIDFLEAKGYKEVKKDLIIKLPKYSLFELENGRKRMLASAGELQKGNELALPSKYVNFLYLASHYEKLKGSPEDNEQKQLFVEQHKHYLDEIIEQISEFSKRVILADANLDKVLSAYNKHRDKPIREQAENIIHLFTLTNLGAPAAFKYFDTTIDRKRYTSTKEVLDATLIHQSITGLYETRIDLSQLGGDGGGGGEAAAKPAPGGTLQLEEEYRLFEPESTQKQEMDIWLKNFPQAWAETGGMGTAHCQAPVLIQLKATATPISIRQYPMPHEAYQGIKPHIRRMLDQGILKPCQSPWNTPLLPVKKPGTEDYRPVQDLREVNKRVEDIHPTVPNPYNLLSTLPPSHPWYTVLDLKDAFFCLRLHSESQLLFAFEWRDPEIGLSGQLTWTRLPQGFKNSPTLFNEALHSDLADFRVRYPALVLLQYVDDLLLAAATRTECLEGTKALLETLGNKGYRASAKKAQICLQEVTYLGYSLKDGQRWLTKARKEAILSIPVPKNSRQVREFLGKAGYCRLFIPGFAELAAPLYPLTRPGTLFQWGTEQQLAFEDIKKALLSSPALGLPDITKPFELFIDENSGFAKGVLVQKLGPWKRPVAYLSKKLDTVASGWPPCLRMVAAIAILVKDAGKLTLGQPLTILTSHPVEALVRQPPNKWLSNARMTHYQAMLLDAERVHFGPTVSLNPATLLPLPSGGNHHDCLQILAETHGTRPDLTDQPLPDADLTWYTDGSSFIRNGEREAGAAVTTESEVIWAAPLPPGTSAQRAELIALTQALKMAEGKKLTVYTDSRYAFATTHVHGEIYRRRGWLTSEGKEIKNKNEILALLEALFLPKRLSIIHCPGHQKGDSPQAKGNRLADDTAKKAATETHSSLTVLPAGKRTADGSEFEKRTADGSEFESPKKKAKVE

SEQ ID NO: 1263 - protein, 2093 aa, synthetic construct
MPAAKRVKLDGGDKKYSIGLDIGTNSVGWAVITDEYKVPSKKFKVLGNTDRHSIKKNLIGALLFDSGETAEATRLKRTARRRYTRRKNRICYLQEIFSNEMAKVDDSFFHRLEESFLVEEDKKHERHPIFGNIVDEVAYHEKYPTIYHLRKKLVDSTDKADLRLIYLALAHMIKFRGHFLIEGDLNPDNSDVDKLFIQLVQTYNQLFEENPINASGVDAKAILSARLSKSRRLENLIAQLPGEKKNGLFGNLIALSLGLTPNFKSNFDLAEDAKLQLSKDTYDDDLDNLLAQIGDQYADLFLAAKNLSDAILLSDILRVNTEITKAPLSASMIKRYDEHHQDLTLLKALVRQQLPEKYKEIFFDQSKNGYAGYIDGGASQEEFYKFIKPILEKMDGTEELLVKLNREDLLRKQRTFDNGSIPHQIHLGELHAILRRQEDFYPFLKDNREKIEKILTFRIPYYVGPLARGNSRFAWMTRKSEETITPWNFEEVVDKGASAQSFIERMTNFDKNLPNEKVLPKHSLLYEYFTVYNELTKVKYVTEGMRKPAFLSGEQKKAIVDLLFKTNRKVTVKQLKEDYFKKIECFDSVEISGVEDRFNASLGTYHDLLKIIKDKDFLDNEENEDILEDIVLTLTLFEDREMIEERLKTYAHLFDDKVMKQLKRRRYTGWGRLSRKLINGIRDKQSGKTILDFLKSDGFANRNFMQLIHDDSLTFKEDIQKAQVSGQGDSLHEHIANLAGSPAIKKGILQTVKVVDELVKVMGRHKPENIVIEMARENQTTQKGQKNSRERMKRIEEGIKELGSQILKEHPVENTQLQNEKLYLYYLQNGRDMYVDQELDINRLSDYDVDHIVPQSFLKDDSIDNKVLTRSDKARGKSDNVPSEEVVKKMKNYWRQLLNAKLITQRKFDNLTKAERGGLSELDKAGFIKRQLVETRQITKHVAQILDSRMNTKYDENDKLIREVKVITLKSKLVSDFRKDFQFYKVREINNYHHAHDAYLNAVVGTALIKKYPKLESEFVYGDYKVYDVRKMIAKSEQEIGKATAKYFFYSNIMNFFKTEITLANGEIRKRPLIETNGETGEIVWDKGRDFATVRKVLSMPQVNIVKKTEVQTGGFSKESILPKRNSDKLIARKKDWDPKKYGGFDSPTVAYSVLVVAKVEKGKSKKLKSVKELLGITIMERSSFEKNPIDFLEAKGYKEVKKDLIIKLPKYSLFELENGRKRMLASAGELQKGNELALPSKYVNFLYLASHYEKLKGSPEDNEQKQLFVEQHKHYLDEIIEQISEFSKRVILADANLDKVLSAYNKHRDKPIREQAENIIHLFTLTNLGAPAAFKYFDTTIDRKRYTSTKEVLDATLIHQSITGLYETRIDLSQLGGDGGGGSPAPGSSGGTLQLEEEYRLFEPESTQKQEMDIWLKNFPQAWAETGGMGTAHCQAPVLIQLKATATPISIRQYPMPHEAYQGIKPHIRRMLDQGILKPCQSPWNTPLLPVKKPGTEDYRPVQDLREVNKRVEDIHPTVPNPYNLLSTLPPSHPWYTVLDLKDAFFCLRLHSESQLLFAFEWRDPEIGLSGQLTWTRLPQGFKNSPTLFNEALHSDLADFRVRYPALVLLQYVDDLLLAAATRTECLEGTKALLETLGNKGYRASAKKAQICLQEVTYLGYSLKDGQRWLTKARKEAILSIPVPKNSRQVREFLGKAGYCRLFIPGFAELAAPLYPLTRPGTLFQWGTEQQLAFEDIKKALLSSPALGLPDITKPFELFIDENSGFAKGVLVQKLGPWKRPVAYLSKKLDTVASGWPPCLRMVAAIAILVKDAGKLTLGQPLTILTSHPVEALVRQPPNKWLSNARMTHYQAMLLDAERVHFGPTVSLNPATLLPLPSGGNHHDCLQILAETHGTRPDLTDQPLPDADLTWYTDGSSFIRNGEREAGAAVTTESEVIWAAPLPPGTSAQRAELIALTQALKMAEGKKLTVYTDSRYAFATTHVHGEIYRRRGWLTSEGKEIKNKNEILALLEALFLPKRLSIIHCPGHQKGDSPQAKGNRLADDTAKKAATETHSSLTVLPAGKRTADGSEFEKRTADGSEFESPKKKAKVE

SEQ ID NO: 1264 - protein, 2095 aa, synthetic construct
MPAAKRVKLDGGDKKYSIGLDIGTNSVGWAVITDEYKVPSKKFKVLGNTDRHSIKKNLIGALLFDSGETAEATRLKRTARRRYTRRKNRICYLQEIFSNEMAKVDDSFFHRLEESFLVEEDKKHERHPIFGNIVDEVAYHEKYPTIYHLRKKLVDSTDKADLRLIYLALAHMIKFRGHFLIEGDLNPDNSDVDKLFIQLVQTYNQLFEENPINASGVDAKAILSARLSKSRRLENLIAQLPGEKKNGLFGNLIALSLGLTPNFKSNFDLAEDAKLQLSKDTYDDDLDNLLAQIGDQYADLFLAAKNLSDAILLSDILRVNTEITKAPLSASMIKRYDEHHQDLTLLKALVRQQLPEKYKEIFFDQSKNGYAGYIDGGASQEEFYKFIKPILEKMDGTEELLVKLNREDLLRKQRTFDNGSIPHQIHLGELHAILRRQEDFYPFLKDNREKIEKILTFRIPYYVGPLARGNSRFAWMTRKSEETITPWNFEEVVDKGASAQSFIERMTNFDKNLPNEKVLPKHSLLYEYFTVYNELTKVKYVTEGMRKPAFLSGEQKKAIVDLLFKTNRKVTVKQLKEDYFKKIECFDSVEISGVEDRFNASLGTYHDLLKIIKDKDFLDNEENEDILEDIVLTLTLFEDREMIEERLKTYAHLFDDKVMKQLKRRRYTGWGRLSRKLINGIRDKQSGKTILDFLKSDGFANRNFMQLIHDDSLTFKEDIQKAQVSGQGDSLHEHIANLAGSPAIKKGILQTVKVVDELVKVMGRHKPENIVIEMARENQTTQKGQKNSRERMKRIEEGIKELGSQILKEHPVENTQLQNEKLYLYYLQNGRDMYVDQELDINRLSDYDVDHIVPQSFLKDDSIDNKVLTRSDKARGKSDNVPSEEVVKKMKNYWRQLLNAKLITQRKFDNLTKAERGGLSELDKAGFIKRQLVETRQITKHVAQILDSRMNTKYDENDKLIREVKVITLKSKLVSDFRKDFQFYKVREINNYHHAHDAYLNAVVGTALIKKYPKLESEFVYGDYKVYDVRKMIAKSEQEIGKATAKYFFYSNIMNFFKTEITLANGEIRKRPLIETNGETGEIVWDKGRDFATVRKVLSMPQVNIVKKTEVQTGGFSKESILPKRNSDKLIARKKDWDPKKYGGFDSPTVAYSVLVVAKVEKGKSKKLKSVKELLGITIMERSSFEKNPIDFLEAKGYKEVKKDLIIKLPKYSLFELENGRKRMLASAGELQKGNELALPSKYVNFLYLASHYEKLKGSPEDNEQKQLFVEQHKHYLDEIIEQISEFSKRVILADANLDKVLSAYNKHRDKPIREQAENIIHLFTLTNLGAPAAFKYFDTTIDRKRYTSTKEVLDATLIHQSITGLYETRIDLSQLGGDGGPAPEAAAKGGSGGTLQLEEEYRLFEPESTQKQEMDIWLKNFPQAWAETGGMGTAHCQAPVLIQLKATATPISIRQYPMPHEAYQGIKPHIRRMLDQGILKPCQSPWNTPLLPVKKPGTEDYRPVQDLREVNKRVEDIHPTVPNPYNLLSTLPPSHPWYTVLDLKDAFFCLRLHSESQLLFAFEWRDPEIGLSGQLTWTRLPQGFKNSPTLFNEALHSDLADFRVRYPALVLLQYVDDLLLAAATRTECLEGTKALLETLGNKGYRASAKKAQICLQEVTYLGYSLKDGQRWLTKARKEAILSIPVPKNSRQVREFLGKAGYCRLFIPGFAELAAPLYPLTRPGTLFQWGTEQQLAFEDIKKALLSSPALGLPDITKPFELFIDENSGFAKGVLVQKLGPWKRPVAYLSKKLDTVASGWPPCLRMVAAIAILVKDAGKLTLGQPLTILTSHPVEALVRQPPNKWLSNARMTHYQAMLLDAERVHFGPTVSLNPATLLPLPSGGNHHDCLQILAETHGTRPDLTDQPLPDADLTWYTDGSSFIRNGEREAGAAVTTESEVIWAAPLPPGTSAQRAELIALTQALKMAEGKKLTVYTDSRYAFATTHVHGEIYRRRGWLTSEGKEIKNKNEILALLEALFLPKRLSIIHCPGHQKGDSPQAKGNRLADDTAKKAATETHSSLTVLPAGKRTADGSEFEKRTADGSEFESPKKKAKVE

SEQ ID NO: 1265 - protein, 2095 aa, synthetic construct
MPAAKRVKLDGGDKKYSIGLDIGTNSVGWAVITDEYKVPSKKFKVLGNTDRHSIKKNLIGALLFDSGETAEATRLKRTARRRYTRRKNRICYLQEIFSNEMAKVDDSFFHRLEESFLVEEDKKHERHPIFGNIVDEVAYHEKYPTIYHLRKKLVDSTDKADLRLIYLALAHMIKFRGHFLIEGDLNPDNSDVDKLFIQLVQTYNQLFEENPINASGVDAKAILSARLSKSRRLENLIAQLPGEKKNGLFGNLIALSLGLTPNFKSNFDLAEDAKLQLSKDTYDDDLDNLLAQIGDQYADLFLAAKNLSDAILLSDILRVNTEITKAPLSASMIKRYDEHHQDLTLLKALVRQQLPEKYKEIFFDQSKNGYAGYIDGGASQEEFYKFIKPILEKMDGTEELLVKLNREDLLRKQRTFDNGSIPHQIHLGELHAILRRQEDFYPFLKDNREKIEKILTFRIPYYVGPLARGNSRFAWMTRKSEETITPWNFEEVVDKGASAQSFIERMTNFDKNLPNEKVLPKHSLLYEYFTVYNELTKVKYVTEGMRKPAFLSGEQKKAIVDLLFKTNRKVTVKQLKEDYFKKIECFDSVEISGVEDRFNASLGTYHDLLKIIKDKDFLDNEENEDILEDIVLTLTLFEDREMIEERLKTYAHLFDDKVMKQLKRRRYTGWGRLSRKLINGIRDKQSGKTILDFLKSDGFANRNFMQLIHDDSLTFKEDIQKAQVSGQGDSLHEHIANLAGSPAIKKGILQTVKVVDELVKVMGRHKPENIVIEMARENQTTQKGQKNSRERMKRIEEGIKELGSQILKEHPVENTQLQNEKLYLYYLQNGRDMYVDQELDINRLSDYDVDHIVPQSFLKDDSIDNKVLTRSDKARGKSDNVPSEEVVKKMKNYWRQLLNAKLITQRKFDNLTKAERGGLSELDKAGFIKRQLVETRQITKHVAQILDSRMNTKYDENDKLIREVKVITLKSKLVSDFRKDFQFYKVREINNYHHAHDAYLNAVVGTALIKKYPKLESEFVYGDYKVYDVRKMIAKSEQEIGKATAKYFFYSNIMNFFKTEITLANGEIRKRPLIETNGETGEIVWDKGRDFATVRKVLSMPQVNIVKKTEVQTGGFSKESILPKRNSDKLIARKKDWDPKKYGGFDSPTVAYSVLVVAKVEKGKSKKLKSVKELLGITIMERSSFEKNPIDFLEAKGYKEVKKDLIIKLPKYSLFELENGRKRMLASAGELQKGNELALPSKYVNFLYLASHYEKLKGSPEDNEQKQLFVEQHKHYLDEIIEQISEFSKRVILADANLDKVLSAYNKHRDKPIREQAENIIHLFTLTNLGAPAAFKYFDTTIDRKRYTSTKEVLDATLIHQSITGLYETRIDLSQLGGDGGGSSEAAAKGGSGGTLQLEEEYRLFEPESTQKQEMDIWLKNFPQAWAETGGMGTAHCQAPVLIQLKATATPISIRQYPMPHEAYQGIKPHIRRMLDQGILKPCQSPWNTPLLPVKKPGTEDYRPVQDLREVNKRVEDIHPTVPNPYNLLSTLPPSHPWYTVLDLKDAFFCLRLHSESQLLFAFEWRDPEIGLSGQLTWTRLPQGFKNSPTLFNEALHSDLADFRVRYPALVLLQYVDDLLLAAATRTECLEGTKALLETLGNKGYRASAKKAQICLQEVTYLGYSLKDGQRWLTKARKEAILSIPVPKNSRQVREFLGKAGYCRLFIPGFAELAAPLYPLTRPGTLFQWGTEQQLAFEDIKKALLSSPALGLPDITKPFELFIDENSGFAKGVLVQKLGPWKRPVAYLSKKLDTVASGWPPCLRMVAAIAILVKDAGKLTLGQPLTILTSHPVEALVRQPPNKWLSNARMTHYQAMLLDAERVHFGPTVSLNPATLLPLPSGGNHHDCLQILAETHGTRPDLTDQPLPDADLTWYTDGSSFIRNGEREAGAAVTTESEVIWAAPLPPGTSAQRAELIALTQALKMAEGKKLTVYTDSRYAFATTHVHGEIYRRRGWLTSEGKEIKNKNEILALLEALFLPKRLSIIHCPGHQKGDSPQAKGNRLADDTAKKAATETHSSLTVLPAGKRTADGSEFEKRTADGSEFESPKKKAKVE

SEQ ID NO: 1266 - protein, 2095 aa, synthetic construct
MPAAKRVKLDGGDKKYSIGLDIGTNSVGWAVITDEYKVPSKKFKVLGNTDRHSIKKNLIGALLFDSGETAEATRLKRTARRRYTRRKNRICYLQEIFSNEMAKVDDSFFHRLEESFLVEEDKKHERHPIFGNIVDEVAYHEKYPTIYHLRKKLVDSTDKADLRLIYLALAHMIKFRGHFLIEGDLNPDNSDVDKLFIQLVQTYNQLFEENPINASGVDAKAILSARLSKSRRLENLIAQLPGEKKNGLFGNLIALSLGLTPNFKSNFDLAEDAKLQLSKDTYDDDLDNLLAQIGDQYADLFLAAKNLSDAILLSDILRVNTEITKAPLSASMIKRYDEHHQDLTLLKALVRQQLPEKYKEIFFDQSKNGYAGYIDGGASQEEFYKFIKPILEKMDGTEELLVKLNREDLLRKQRTFDNGSIPHQIHLGELHAILRRQEDFYPFLKDNREKIEKILTFRIPYYVGPLARGNSRFAWMTRKSEETITPWNFEEVVDKGASAQSFIERMTNFDKNLPNEKVLPKHSLLYEYFTVYNELTKVKYVTEGMRKPAFLSGEQKKAIVDLLFKTNRKVTVKQLKEDYFKKIECFDSVEISGVEDRFNASLGTYHDLLKIIKDKDFLDNEENEDILEDIVLTLTLFEDREMIEERLKTYAHLFDDKVMKQLKRRRYTGWGRLSRKLINGIRDKQSGKTILDFLKSDGFANRNFMQLIHDDSLTFKEDIQKAQVSGQGDSLHEHIANLAGSPAIKKGILQTVKVVDELVKVMGRHKPENIVIEMARENQTTQKGQKNSRERMKRIEEGIKELGSQILKEHPVENTQLQNEKLYLYYLQNGRDMYVDQELDINRLSDYDVDHIVPQSFLKDDSIDNKVLTRSDKARGKSDNVPSEEVVKKMKNYWRQLLNAKLITQRKFDNLTKAERGGLSELDKAGFIKRQLVETRQITKHVAQILDSRMNTKYDENDKLIREVKVITLKSKLVSDFRKDFQFYKVREINNYHHAHDAYLNAVVGTALIKKYPKLESEFVYGDYKVYDVRKMIAKSEQEIGKATAKYFFYSNIMNFFKTEITLANGEIRKRPLIETNGETGEIVWDKGRDFATVRKVLSMPQVNIVKKTEVQTGGFSKESILPKRNSDKLIARKKDWDPKKYGGFDSPTVAYSVLVVAKVEKGKSKKLKSVKELLGITIMERSSFEKNPIDFLEAKGYKEVKKDLIIKLPKYSLFELENGRKRMLASAGELQKGNELALPSKYVNFLYLASHYEKLKGSPEDNEQKQLFVEQHKHYLDEIIEQISEFSKRVILADANLDKVLSAYNKHRDKPIREQAENIIHLFTLTNLGAPAAFKYFDTTIDRKRYTSTKEVLDATLIHQSITGLYETRIDLSQLGGDGGGGSPAPEAAAKGGTLQLEEEYRLFEPESTQKQEMDIWLKNFPQAWAETGGMGTAHCQAPVLIQLKATATPISIRQYPMPHEAYQGIKPHIRRMLDQGILKPCQSPWNTPLLPVKKPGTEDYRPVQDLREVNKRVEDIHPTVPNPYNLLSTLPPSHPWYTVLDLKDAFFCLRLHSESQLLFAFEWRDPEIGLSGQLTWTRLPQGFKNSPTLFNEALHSDLADFRVRYPALVLLQYVDDLLLAAATRTECLEGTKALLETLGNKGYRASAKKAQICLQEVTYLGYSLKDGQRWLTKARKEAILSIPVPKNSRQVREFLGKAGYCRLFIPGFAELAAPLYPLTRPGTLFQWGTEQQLAFEDIKKALLSSPALGLPDITKPFELFIDENSGFAKGVLVQKLGPWKRPVAYLSKKLDTVASGWPPCLRMVAAIAILVKDAGKLTLGQPLTILTSHPVEALVRQPPNKWLSNARMTHYQAMLLDAERVHFGPTVSLNPATLLPLPSGGNHHDCLQILAETHGTRPDLTDQPLPDADLTWYTDGSSFIRNGEREAGAAVTTESEVIWAAPLPPGTSAQRAELIALTQALKMAEGKKLTVYTDSRYAFATTHVHGEIYRRRGWLTSEGKEIKNKNEILALLEALFLPKRLSIIHCPGHQKGDSPQAKGNRLADDTAKKAATETHSSLTVLPAGKRTADGSEFEKRTADGSEFESPKKKAKVE

SEQ ID NO: 1267 - protein, 2092 aa, synthetic construct
MPAAKRVKLDGGDKKYSIGLDIGTNSVGWAVITDEYKVPSKKFKVLGNTDRHSIKKNLIGALLFDSGETAEATRLKRTARRRYTRRKNRICYLQEIFSNEMAKVDDSFFHRLEESFLVEEDKKHERHPIFGNIVDEVAYHEKYPTIYHLRKKLVDSTDKADLRLIYLALAHMIKFRGHFLIEGDLNPDNSDVDKLFIQLVQTYNQLFEENPINASGVDAKAILSARLSKSRRLENLIAQLPGEKKNGLFGNLIALSLGLTPNFKSNFDLAEDAKLQLSKDTYDDDLDNLLAQIGDQYADLFLAAKNLSDAILLSDILRVNTEITKAPLSASMIKRYDEHHQDLTLLKALVRQQLPEKYKEIFFDQSKNGYAGYIDGGASQEEFYKFIKPILEKMDGTEELLVKLNREDLLRKQRTFDNGSIPHQIHLGELHAILRRQEDFYPFLKDNREKIEKILTFRIPYYVGPLARGNSRFAWMTRKSEETITPWNFEEVVDKGASAQSFIERMTNFDKNLPNEKVLPKHSLLYEYFTVYNELTKVKYVTEGMRKPAFLSGEQKKAIVDLLFKTNRKVTVKQLKEDYFKKIECFDSVEISGVEDRFNASLGTYHDLLKIIKDKDFLDNEENEDILEDIVLTLTLFEDREMIEERLKTYAHLFDDKVMKQLKRRRYTGWGRLSRKLINGIRDKQSGKTILDFLKSDGFANRNFMQLIHDDSLTFKEDIQKAQVSGQGDSLHEHIANLAGSPAIKKGILQTVKVVDELVKVMGRHKPENIVIEMARENQTTQKGQKNSRERMKRIEEGIKELGSQILKEHPVENTQLQNEKLYLYYLQNGRDMYVDQELDINRLSDYDVDHIVPQSFLKDDSIDNKVLTRSDKARGKSDNVPSEEVVKKMKNYWRQLLNAKLITQRKFDNLTKAERGGLSELDKAGFIKRQLVETRQITKHVAQILDSRMNTKYDENDKLIREVKVITLKSKLVSDFRKDFQFYKVREINNYHHAHDAYLNAVVGTALIKKYPKLESEFVYGDYKVYDVRKMIAKSEQEIGKATAKYFFYSNIMNFFKTEITLANGEIRKRPLIETNGETGEIVWDKGRDFATVRKVLSMPQVNIVKKTEVQTGGFSKESILPKRNSDKLIARKKDWDPKKYGGFDSPTVAYSVLVVAKVEKGKSKKLKSVKELLGITIMERSSFEKNPIDFLEAKGYKEVKKDLIIKLPKYSLFELENGRKRMLASAGELQKGNELALPSKYVNFLYLASHYEKLKGSPEDNEQKQLFVEQHKHYLDEIIEQISEFSKRVILADANLDKVLSAYNKHRDKPIREQAENIIHLFTLTNLGAPAAFKYFDTTIDRKRYTSTKEVLDATLIHQSITGLYETRIDLSQLGGDGGEAAAKPAPGGTLQLEEEYRLFEPESTQKQEMDIWLKNFPQAWAETGGMGTAHCQAPVLIQLKATATPISIRQYPMPHEAYQGIKPHIRRMLDQGILKPCQSPWNTPLLPVKKPGTEDYRPVQDLREVNKRVEDIHPTVPNPYNLLSTLPPSHPWYTVLDLKDAFFCLRLHSESQLLFAFEWRDPEIGLSGQLTWTRLPQGFKNSPTLFNEALHSDLADFRVRYPALVLLQYVDDLLLAAATRTECLEGTKALLETLGNKGYRASAKKAQICLQEVTYLGYSLKDGQRWLTKARKEAILSIPVPKNSRQVREFLGKAGYCRLFIPGFAELAAPLYPLTRPGTLFQWGTEQQLAFEDIKKALLSSPALGLPDITKPFELFIDENSGFAKGVLVQKLGPWKRPVAYLSKKLDTVASGWPPCLRMVAAIAILVKDAGKLTLGQPLTILTSHPVEALVRQPPNKWLSNARMTHYQAMLLDAERVHFGPTVSLNPATLLPLPSGGNHHDCLQILAETHGTRPDLTDQPLPDADLTWYTDGSSFIRNGEREAGAAVTTESEVIWAAPLPPGTSAQRAELIALTQALKMAEGKKLTVYTDSRYAFATTHVHGEIYRRRGWLTSEGKEIKNKNEILALLEALFLPKRLSIIHCPGHQKGDSPQAKGNRLADDTAKKAATETHSSLTVLPAGKRTADGSEFEKRTADGSEFESPKKKAKVE

SEQ ID NO: 1268 - protein, 2093 aa, synthetic construct
MPAAKRVKLDGGDKKYSIGLDIGTNSVGWAVITDEYKVPSKKFKVLGNTDRHSIKKNLIGALLFDSGETAEATRLKRTARRRYTRRKNRICYLQEIFSNEMAKVDDSFFHRLEESFLVEEDKKHERHPIFGNIVDEVAYHEKYPTIYHLRKKLVDSTDKADLRLIYLALAHMIKFRGHFLIEGDLNPDNSDVDKLFIQLVQTYNQLFEENPINASGVDAKAILSARLSKSRRLENLIAQLPGEKKNGLFGNLIALSLGLTPNFKSNFDLAEDAKLQLSKDTYDDDLDNLLAQIGDQYADLFLAAKNLSDAILLSDILRVNTEITKAPLSASMIKRYDEHHQDLTLLKALVRQQLPEKYKEIFFDQSKNGYAGYIDGGASQEEFYKFIKPILEKMDGTEELLVKLNREDLLRKQRTFDNGSIPHQIHLGELHAILRRQEDFYPFLKDNREKIEKILTFRIPYYVGPLARGNSRFAWMTRKSEETITPWNFEEVVDKGASAQSFIERMTNFDKNLPNEKVLPKHSLLYEYFTVYNELTKVKYVTEGMRKPAFLSGEQKKAIVDLLFKTNRKVTVKQLKEDYFKKIECFDSVEISGVEDRFNASLGTYHDLLKIIKDKDFLDNEENEDILEDIVLTLTLFEDREMIEERLKTYAHLFDDKVMKQLKRRRYTGWGRLSRKLINGIRDKQSGKTILDFLKSDGFANRNFMQLIHDDSLTFKEDIQKAQVSGQGDSLHEHIANLAGSPAIKKGILQTVKVVDELVKVMGRHKPENIVIEMARENQTTQKGQKNSRERMKRIEEGIKELGSQILKEHPVENTQLQNEKLYLYYLQNGRDMYVDQELDINRLSDYDVDHIVPQSFLKDDSIDNKVLTRSDKARGKSDNVPSEEVVKKMKNYWRQLLNAKLITQRKFDNLTKAERGGLSELDKAGFIKRQLVETRQITKHVAQILDSRMNTKYDENDKLIREVKVITLKSKLVSDFRKDFQFYKVREINNYHHAHDAYLNAVVGTALIKKYPKLESEFVYGDYKVYDVRKMIAKSEQEIGKATAKYFFYSNIMNFFKTEITLANGEIRKRPLIETNGETGEIVWDKGRDFATVRKVLSMPQVNIVKKTEVQTGGFSKESILPKRNSDKLIARKKDWDPKKYGGFDSPTVAYSVLVVAKVEKGKSKKLKSVKELLGITIMERSSFEKNPIDFLEAKGYKEVKKDLIIKLPKYSLFELENGRKRMLASAGELQKGNELALPSKYVNFLYLASHYEKLKGSPEDNEQKQLFVEQHKHYLDEIIEQISEFSKRVILADANLDKVLSAYNKHRDKPIREQAENIIHLFTLTNLGAPAAFKYFDTTIDRKRYTSTKEVLDATLIHQSITGLYETRIDLSQLGGDGGGGGPAPGGSGGTLQLEEEYRLFEPESTQKQEMDIWLKNFPQAWAETGGMGTAHCQAPVLIQLKATATPISIRQYPMPHEAYQGIKPHIRRMLDQGILKPCQSPWNTPLLPVKKPGTEDYRPVQDLREVNKRVEDIHPTVPNPYNLLSTLPPSHPWYTVLDLKDAFFCLRLHSESQLLFAFEWRDPEIGLSGQLTWTRLPQGFKNSPTLFNEALHSDLADFRVRYPALVLLQYVDDLLLAAATRTECLEGTKALLETLGNKGYRASAKKAQICLQEVTYLGYSLKDGQRWLTKARKEAILSIPVPKNSRQVREFLGKAGYCRLFIPGFAELAAPLYPLTRPGTLFQWGTEQQLAFEDIKKALLSSPALGLPDITKPFELFIDENSGFAKGVLVQKLGPWKRPVAYLSKKLDTVASGWPPCLRMVAAIAILVKDAGKLTLGQPLTILTSHPVEALVRQPPNKWLSNARMTHYQAMLLDAERVHFGPTVSLNPATLLPLPSGGNHHDCLQILAETHGTRPDLTDQPLPDADLTWYTDGSSFIRNGEREAGAAVTTESEVIWAAPLPPGTSAQRAELIALTQALKMAEGKKLTVYTDSRYAFATTHVHGEIYRRRGWLTSEGKEIKNKNEILALLEALFLPKRLSIIHCPGHQKGDSPQAKGNRLADDTAKKAATETHSSLTVLPAGKRTADGSEFEKRTADGSEFESPKKKAKVE

SEQ ID NO: 1269 - protein, 2095 aa, synthetic construct
MPAAKRVKLDGGDKKYSIGLDIGTNSVGWAVITDEYKVPSKKFKVLGNTDRHSIKKNLIGALLFDSGETAEATRLKRTARRRYTRRKNRICYLQEIFSNEMAKVDDSFFHRLEESFLVEEDKKHERHPIFGNIVDEVAYHEKYPTIYHLRKKLVDSTDKADLRLIYLALAHMIKFRGHFLIEGDLNPDNSDVDKLFIQLVQTYNQLFEENPINASGVDAKAILSARLSKSRRLENLIAQLPGEKKNGLFGNLIALSLGLTPNFKSNFDLAEDAKLQLSKDTYDDDLDNLLAQIGDQYADLFLAAKNLSDAILLSDILRVNTEITKAPLSASMIKRYDEHHQDLTLLKALVRQQLPEKYKEIFFDQSKNGYAGYIDGGASQEEFYKFIKPILEKMDGTEELLVKLNREDLLRKQRTFDNGSIPHQIHLGELHAILRRQEDFYPFLKDNREKIEKILTFRIPYYVGPLARGNSRFAWMTRKSEETITPWNFEEVVDKGASAQSFIERMTNFDKNLPNEKVLPKHSLLYEYFTVYNELTKVKYVTEGMRKPAFLSGEQKKAIVDLLFKTNRKVTVKQLKEDYFKKIECFDSVEISGVEDRFNASLGTYHDLLKIIKDKDFLDNEENEDILEDIVLTLTLFEDREMIEERLKTYAHLFDDKVMKQLKRRRYTGWGRLSRKLINGIRDKQSGKTILDFLKSDGFANRNFMQLIHDDSLTFKEDIQKAQVSGQGDSLHEHIANLAGSPAIKKGILQTVKVVDELVKVMGRHKPENIVIEMARENQTTQKGQKNSRERMKRIEEGIKELGSQILKEHPVENTQLQNEKLYLYYLQNGRDMYVDQELDINRLSDYDVDHIVPQSFLKDDSIDNKVLTRSDKARGKSDNVPSEEVVKKMKNYWRQLLNAKLITQRKFDNLTKAERGGLSELDKAGFIKRQLVETRQITKHVAQILDSRMNTKYDENDKLIREVKVITLKSKLVSDFRKDFQFYKVREINNYHHAHDAYLNAVVGTALIKKYPKLESEFVYGDYKVYDVRKMIAKSEQEIGKATAKYFFYSNIMNFFKTEITLANGEIRKRPLIETNGETGEIVWDKGRDFATVRKVLSMPQVNIVKKTEVQTGGFSKESILPKRNSDKLIARKKDWDPKKYGGFDSPTVAYSVLVVAKVEKGKSKKLKSVKELLGITIMERSSFEKNPIDFLEAKGYKEVKKDLIIKLPKYSLFELENGRKRMLASAGELQKGNELALPSKYVNFLYLASHYEKLKGSPEDNEQKQLFVEQHKHYLDEIIEQISEFSKRVILADANLDKVLSAYNKHRDKPIREQAENIIHLFTLTNLGAPAAFKYFDTTIDRKRYTSTKEVLDATLIHQSITGLYETRIDLSQLGGDGGGGSGGGEAAAKGGTLQLEEEYRLFEPESTQKQEMDIWLKNFPQAWAETGGMGTAHCQAPVLIQLKATATPISIRQYPMPHEAYQGIKPHIRRMLDQGILKPCQSPWNTPLLPVKKPGTEDYRPVQDLREVNKRVEDIHPTVPNPYNLLSTLPPSHPWYTVLDLKDAFFCLRLHSESQLLFAFEWRDPEIGLSGQLTWTRLPQGFKNSPTLFNEALHSDLADFRVRYPALVLLQYVDDLLLAAATRTECLEGTKALLETLGNKGYRASAKKAQICLQEVTYLGYSLKDGQRWLTKARKEAILSIPVPKNSRQVREFLGKAGYCRLFIPGFAELAAPLYPLTRPGTLFQWGTEQQLAFEDIKKALLSSPALGLPDITKPFELFIDENSGFAKGVLVQKLGPWKRPVAYLSKKLDTVASGWPPCLRMVAAIAILVKDAGKLTLGQPLTILTSHPVEALVRQPPNKWLSNARMTHYQAMLLDAERVHFGPTVSLNPATLLPLPSGGNHHDCLQILAETHGTRPDLTDQPLPDADLTWYTDGSSFIRNGEREAGAAVTTESEVIWAAPLPPGTSAQRAELIALTQALKMAEGKKLTVYTDSRYAFATTHVHGEIYRRRGWLTSEGKEIKNKNEILALLEALFLPKRLSIIHCPGHQKGDSPQAKGNRLADDTAKKAATETHSSLTVLPAGKRTADGSEFEKRTADGSEFESPKKKAKVE

SEQ ID NO: 1270 - protein, 2093 aa, synthetic construct
MPAAKRVKLDGGDKKYSIGLDIGTNSVGWAVITDEYKVPSKKFKVLGNTDRHSIKKNLIGALLFDSGETAEATRLKRTARRRYTRRKNRICYLQEIFSNEMAKVDDSFFHRLEESFLVEEDKKHERHPIFGNIVDEVAYHEKYPTIYHLRKKLVDSTDKADLRLIYLALAHMIKFRGHFLIEGDLNPDNSDVDKLFIQLVQTYNQLFEENPINASGVDAKAILSARLSKSRRLENLIAQLPGEKKNGLFGNLIALSLGLTPNFKSNFDLAEDAKLQLSKDTYDDDLDNLLAQIGDQYADLFLAAKNLSDAILLSDILRVNTEITKAPLSASMIKRYDEHHQDLTLLKALVRQQLPEKYKEIFFDQSKNGYAGYIDGGASQEEFYKFIKPILEKMDGTEELLVKLNREDLLRKQRTFDNGSIPHQIHLGELHAILRRQEDFYPFLKDNREKIEKILTFRIPYYVGPLARGNSRFAWMTRKSEETITPWNFEEVVDKGASAQSFIERMTNFDKNLPNEKVLPKHSLLYEYFTVYNELTKVKYVTEGMRKPAFLSGEQKKAIVDLLFKTNRKVTVKQLKEDYFKKIECFDSVEISGVEDRFNASLGTYHDLLKIIKDKDFLDNEENEDILEDIVLTLTLFEDREMIEERLKTYAHLFDDKVMKQLKRRRYTGWGRLSRKLINGIRDKQSGKTILDFLKSDGFANRNFMQLIHDDSLTFKEDIQKAQVSGQGDSLHEHIANLAGSPAIKKGILQTVKVVDELVKVMGRHKPENIVIEMARENQTTQKGQKNSRERMKRIEEGIKELGSQILKEHPVENTQLQNEKLYLYYLQNGRDMYVDQELDINRLSDYDVDHIVPQSFLKDDSIDNKVLTRSDKARGKSDNVPSEEVVKKMKNYWRQLLNAKLITQRKFDNLTKAERGGLSELDKAGFIKRQLVETRQITKHVAQILDSRMNTKYDENDKLIREVKVITLKSKLVSDFRKDFQFYKVREINNYHHAHDAYLNAVVGTALIKKYPKLESEFVYGDYKVYDVRKMIAKSEQEIGKATAKYFFYSNIMNFFKTEITLANGEIRKRPLIETNGETGEIVWDKGRDFATVRKVLSMPQVNIVKKTEVQTGGFSKESILPKRNSDKLIARKKDWDPKKYGGFDSPTVAYSVLVVAKVEKGKSKKLKSVKELLGITIMERSSFEKNPIDFLEAKGYKEVKKDLIIKLPKYSLFELENGRKRMLASAGELQKGNELALPSKYVNFLYLASHYEKLKGSPEDNEQKQLFVEQHKHYLDEIIEQISEFSKRVILADANLDKVLSAYNKHRDKPIREQAENIIHLFTLTNLGAPAAFKYFDTTIDRKRYTSTKEVLDATLIHQSITGLYETRIDLSQLGGDGGGGSGSSGGGGGTLQLEEEYRLFEPESTQKQEMDIWLKNFPQAWAETGGMGTAHCQAPVLIQLKATATPISIRQYPMPHEAYQGIKPHIRRMLDQGILKPCQSPWNTPLLPVKKPGTEDYRPVQDLREVNKRVEDIHPTVPNPYNLLSTLPPSHPWYTVLDLKDAFFCLRLHSESQLLFAFEWRDPEIGLSGQLTWTRLPQGFKNSPTLFNEALHSDLADFRVRYPALVLLQYVDDLLLAAATRTECLEGTKALLETLGNKGYRASAKKAQICLQEVTYLGYSLKDGQRWLTKARKEAILSIPVPKNSRQVREFLGKAGYCRLFIPGFAELAAPLYPLTRPGTLFQWGTEQQLAFEDIKKALLSSPALGLPDITKPFELFIDENSGFAKGVLVQKLGPWKRPVAYLSKKLDTVASGWPPCLRMVAAIAILVKDAGKLTLGQPLTILTSHPVEALVRQPPNKWLSNARMTHYQAMLLDAERVHFGPTVSLNPATLLPLPSGGNHHDCLQILAETHGTRPDLTDQPLPDADLTWYTDGSSFIRNGEREAGAAVTTESEVIWAAPLPPGTSAQRAELIALTQALKMAEGKKLTVYTDSRYAFATTHVHGEIYRRRGWLTSEGKEIKNKNEILALLEALFLPKRLSIIHCPGHQKGDSPQAKGNRLADDTAKKAATETHSSLTVLPAGKRTADGSEFEKRTADGSEFESPKKKAKVE

SEQ ID NO: 1271 - protein, 2092 aa, synthetic construct
MPAAKRVKLDGGDKKYSIGLDIGTNSVGWAVITDEYKVPSKKFKVLGNTDRHSIKKNLIGALLFDSGETAEATRLKRTARRRYTRRKNRICYLQEIFSNEMAKVDDSFFHRLEESFLVEEDKKHERHPIFGNIVDEVAYHEKYPTIYHLRKKLVDSTDKADLRLIYLALAHMIKFRGHFLIEGDLNPDNSDVDKLFIQLVQTYNQLFEENPINASGVDAKAILSARLSKSRRLENLIAQLPGEKKNGLFGNLIALSLGLTPNFKSNFDLAEDAKLQLSKDTYDDDLDNLLAQIGDQYADLFLAAKNLSDAILLSDILRVNTEITKAPLSASMIKRYDEHHQDLTLLKALVRQQLPEKYKEIFFDQSKNGYAGYIDGGASQEEFYKFIKPILEKMDGTEELLVKLNREDLLRKQRTFDNGSIPHQIHLGELHAILRRQEDFYPFLKDNREKIEKILTFRIPYYVGPLARGNSRFAWMTRKSEETITPWNFEEVVDKGASAQSFIERMTNFDKNLPNEKVLPKHSLLYEYFTVYNELTKVKYVTEGMRKPAFLSGEQKKAIVDLLFKTNRKVTVKQLKEDYFKKIECFDSVEISGVEDRFNASLGTYHDLLKIIKDKDFLDNEENEDILEDIVLTLTLFEDREMIEERLKTYAHLFDDKVMKQLKRRRYTGWGRLSRKLINGIRDKQSGKTILDFLKSDGFANRNFMQLIHDDSLTFKEDIQKAQVSGQGDSLHEHIANLAGSPAIKKGILQTVKVVDELVKVMGRHKPENIVIEMARENQTTQKGQKNSRERMKRIEEGIKELGSQILKEHPVENTQLQNEKLYLYYLQNGRDMYVDQELDINRLSDYDVDHIVPQSFLKDDSIDNKVLTRSDKARGKSDNVPSEEVVKKMKNYWRQLLNAKLITQRKFDNLTKAERGGLSELDKAGFIKRQLVETRQITKHVAQILDSRMNTKYDENDKLIREVKVITLKSKLVSDFRKDFQFYKVREINNYHHAHDAYLNAVVGTALIKKYPKLESEFVYGDYKVYDVRKMIAKSEQEIGKATAKYFFYSNIMNFFKTEITLANGEIRKRPLIETNGETGEIVWDKGRDFATVRKVLSMPQVNIVKKTEVQTGGFSKESILPKRNSDKLIARKKDWDPKKYGGFDSPTVAYSVLVVAKVEKGKSKKLKSVKELLGITIMERSSFEKNPIDFLEAKGYKEVKKDLIIKLPKYSLFELENGRKRMLASAGELQKGNELALPSKYVNFLYLASHYEKLKGSPEDNEQKQLFVEQHKHYLDEIIEQISEFSKRVILADANLDKVLSAYNKHRDKPIREQAENIIHLFTLTNLGAPAAFKYFDTTIDRKRYTSTKEVLDATLIHQSITGLYETRIDLSQLGGDGGEAAAKGGGGGTLQLEEEYRLFEPESTQKQEMDIWLKNFPQAWAETGGMGTAHCQAPVLIQLKATATPISIRQYPMPHEAYQGIKPHIRRMLDQGILKPCQSPWNTPLLPVKKPGTEDYRPVQDLREVNKRVEDIHPTVPNPYNLLSTLPPSHPWYTVLDLKDAFFCLRLHSESQLLFAFEWRDPEIGLSGQLTWTRLPQGFKNSPTLFNEALHSDLADFRVRYPALVLLQYVDDLLLAAATRTECLEGTKALLETLGNKGYRASAKKAQICLQEVTYLGYSLKDGQRWLTKARKEAILSIPVPKNSRQVREFLGKAGYCRLFIPGFAELAAPLYPLTRPGTLFQWGTEQQLAFEDIKKALLSSPALGLPDITKPFELFIDENSGFAKGVLVQKLGPWKRPVAYLSKKLDTVASGWPPCLRMVAAIAILVKDAGKLTLGQPLTILTSHPVEALVRQPPNKWLSNARMTHYQAMLLDAERVHFGPTVSLNPATLLPLPSGGNHHDCLQILAETHGTRPDLTDQPLPDADLTWYTDGSSFIRNGEREAGAAVTTESEVIWAAPLPPGTSAQRAELIALTQALKMAEGKKLTVYTDSRYAFATTHVHGEIYRRRGWLTSEGKEIKNKNEILALLEALFLPKRLSIIHCPGHQKGDSPQAKGNRLADDTAKKAATETHSSLTVLPAGKRTADGSEFEKRTADGSEFESPKKKAKVE

SEQ ID NO: 1272 - protein, 2090 aa, synthetic construct
MPAAKRVKLDGGDKKYSIGLDIGTNSVGWAVITDEYKVPSKKFKVLGNTDRHSIKKNLIGALLFDSGETAEATRLKRTARRRYTRRKNRICYLQEIFSNEMAKVDDSFFHRLEESFLVEEDKKHERHPIFGNIVDEVAYHEKYPTIYHLRKKLVDSTDKADLRLIYLALAHMIKFRGHFLIEGDLNPDNSDVDKLFIQLVQTYNQLFEENPINASGVDAKAILSARLSKSRRLENLIAQLPGEKKNGLFGNLIALSLGLTPNFKSNFDLAEDAKLQLSKDTYDDDLDNLLAQIGDQYADLFLAAKNLSDAILLSDILRVNTEITKAPLSASMIKRYDEHHQDLTLLKALVRQQLPEKYKEIFFDQSKNGYAGYIDGGASQEEFYKFIKPILEKMDGTEELLVKLNREDLLRKQRTFDNGSIPHQIHLGELHAILRRQEDFYPFLKDNREKIEKILTFRIPYYVGPLARGNSRFAWMTRKSEETITPWNFEEVVDKGASAQSFIERMTNFDKNLPNEKVLPKHSLLYEYFTVYNELTKVKYVTEGMRKPAFLSGEQKKAIVDLLFKTNRKVTVKQLKEDYFKKIECFDSVEISGVEDRFNASLGTYHDLLKIIKDKDFLDNEENEDILEDIVLTLTLFEDREMIEERLKTYAHLFDDKVMKQLKRRRYTGWGRLSRKLINGIRDKQSGKTILDFLKSDGFANRNFMQLIHDDSLTFKEDIQKAQVSGQGDSLHEHIANLAGSPAIKKGILQTVKVVDELVKVMGRHKPENIVIEMARENQTTQKGQKNSRERMKRIEEGIKELGSQILKEHPVENTQLQNEKLYLYYLQNGRDMYVDQELDINRLSDYDVDHIVPQSFLKDDSIDNKVLTRSDKARGKSDNVPSEEVVKKMKNYWRQLLNAKLITQRKFDNLTKAERGGLSELDKAGFIKRQLVETRQITKHVAQILDSRMNTKYDENDKLIREVKVITLKSKLVSDFRKDFQFYKVREINNYHHAHDAYLNAVVGTALIKKYPKLESEFVYGDYKVYDVRKMIAKSEQEIGKATAKYFFYSNIMNFFKTEITLANGEIRKRPLIETNGETGEIVWDKGRDFATVRKVLSMPQVNIVKKTEVQTGGFSKESILPKRNSDKLIARKKDWDPKKYGGFDSPTVAYSVLVVAKVEKGKSKKLKSVKELLGITIMERSSFEKNPIDFLEAKGYKEVKKDLIIKLPKYSLFELENGRKRMLASAGELQKGNELALPSKYVNFLYLASHYEKLKGSPEDNEQKQLFVEQHKHYLDEIIEQISEFSKRVILADANLDKVLSAYNKHRDKPIREQAENIIHLFTLTNLGAPAAFKYFDTTIDRKRYTSTKEVLDATLIHQSITGLYETRIDLSQLGGDGGGGGGSSGGTLQLEEEYRLFEPESTQKQEMDIWLKNFPQAWAETGGMGTAHCQAPVLIQLKATATPISIRQYPMPHEAYQGIKPHIRRMLDQGILKPCQSPWNTPLLPVKKPGTEDYRPVQDLREVNKRVEDIHPTVPNPYNLLSTLPPSHPWYTVLDLKDAFFCLRLHSESQLLFAFEWRDPEIGLSGQLTWTRLPQGFKNSPTLFNEALHSDLADFRVRYPALVLLQYVDDLLLAAATRTECLEGTKALLETLGNKGYRASAKKAQICLQEVTYLGYSLKDGQRWLTKARKEAILSIPVPKNSRQVREFLGKAGYCRLFIPGFAELAAPLYPLTRPGTLFQWGTEQQLAFEDIKKALLSSPALGLPDITKPFELFIDENSGFAKGVLVQKLGPWKRPVAYLSKKLDTVASGWPPCLRMVAAIAILVKDAGKLTLGQPLTILTSHPVEALVRQPPNKWLSNARMTHYQAMLLDAERVHFGPTVSLNPATLLPLPSGGNHHDCLQILAETHGTRPDLTDQPLPDADLTWYTDGSSFIRNGEREAGAAVTTESEVIWAAPLPPGTSAQRAELIALTQALKMAEGKKLTVYTDSRYAFATTHVHGEIYRRRGWLTSEGKEIKNKNEILALLEALFLPKRLSIIHCPGHQKGDSPQAKGNRLADDTAKKAATETHSSLTVLPAGKRTADGSEFEKRTADGSEFESPKKKAKVE

SEQ ID NO: 1273 - protein, 2089 aa, synthetic construct
MPAAKRVKLDGGDKKYSIGLDIGTNSVGWAVITDEYKVPSKKFKVLGNTDRHSIKKNLIGALLFDSGETAEATRLKRTARRRYTRRKNRICYLQEIFSNEMAKVDDSFFHRLEESFLVEEDKKHERHPIFGNIVDEVAYHEKYPTIYHLRKKLVDSTDKADLRLIYLALAHMIKFRGHFLIEGDLNPDNSDVDKLFIQLVQTYNQLFEENPINASGVDAKAILSARLSKSRRLENLIAQLPGEKKNGLFGNLIALSLGLTPNFKSNFDLAEDAKLQLSKDTYDDDLDNLLAQIGDQYADLFLAAKNLSDAILLSDILRVNTEITKAPLSASMIKRYDEHHQDLTLLKALVRQQLPEKYKEIFFDQSKNGYAGYIDGGASQEEFYKFIKPILEKMDGTEELLVKLNREDLLRKQRTFDNGSIPHQIHLGELHAILRRQEDFYPFLKDNREKIEKILTFRIPYYVGPLARGNSRFAWMTRKSEETITPWNFEEVVDKGASAQSFIERMTNFDKNLPNEKVLPKHSLLYEYFTVYNELTKVKYVTEGMRKPAFLSGEQKKAIVDLLFKTNRKVTVKQLKEDYFKKIECFDSVEISGVEDRFNASLGTYHDLLKIIKDKDFLDNEENEDILEDIVLTLTLFEDREMIEERLKTYAHLFDDKVMKQLKRRRYTGWGRLSRKLINGIRDKQSGKTILDFLKSDGFANRNFMQLIHDDSLTFKEDIQKAQVSGQGDSLHEHIANLAGSPAIKKGILQTVKVVDELVKVMGRHKPENIVIEMARENQTTQKGQKNSRERMKRIEEGIKELGSQILKEHPVENTQLQNEKLYLYYLQNGRDMYVDQELDINRLSDYDVDHIVPQSFLKDDSIDNKVLTRSDKARGKSDNVPSEEVVKKMKNYWRQLLNAKLITQRKFDNLTKAERGGLSELDKAGFIKRQLVETRQITKHVAQILDSRMNTKYDENDKLIREVKVITLKSKLVSDFRKDFQFYKVREINNYHHAHDAYLNAVVGTALIKKYPKLESEFVYGDYKVYDVRKMIAKSEQEIGKATAKYFFYSNIMNFFKTEITLANGEIRKRPLIETNGETGEIVWDKGRDFATVRKVLSMPQVNIVKKTEVQTGGFSKESILPKRNSDKLIARKKDWDPKKYGGFDSPTVAYSVLVVAKVEKGKSKKLKSVKELLGITIMERSSFEKNPIDFLEAKGYKEVKKDLIIKLPKYSLFELENGRKRMLASAGELQKGNELALPSKYVNFLYLASHYEKLKGSPEDNEQKQLFVEQHKHYLDEIIEQISEFSKRVILADANLDKVLSAYNKHRDKPIREQAENIIHLFTLTNLGAPAAFKYFDTTIDRKRYTSTKEVLDATLIHQSITGLYETRIDLSQLGGDGGGGGGSGGTLQLEEEYRLFEPESTQKQEMDIWLKNFPQAWAETGGMGTAHCQAPVLIQLKATATPISIRQYPMPHEAYQGIKPHIRRMLDQGILKPCQSPWNTPLLPVKKPGTEDYRPVQDLREVNKRVEDIHPTVPNPYNLLSTLPPSHPWYTVLDLKDAFFCLRLHSESQLLFAFEWRDPEIGLSGQLTWTRLPQGFKNSPTLFNEALHSDLADFRVRYPALVLLQYVDDLLLAAATRTECLEGTKALLETLGNKGYRASAKKAQICLQEVTYLGYSLKDGQRWLTKARKEAILSIPVPKNSRQVREFLGKAGYCRLFIPGFAELAAPLYPLTRPGTLFQWGTEQQLAFEDIKKALLSSPALGLPDITKPFELFIDENSGFAKGVLVQKLGPWKRPVAYLSKKLDTVASGWPPCLRMVAAIAILVKDAGKLTLGQPLTILTSHPVEALVRQPPNKWLSNARMTHYQAMLLDAERVHFGPTVSLNPATLLPLPSGGNHHDCLQILAETHGTRPDLTDQPLPDADLTWYTDGSSFIRNGEREAGAAVTTESEVIWAAPLPPGTSAQRAELIALTQALKMAEGKKLTVYTDSRYAFATTHVHGEIYRRRGWLTSEGKEIKNKNEILALLEALFLPKRLSIIHCPGHQKGDSPQAKGNRLADDTAKKAATETHSSLTVLPAGKRTADGSEFEKRTADGSEFESPKKKAKVE

SEQ ID NO: 1274 - protein, 2099 aa, synthetic construct
MPAAKRVKLDGGDKKYSIGLDIGTNSVGWAVITDEYKVPSKKFKVLGNTDRHSIKKNLIGALLFDSGETAEATRLKRTARRRYTRRKNRICYLQEIFSNEMAKVDDSFFHRLEESFLVEEDKKHERHPIFGNIVDEVAYHEKYPTIYHLRKKLVDSTDKADLRLIYLALAHMIKFRGHFLIEGDLNPDNSDVDKLFIQLVQTYNQLFEENPINASGVDAKAILSARLSKSRRLENLIAQLPGEKKNGLFGNLIALSLGLTPNFKSNFDLAEDAKLQLSKDTYDDDLDNLLAQIGDQYADLFLAAKNLSDAILLSDILRVNTEITKAPLSASMIKRYDEHHQDLTLLKALVRQQLPEKYKEIFFDQSKNGYAGYIDGGASQEEFYKFIKPILEKMDGTEELLVKLNREDLLRKQRTFDNGSIPHQIHLGELHAILRRQEDFYPFLKDNREKIEKILTFRIPYYVGPLARGNSRFAWMTRKSEETITPWNFEEVVDKGASAQSFIERMTNFDKNLPNEKVLPKHSLLYEYFTVYNELTKVKYVTEGMRKPAFLSGEQKKAIVDLLFKTNRKVTVKQLKEDYFKKIECFDSVEISGVEDRFNASLGTYHDLLKIIKDKDFLDNEENEDILEDIVLTLTLFEDREMIEERLKTYAHLFDDKVMKQLKRRRYTGWGRLSRKLINGIRDKQSGKTILDFLKSDGFANRNFMQLIHDDSLTFKEDIQKAQVSGQGDSLHEHIANLAGSPAIKKGILQTVKVVDELVKVMGRHKPENIVIEMARENQTTQKGQKNSRERMKRIEEGIKELGSQILKEHPVENTQLQNEKLYLYYLQNGRDMYVDQELDINRLSDYDVDHIVPQSFLKDDSIDNKVLTRSDKARGKSDNVPSEEVVKKMKNYWRQLLNAKLITQRKFDNLTKAERGGLSELDKAGFIKRQLVETRQITKHVAQILDSRMNTKYDENDKLIREVKVITLKSKLVSDFRKDFQFYKVREINNYHHAHDAYLNAVVGTALIKKYPKLESEFVYGDYKVYDVRKMIAKSEQEIGKATAKYFFYSNIMNFFKTEITLANGEIRKRPLIETNGETGEIVWDKGRDFATVRKVLSMPQVNIVKKTEVQTGGFSKESILPKRNSDKLIARKKDWDPKKYGGFDSPTVAYSVLVVAKVEKGKSKKLKSVKELLGITIMERSSFEKNPIDFLEAKGYKEVKKDLIIKLPKYSLFELENGRKRMLASAGELQKGNELALPSKYVNFLYLASHYEKLKGSPEDNEQKQLFVEQHKHYLDEIIEQISEFSKRVILADANLDKVLSAYNKHRDKPIREQAENIIHLFTLTNLGAPAAFKYFDTTIDRKRYTSTKEVLDATLIHQSITGLYETRIDLSQLGGDGGGSSGSSGSSGSSGSSGGTLQLEEEYRLFEPESTQKQEMDIWLKNFPQAWAETGGMGTAHCQAPVLIQLKATATPISIRQYPMPHEAYQGIKPHIRRMLDQGILKPCQSPWNTPLLPVKKPGTEDYRPVQDLREVNKRVEDIHPTVPNPYNLLSTLPPSHPWYTVLDLKDAFFCLRLHSESQLLFAFEWRDPEIGLSGQLTWTRLPQGFKNSPTLFNEALHSDLADFRVRYPALVLLQYVDDLLLAAATRTECLEGTKALLETLGNKGYRASAKKAQICLQEVTYLGYSLKDGQRWLTKARKEAILSIPVPKNSRQVREFLGKAGYCRLFIPGFAELAAPLYPLTRPGTLFQWGTEQQLAFEDIKKALLSSPALGLPDITKPFELFIDENSGFAKGVLVQKLGPWKRPVAYLSKKLDTVASGWPPCLRMVAAIAILVKDAGKLTLGQPLTILTSHPVEALVRQPPNKWLSNARMTHYQAMLLDAERVHFGPTVSLNPATLLPLPSGGNHHDCLQILAETHGTRPDLTDQPLPDADLTWYTDGSSFIRNGEREAGAAVTTESEVIWAAPLPPGTSAQRAELIALTQALKMAEGKKLTVYTDSRYAFATTHVHGEIYRRRGWLTSEGKEIKNKNEILALLEALFLPKRLSIIHCPGHQKGDSPQAKGNRLADDTAKKAATETHSSLTVLPAGKRTADGSEFEKRTADGSEFESPKKKAKVE

SEQ ID NO: 1275 - protein, 2093 aa, synthetic construct
MPAAKRVKLDGGDKKYSIGLDIGTNSVGWAVITDEYKVPSKKFKVLGNTDRHSIKKNLIGALLFDSGETAEATRLKRTARRRYTRRKNRICYLQEIFSNEMAKVDDSFFHRLEESFLVEEDKKHERHPIFGNIVDEVAYHEKYPTIYHLRKKLVDSTDKADLRLIYLALAHMIKFRGHFLIEGDLNPDNSDVDKLFIQLVQTYNQLFEENPINASGVDAKAILSARLSKSRRLENLIAQLPGEKKNGLFGNLIALSLGLTPNFKSNFDLAEDAKLQLSKDTYDDDLDNLLAQIGDQYADLFLAAKNLSDAILLSDILRVNTEITKAPLSASMIKRYDEHHQDLTLLKALVRQQLPEKYKEIFFDQSKNGYAGYIDGGASQEEFYKFIKPILEKMDGTEELLVKLNREDLLRKQRTFDNGSIPHQIHLGELHAILRRQEDFYPFLKDNREKIEKILTFRIPYYVGPLARGNSRFAWMTRKSEETITPWNFEEVVDKGASAQSFIERMTNFDKNLPNEKVLPKHSLLYEYFTVYNELTKVKYVTEGMRKPAFLSGEQKKAIVDLLFKTNRKVTVKQLKEDYFKKIECFDSVEISGVEDRFNASLGTYHDLLKIIKDKDFLDNEENEDILEDIVLTLTLFEDREMIEERLKTYAHLFDDKVMKQLKRRRYTGWGRLSRKLINGIRDKQSGKTILDFLKSDGFANRNFMQLIHDDSLTFKEDIQKAQVSGQGDSLHEHIANLAGSPAIKKGILQTVKVVDELVKVMGRHKPENIVIEMARENQTTQKGQKNSRERMKRIEEGIKELGSQILKEHPVENTQLQNEKLYLYYLQNGRDMYVDQELDINRLSDYDVDHIVPQSFLKDDSIDNKVLTRSDKARGKSDNVPSEEVVKKMKNYWRQLLNAKLITQRKFDNLTKAERGGLSELDKAGFIKRQLVETRQITKHVAQILDSRMNTKYDENDKLIREVKVITLKSKLVSDFRKDFQFYKVREINNYHHAHDAYLNAVVGTALIKKYPKLESEFVYGDYKVYDVRKMIAKSEQEIGKATAKYFFYSNIMNFFKTEITLANGEIRKRPLIETNGETGEIVWDKGRDFATVRKVLSMPQVNIVKKTEVQTGGFSKESILPKRNSDKLIARKKDWDPKKYGGFDSPTVAYSVLVVAKVEKGKSKKLKSVKELLGITIMERSSFEKNPIDFLEAKGYKEVKKDLIIKLPKYSLFELENGRKRMLASAGELQKGNELALPSKYVNFLYLASHYEKLKGSPEDNEQKQLFVEQHKHYLDEIIEQISEFSKRVILADANLDKVLSAYNKHRDKPIREQAENIIHLFTLTNLGAPAAFKYFDTTIDRKRYTSTKEVLDATLIHQSITGLYETRIDLSQLGGDGGGGSGGGGSSGGTLQLEEEYRLFEPESTQKQEMDIWLKNFPQAWAETGGMGTAHCQAPVLIQLKATATPISIRQYPMPHEAYQGIKPHIRRMLDQGILKPCQSPWNTPLLPVKKPGTEDYRPVQDLREVNKRVEDIHPTVPNPYNLLSTLPPSHPWYTVLDLKDAFFCLRLHSESQLLFAFEWRDPEIGLSGQLTWTRLPQGFKNSPTLFNEALHSDLADFRVRYPALVLLQYVDDLLLAAATRTECLEGTKALLETLGNKGYRASAKKAQICLQEVTYLGYSLKDGQRWLTKARKEAILSIPVPKNSRQVREFLGKAGYCRLFIPGFAELAAPLYPLTRPGTLFQWGTEQQLAFEDIKKALLSSPALGLPDITKPFELFIDENSGFAKGVLVQKLGPWKRPVAYLSKKLDTVASGWPPCLRMVAAIAILVKDAGKLTLGQPLTILTSHPVEALVRQPPNKWLSNARMTHYQAMLLDAERVHFGPTVSLNPATLLPLPSGGNHHDCLQILAETHGTRPDLTDQPLPDADLTWYTDGSSFIRNGEREAGAAVTTESEVIWAAPLPPGTSAQRAELIALTQALKMAEGKKLTVYTDSRYAFATTHVHGEIYRRRGWLTSEGKEIKNKNEILALLEALFLPKRLSIIHCPGHQKGDSPQAKGNRLADDTAKKAATETHSSLTVLPAGKRTADGSEFEKRTADGSEFESPKKKAKVE

SEQ ID NO: 1276 - protein, 2093 aa, synthetic construct
MPAAKRVKLDGGDKKYSIGLDIGTNSVGWAVITDEYKVPSKKFKVLGNTDRHSIKKNLIGALLFDSGETAEATRLKRTARRRYTRRKNRICYLQEIFSNEMAKVDDSFFHRLEESFLVEEDKKHERHPIFGNIVDEVAYHEKYPTIYHLRKKLVDSTDKADLRLIYLALAHMIKFRGHFLIEGDLNPDNSDVDKLFIQLVQTYNQLFEENPINASGVDAKAILSARLSKSRRLENLIAQLPGEKKNGLFGNLIALSLGLTPNFKSNFDLAEDAKLQLSKDTYDDDLDNLLAQIGDQYADLFLAAKNLSDAILLSDILRVNTEITKAPLSASMIKRYDEHHQDLTLLKALVRQQLPEKYKEIFFDQSKNGYAGYIDGGASQEEFYKFIKPILEKMDGTEELLVKLNREDLLRKQRTFDNGSIPHQIHLGELHAILRRQEDFYPFLKDNREKIEKILTFRIPYYVGPLARGNSRFAWMTRKSEETITPWNFEEVVDKGASAQSFIERMTNFDKNLPNEKVLPKHSLLYEYFTVYNELTKVKYVTEGMRKPAFLSGEQKKAIVDLLFKTNRKVTVKQLKEDYFKKIECFDSVEISGVEDRFNASLGTYHDLLKIIKDKDFLDNEENEDILEDIVLTLTLFEDREMIEERLKTYAHLFDDKVMKQLKRRRYTGWGRLSRKLINGIRDKQSGKTILDFLKSDGFANRNFMQLIHDDSLTFKEDIQKAQVSGQGDSLHEHIANLAGSPAIKKGILQTVKVVDELVKVMGRHKPENIVIEMARENQTTQKGQKNSRERMKRIEEGIKELGSQILKEHPVENTQLQNEKLYLYYLQNGRDMYVDQELDINRLSDYDVDHIVPQSFLKDDSIDNKVLTRSDKARGKSDNVPSEEVVKKMKNYWRQLLNAKLITQRKFDNLTKAERGGLSELDKAGFIKRQLVETRQITKHVAQILDSRMNTKYDENDKLIREVKVITLKSKLVSDFRKDFQFYKVREINNYHHAHDAYLNAVVGTALIKKYPKLESEFVYGDYKVYDVRKMIAKSEQEIGKATAKYFFYSNIMNFFKTEITLANGEIRKRPLIETNGETGEIVWDKGRDFATVRKVLSMPQVNIVKKTEVQTGGFSKESILPKRNSDKLIARKKDWDPKKYGGFDSPTVAYSVLVVAKVEKGKSKKLKSVKELLGITIMERSSFEKNPIDFLEAKGYKEVKKDLIIKLPKYSLFELENGRKRMLASAGELQKGNELALPSKYVNFLYLASHYEKLKGSPEDNEQKQLFVEQHKHYLDEIIEQISEFSKRVILADANLDKVLSAYNKHRDKPIREQAENIIHLFTLTNLGAPAAFKYFDTTIDRKRYTSTKEVLDATLIHQSITGLYETRIDLSQLGGDGGPAPGSSGGSGGTLQLEEEYRLFEPESTQKQEMDIWLKNFPQAWAETGGMGTAHCQAPVLIQLKATATPISIRQYPMPHEAYQGIKPHIRRMLDQGILKPCQSPWNTPLLPVKKPGTEDYRPVQDLREVNKRVEDIHPTVPNPYNLLSTLPPSHPWYTVLDLKDAFFCLRLHSESQLLFAFEWRDPEIGLSGQLTWTRLPQGFKNSPTLFNEALHSDLADFRVRYPALVLLQYVDDLLLAAATRTECLEGTKALLETLGNKGYRASAKKAQICLQEVTYLGYSLKDGQRWLTKARKEAILSIPVPKNSRQVREFLGKAGYCRLFIPGFAELAAPLYPLTRPGTLFQWGTEQQLAFEDIKKALLSSPALGLPDITKPFELFIDENSGFAKGVLVQKLGPWKRPVAYLSKKLDTVASGWPPCLRMVAAIAILVKDAGKLTLGQPLTILTSHPVEALVRQPPNKWLSNARMTHYQAMLLDAERVHFGPTVSLNPATLLPLPSGGNHHDCLQILAETHGTRPDLTDQPLPDADLTWYTDGSSFIRNGEREAGAAVTTESEVIWAAPLPPGTSAQRAELIALTQALKMAEGKKLTVYTDSRYAFATTHVHGEIYRRRGWLTSEGKEIKNKNEILALLEALFLPKRLSIIHCPGHQKGDSPQAKGNRLADDTAKKAATETHSSLTVLPAGKRTADGSEFEKRTADGSEFESPKKKAKVE

SEQ ID NO: 1277 - protein, 2093 aa, synthetic construct
MPAAKRVKLDGGDKKYSIGLDIGTNSVGWAVITDEYKVPSKKFKVLGNTDRHSIKKNLIGALLFDSGETAEATRLKRTARRRYTRRKNRICYLQEIFSNEMAKVDDSFFHRLEESFLVEEDKKHERHPIFGNIVDEVAYHEKYPTIYHLRKKLVDSTDKADLRLIYLALAHMIKFRGHFLIEGDLNPDNSDVDKLFIQLVQTYNQLFEENPINASGVDAKAILSARLSKSRRLENLIAQLPGEKKNGLFGNLIALSLGLTPNFKSNFDLAEDAKLQLSKDTYDDDLDNLLAQIGDQYADLFLAAKNLSDAILLSDILRVNTEITKAPLSASMIKRYDEHHQDLTLLKALVRQQLPEKYKEIFFDQSKNGYAGYIDGGASQEEFYKFIKPILEKMDGTEELLVKLNREDLLRKQRTFDNGSIPHQIHLGELHAILRRQEDFYPFLKDNREKIEKILTFRIPYYVGPLARGNSRFAWMTRKSEETITPWNFEEVVDKGASAQSFIERMTNFDKNLPNEKVLPKHSLLYEYFTVYNELTKVKYVTEGMRKPAFLSGEQKKAIVDLLFKTNRKVTVKQLKEDYFKKIECFDSVEISGVEDRFNASLGTYHDLLKIIKDKDFLDNEENEDILEDIVLTLTLFEDREMIEERLKTYAHLFDDKVMKQLKRRRYTGWGRLSRKLINGIRDKQSGKTILDFLKSDGFANRNFMQLIHDDSLTFKEDIQKAQVSGQGDSLHEHIANLAGSPAIKKGILQTVKVVDELVKVMGRHKPENIVIEMARENQTTQKGQKNSRERMKRIEEGIKELGSQILKEHPVENTQLQNEKLYLYYLQNGRDMYVDQELDINRLSDYDVDHIVPQSFLKDDSIDNKVLTRSDKARGKSDNVPSEEVVKKMKNYWRQLLNAKLITQRKFDNLTKAERGGLSELDKAGFIKRQLVETRQITKHVAQILDSRMNTKYDENDKLIREVKVITLKSKLVSDFRKDFQFYKVREINNYHHAHDAYLNAVVGTALIKKYPKLESEFVYGDYKVYDVRKMIAKSEQEIGKATAKYFFYSNIMNFFKTEITLANGEIRKRPLIETNGETGEIVWDKGRDFATVRKVLSMPQVNIVKKTEVQTGGFSKESILPKRNSDKLIARKKDWDPKKYGGFDSPTVAYSVLVVAKVEKGKSKKLKSVKELLGITIMERSSFEKNPIDFLEAKGYKEVKKDLIIKLPKYSLFELENGRKRMLASAGELQKGNELALPSKYVNFLYLASHYEKLKGSPEDNEQKQLFVEQHKHYLDEIIEQISEFSKRVILADANLDKVLSAYNKHRDKPIREQAENIIHLFTLTNLGAPAAFKYFDTTIDRKRYTSTKEVLDATLIHQSITGLYETRIDLSQLGGDGGPAPGGGGSSGGTLQLEEEYRLFEPESTQKQEMDIWLKNFPQAWAETGGMGTAHCQAPVLIQLKATATPISIRQYPMPHEAYQGIKPHIRRMLDQGILKPCQSPWNTPLLPVKKPGTEDYRPVQDLREVNKRVEDIHPTVPNPYNLLSTLPPSHPWYTVLDLKDAFFCLRLHSESQLLFAFEWRDPEIGLSGQLTWTRLPQGFKNSPTLFNEALHSDLADFRVRYPALVLLQYVDDLLLAAATRTECLEGTKALLETLGNKGYRASAKKAQICLQEVTYLGYSLKDGQRWLTKARKEAILSIPVPKNSRQVREFLGKAGYCRLFIPGFAELAAPLYPLTRPGTLFQWGTEQQLAFEDIKKALLSSPALGLPDITKPFELFIDENSGFAKGVLVQKLGPWKRPVAYLSKKLDTVASGWPPCLRMVAAIAILVKDAGKLTLGQPLTILTSHPVEALVRQPPNKWLSNARMTHYQAMLLDAERVHFGPTVSLNPATLLPLPSGGNHHDCLQILAETHGTRPDLTDQPLPDADLTWYTDGSSFIRNGEREAGAAVTTESEVIWAAPLPPGTSAQRAELIALTQALKMAEGKKLTVYTDSRYAFATTHVHGEIYRRRGWLTSEGKEIKNKNEILALLEALFLPKRLSIIHCPGHQKGDSPQAKGNRLADDTAKKAATETHSSLTVLPAGKRTADGSEFEKRTADGSEFESPKKKAKVE

SEQ ID NO: 1278 - protein, 2095 aa, synthetic construct
MPAAKRVKLDGGDKKYSIGLDIGTNSVGWAVITDEYKVPSKKFKVLGNTDRHSIKKNLIGALLFDSGETAEATRLKRTARRRYTRRKNRICYLQEIFSNEMAKVDDSFFHRLEESFLVEEDKKHERHPIFGNIVDEVAYHEKYPTIYHLRKKLVDSTDKADLRLIYLALAHMIKFRGHFLIEGDLNPDNSDVDKLFIQLVQTYNQLFEENPINASGVDAKAILSARLSKSRRLENLIAQLPGEKKNGLFGNLIALSLGLTPNFKSNFDLAEDAKLQLSKDTYDDDLDNLLAQIGDQYADLFLAAKNLSDAILLSDILRVNTEITKAPLSASMIKRYDEHHQDLTLLKALVRQQLPEKYKEIFFDQSKNGYAGYIDGGASQEEFYKFIKPILEKMDGTEELLVKLNREDLLRKQRTFDNGSIPHQIHLGELHAILRRQEDFYPFLKDNREKIEKILTFRIPYYVGPLARGNSRFAWMTRKSEETITPWNFEEVVDKGASAQSFIERMTNFDKNLPNEKVLPKHSLLYEYFTVYNELTKVKYVTEGMRKPAFLSGEQKKAIVDLLFKTNRKVTVKQLKEDYFKKIECFDSVEISGVEDRFNASLGTYHDLLKIIKDKDFLDNEENEDILEDIVLTLTLFEDREMIEERLKTYAHLFDDKVMKQLKRRRYTGWGRLSRKLINGIRDKQSGKTILDFLKSDGFANRNFMQLIHDDSLTFKEDIQKAQVSGQGDSLHEHIANLAGSPAIKKGILQTVKVVDELVKVMGRHKPENIVIEMARENQTTQKGQKNSRERMKRIEEGIKELGSQILKEHPVENTQLQNEKLYLYYLQNGRDMYVDQELDINRLSDYDVDHIVPQSFLKDDSIDNKVLTRSDKARGKSDNVPSEEVVKKMKNYWRQLLNAKLITQRKFDNLTKAERGGLSELDKAGFIKRQLVETRQITKHVAQILDSRMNTKYDENDKLIREVKVITLKSKLVSDFRKDFQFYKVREINNYHHAHDAYLNAVVGTALIKKYPKLESEFVYGDYKVYDVRKMIAKSEQEIGKATAKYFFYSNIMNFFKTEITLANGEIRKRPLIETNGETGEIVWDKGRDFATVRKVLSMPQVNIVKKTEVQTGGFSKESILPKRNSDKLIARKKDWDPKKYGGFDSPTVAYSVLVVAKVEKGKSKKLKSVKELLGITIMERSSFEKNPIDFLEAKGYKEVKKDLIIKLPKYSLFELENGRKRMLASAGELQKGNELALPSKYVNFLYLASHYEKLKGSPEDNEQKQLFVEQHKHYLDEIIEQISEFSKRVILADANLDKVLSAYNKHRDKPIREQAENIIHLFTLTNLGAPAAFKYFDTTIDRKRYTSTKEVLDATLIHQSITGLYETRIDLSQLGGDGGGGSEAAAKGSSGGTLQLEEEYRLFEPESTQKQEMDIWLKNFPQAWAETGGMGTAHCQAPVLIQLKATATPISIRQYPMPHEAYQGIKPHIRRMLDQGILKPCQSPWNTPLLPVKKPGTEDYRPVQDLREVNKRVEDIHPTVPNPYNLLSTLPPSHPWYTVLDLKDAFFCLRLHSESQLLFAFEWRDPEIGLSGQLTWTRLPQGFKNSPTLFNEALHSDLADFRVRYPALVLLQYVDDLLLAAATRTECLEGTKALLETLGNKGYRASAKKAQICLQEVTYLGYSLKDGQRWLTKARKEAILSIPVPKNSRQVREFLGKAGYCRLFIPGFAELAAPLYPLTRPGTLFQWGTEQQLAFEDIKKALLSSPALGLPDITKPFELFIDENSGFAKGVLVQKLGPWKRPVAYLSKKLDTVASGWPPCLRMVAAIAILVKDAGKLTLGQPLTILTSHPVEALVRQPPNKWLSNARMTHYQAMLLDAERVHFGPTVSLNPATLLPLPSGGNHHDCLQILAETHGTRPDLTDQPLPDADLTWYTDGSSFIRNGEREAGAAVTTESEVIWAAPLPPGTSAQRAELIALTQALKMAEGKKLTVYTDSRYAFATTHVHGEIYRRRGWLTSEGKEIKNKNEILALLEALFLPKRLSIIHCPGHQKGDSPQAKGNRLADDTAKKAATETHSSLTVLPAGKRTADGSEFEKRTADGSEFESPKKKAKVE

SEQ ID NO: 1279 - protein, 2095 aa, synthetic construct
MPAAKRVKLDGGDKKYSIGLDIGTNSVGWAVITDEYKVPSKKFKVLGNTDRHSIKKNLIGALLFDSGETAEATRLKRTARRRYTRRKNRICYLQEIFSNEMAKVDDSFFHRLEESFLVEEDKKHERHPIFGNIVDEVAYHEKYPTIYHLRKKLVDSTDKADLRLIYLALAHMIKFRGHFLIEGDLNPDNSDVDKLFIQLVQTYNQLFEENPINASGVDAKAILSARLSKSRRLENLIAQLPGEKKNGLFGNLIALSLGLTPNFKSNFDLAEDAKLQLSKDTYDDDLDNLLAQIGDQYADLFLAAKNLSDAILLSDILRVNTEITKAPLSASMIKRYDEHHQDLTLLKALVRQQLPEKYKEIFFDQSKNGYAGYIDGGASQEEFYKFIKPILEKMDGTEELLVKLNREDLLRKQRTFDNGSIPHQIHLGELHAILRRQEDFYPFLKDNREKIEKILTFRIPYYVGPLARGNSRFAWMTRKSEETITPWNFEEVVDKGASAQSFIERMTNFDKNLPNEKVLPKHSLLYEYFTVYNELTKVKYVTEGMRKPAFLSGEQKKAIVDLLFKTNRKVTVKQLKEDYFKKIECFDSVEISGVEDRFNASLGTYHDLLKIIKDKDFLDNEENEDILEDIVLTLTLFEDREMIEERLKTYAHLFDDKVMKQLKRRRYTGWGRLSRKLINGIRDKQSGKTILDFLKSDGFANRNFMQLIHDDSLTFKEDIQKAQVSGQGDSLHEHIANLAGSPAIKKGILQTVKVVDELVKVMGRHKPENIVIEMARENQTTQKGQKNSRERMKRIEEGIKELGSQILKEHPVENTQLQNEKLYLYYLQNGRDMYVDQELDINRLSDYDVDHIVPQSFLKDDSIDNKVLTRSDKARGKSDNVPSEEVVKKMKNYWRQLLNAKLITQRKFDNLTKAERGGLSELDKAGFIKRQLVETRQITKHVAQILDSRMNTKYDENDKLIREVKVITLKSKLVSDFRKDFQFYKVREINNYHHAHDAYLNAVVGTALIKKYPKLESEFVYGDYKVYDVRKMIAKSEQEIGKATAKYFFYSNIMNFFKTEITLANGEIRKRPLIETNGETGEIVWDKGRDFATVRKVLSMPQVNIVKKTEVQTGGFSKESILPKRNSDKLIARKKDWDPKKYGGFDSPTVAYSVLVVAKVEKGKSKKLKSVKELLGITIMERSSFEKNPIDFLEAKGYKEVKKDLIIKLPKYSLFELENGRKRMLASAGELQKGNELALPSKYVNFLYLASHYEKLKGSPEDNEQKQLFVEQHKHYLDEIIEQISEFSKRVILADANLDKVLSAYNKHRDKPIREQAENIIHLFTLTNLGAPAAFKYFDTTIDRKRYTSTKEVLDATLIHQSITGLYETRIDLSQLGGDGGEAAAKGGSGGGGGTLQLEEEYRLFEPESTQKQEMDIWLKNFPQAWAETGGMGTAHCQAPVLIQLKATATPISIRQYPMPHEAYQGIKPHIRRMLDQGILKPCQSPWNTPLLPVKKPGTEDYRPVQDLREVNKRVEDIHPTVPNPYNLLSTLPPSHPWYTVLDLKDAFFCLRLHSESQLLFAFEWRDPEIGLSGQLTWTRLPQGFKNSPTLFNEALHSDLADFRVRYPALVLLQYVDDLLLAAATRTECLEGTKALLETLGNKGYRASAKKAQICLQEVTYLGYSLKDGQRWLTKARKEAILSIPVPKNSRQVREFLGKAGYCRLFIPGFAELAAPLYPLTRPGTLFQWGTEQQLAFEDIKKALLSSPALGLPDITKPFELFIDENSGFAKGVLVQKLGPWKRPVAYLSKKLDTVASGWPPCLRMVAAIAILVKDAGKLTLGQPLTILTSHPVEALVRQPPNKWLSNARMTHYQAMLLDAERVHFGPTVSLNPATLLPLPSGGNHHDCLQILAETHGTRPDLTDQPLPDADLTWYTDGSSFIRNGEREAGAAVTTESEVIWAAPLPPGTSAQRAELIALTQALKMAEGKKLTVYTDSRYAFATTHVHGEIYRRRGWLTSEGKEIKNKNEILALLEALFLPKRLSIIHCPGHQKGDSPQAKGNRLADDTAKKAATETHSSLTVLPAGKRTADGSEFEKRTADGSEFESPKKKAKVE

SEQ ID NO: 1280 - protein, 2092 aa, synthetic construct
MPAAKRVKLDGGDKKYSIGLDIGTNSVGWAVITDEYKVPSKKFKVLGNTDRHSIKKNLIGALLFDSGETAEATRLKRTARRRYTRRKNRICYLQEIFSNEMAKVDDSFFHRLEESFLVEEDKKHERHPIFGNIVDEVAYHEKYPTIYHLRKKLVDSTDKADLRLIYLALAHMIKFRGHFLIEGDLNPDNSDVDKLFIQLVQTYNQLFEENPINASGVDAKAILSARLSKSRRLENLIAQLPGEKKNGLFGNLIALSLGLTPNFKSNFDLAEDAKLQLSKDTYDDDLDNLLAQIGDQYADLFLAAKNLSDAILLSDILRVNTEITKAPLSASMIKRYDEHHQDLTLLKALVRQQLPEKYKEIFFDQSKNGYAGYIDGGASQEEFYKFIKPILEKMDGTEELLVKLNREDLLRKQRTFDNGSIPHQIHLGELHAILRRQEDFYPFLKDNREKIEKILTFRIPYYVGPLARGNSRFAWMTRKSEETITPWNFEEVVDKGASAQSFIERMTNFDKNLPNEKVLPKHSLLYEYFTVYNELTKVKYVTEGMRKPAFLSGEQKKAIVDLLFKTNRKVTVKQLKEDYFKKIECFDSVEISGVEDRFNASLGTYHDLLKIIKDKDFLDNEENEDILEDIVLTLTLFEDREMIEERLKTYAHLFDDKVMKQLKRRRYTGWGRLSRKLINGIRDKQSGKTILDFLKSDGFANRNFMQLIHDDSLTFKEDIQKAQVSGQGDSLHEHIANLAGSPAIKKGILQTVKVVDELVKVMGRHKPENIVIEMARENQTTQKGQKNSRERMKRIEEGIKELGSQILKEHPVENTQLQNEKLYLYYLQNGRDMYVDQELDINRLSDYDVDHIVPQSFLKDDSIDNKVLTRSDKARGKSDNVPSEEVVKKMKNYWRQLLNAKLITQRKFDNLTKAERGGLSELDKAGFIKRQLVETRQITKHVAQILDSRMNTKYDENDKLIREVKVITLKSKLVSDFRKDFQFYKVREINNYHHAHDAYLNAVVGTALIKKYPKLESEFVYGDYKVYDVRKMIAKSEQEIGKATAKYFFYSNIMNFFKTEITLANGEIRKRPLIETNGETGEIVWDKGRDFATVRKVLSMPQVNIVKKTEVQTGGFSKESILPKRNSDKLIARKKDWDPKKYGGFDSPTVAYSVLVVAKVEKGKSKKLKSVKELLGITIMERSSFEKNPIDFLEAKGYKEVKKDLIIKLPKYSLFELENGRKRMLASAGELQKGNELALPSKYVNFLYLASHYEKLKGSPEDNEQKQLFVEQHKHYLDEIIEQISEFSKRVILADANLDKVLSAYNKHRDKPIREQAENIIHLFTLTNLGAPAAFKYFDTTIDRKRYTSTKEVLDATLIHQSITGLYETRIDLSQLGGDGGGGGEAAAKGGTLQLEEEYRLFEPESTQKQEMDIWLKNFPQAWAETGGMGTAHCQAPVLIQLKATATPISIRQYPMPHEAYQGIKPHIRRMLDQGILKPCQSPWNTPLLPVKKPGTEDYRPVQDLREVNKRVEDIHPTVPNPYNLLSTLPPSHPWYTVLDLKDAFFCLRLHSESQLLFAFEWRDPEIGLSGQLTWTRLPQGFKNSPTLFNEALHSDLADFRVRYPALVLLQYVDDLLLAAATRTECLEGTKALLETLGNKGYRASAKKAQICLQEVTYLGYSLKDGQRWLTKARKEAILSIPVPKNSRQVREFLGKAGYCRLFIPGFAELAAPLYPLTRPGTLFQWGTEQQLAFEDIKKALLSSPALGLPDITKPFELFIDENSGFAKGVLVQKLGPWKRPVAYLSKKLDTVASGWPPCLRMVAAIAILVKDAGKLTLGQPLTILTSHPVEALVRQPPNKWLSNARMTHYQAMLLDAERVHFGPTVSLNPATLLPLPSGGNHHDCLQILAETHGTRPDLTDQPLPDADLTWYTDGSSFIRNGEREAGAAVTTESEVIWAAPLPPGTSAQRAELIALTQALKMAEGKKLTVYTDSRYAFATTHVHGEIYRRRGWLTSEGKEIKNKNEILALLEALFLPKRLSIIHCPGHQKGDSPQAKGNRLADDTAKKAATETHSSLTVLPAGKRTADGSEFEKRTADGSEFESPKKKAKVE

SEQ ID NO: 1281 - protein, 2090 aa, synthetic construct
MPAAKRVKLDGGDKKYSIGLDIGTNSVGWAVITDEYKVPSKKFKVLGNTDRHSIKKNLIGALLFDSGETAEATRLKRTARRRYTRRKNRICYLQEIFSNEMAKVDDSFFHRLEESFLVEEDKKHERHPIFGNIVDEVAYHEKYPTIYHLRKKLVDSTDKADLRLIYLALAHMIKFRGHFLIEGDLNPDNSDVDKLFIQLVQTYNQLFEENPINASGVDAKAILSARLSKSRRLENLIAQLPGEKKNGLFGNLIALSLGLTPNFKSNFDLAEDAKLQLSKDTYDDDLDNLLAQIGDQYADLFLAAKNLSDAILLSDILRVNTEITKAPLSASMIKRYDEHHQDLTLLKALVRQQLPEKYKEIFFDQSKNGYAGYIDGGASQEEFYKFIKPILEKMDGTEELLVKLNREDLLRKQRTFDNGSIPHQIHLGELHAILRRQEDFYPFLKDNREKIEKILTFRIPYYVGPLARGNSRFAWMTRKSEETITPWNFEEVVDKGASAQSFIERMTNFDKNLPNEKVLPKHSLLYEYFTVYNELTKVKYVTEGMRKPAFLSGEQKKAIVDLLFKTNRKVTVKQLKEDYFKKIECFDSVEISGVEDRFNASLGTYHDLLKIIKDKDFLDNEENEDILEDIVLTLTLFEDREMIEERLKTYAHLFDDKVMKQLKRRRYTGWGRLSRKLINGIRDKQSGKTILDFLKSDGFANRNFMQLIHDDSLTFKEDIQKAQVSGQGDSLHEHIANLAGSPAIKKGILQTVKVVDELVKVMGRHKPENIVIEMARENQTTQKGQKNSRERMKRIEEGIKELGSQILKEHPVENTQLQNEKLYLYYLQNGRDMYVDQELDINRLSDYDVDHIVPQSFLKDDSIDNKVLTRSDKARGKSDNVPSEEVVKKMKNYWRQLLNAKLITQRKFDNLTKAERGGLSELDKAGFIKRQLVETRQITKHVAQILDSRMNTKYDENDKLIREVKVITLKSKLVSDFRKDFQFYKVREINNYHHAHDAYLNAVVGTALIKKYPKLESEFVYGDYKVYDVRKMIAKSEQEIGKATAKYFFYSNIMNFFKTEITLANGEIRKRPLIETNGETGEIVWDKGRDFATVRKVLSMPQVNIVKKTEVQTGGFSKESILPKRNSDKLIARKKDWDPKKYGGFDSPTVAYSVLVVAKVEKGKSKKLKSVKELLGITIMERSSFEKNPIDFLEAKGYKEVKKDLIIKLPKYSLFELENGRKRMLASAGELQKGNELALPSKYVNFLYLASHYEKLKGSPEDNEQKQLFVEQHKHYLDEIIEQISEFSKRVILADANLDKVLSAYNKHRDKPIREQAENIIHLFTLTNLGAPAAFKYFDTTIDRKRYTSTKEVLDATLIHQSITGLYETRIDLSQLGGDGGGGGGGSGGTLQLEEEYRLFEPESTQKQEMDIWLKNFPQAWAETGGMGTAHCQAPVLIQLKATATPISIRQYPMPHEAYQGIKPHIRRMLDQGILKPCQSPWNTPLLPVKKPGTEDYRPVQDLREVNKRVEDIHPTVPNPYNLLSTLPPSHPWYTVLDLKDAFFCLRLHSESQLLFAFEWRDPEIGLSGQLTWTRLPQGFKNSPTLFNEALHSDLADFRVRYPALVLLQYVDDLLLAAATRTECLEGTKALLETLGNKGYRASAKKAQICLQEVTYLGYSLKDGQRWLTKARKEAILSIPVPKNSRQVREFLGKAGYCRLFIPGFAELAAPLYPLTRPGTLFQWGTEQQLAFEDIKKALLSSPALGLPDITKPFELFIDENSGFAKGVLVQKLGPWKRPVAYLSKKLDTVASGWPPCLRMVAAIAILVKDAGKLTLGQPLTILTSHPVEALVRQPPNKWLSNARMTHYQAMLLDAERVHFGPTVSLNPATLLPLPSGGNHHDCLQILAETHGTRPDLTDQPLPDADLTWYTDGSSFIRNGEREAGAAVTTESEVIWAAPLPPGTSAQRAELIALTQALKMAEGKKLTVYTDSRYAFATTHVHGEIYRRRGWLTSEGKEIKNKNEILALLEALFLPKRLSIIHCPGHQKGDSPQAKGNRLADDTAKKAATETHSSLTVLPAGKRTADGSEFEKRTADGSEFESPKKKAKVE

SEQ ID NO: 1282 - protein, 2211 aa, synthetic construct
MPAAKRVKLDGGDKKYSIGLDIGTNSVGWAVITDEYKVPSKKFKVLGNTDRHSIKKNLIGALLFDSGETAEATRLKRTARRRYTRRKNRICYLQEIFSNEMAKVDDSFFHRLEESFLVEEDKKHERHPIFGNIVDEVAYHEKYPTIYHLRKKLVDSTDKADLRLIYLALAHMIKFRGHFLIEGDLNPDNSDVDKLFIQLVQTYNQLFEENPINASGVDAKAILSARLSKSRRLENLIAQLPGEKKNGLFGNLIALSLGLTPNFKSNFDLAEDAKLQLSKDTYDDDLDNLLAQIGDQYADLFLAAKNLSDAILLSDILRVNTEITKAPLSASMIKRYDEHHQDLTLLKALVRQQLPEKYKEIFFDQSKNGYAGYIDGGASQEEFYKFIKPILEKMDGTEELLVKLNREDLLRKQRTFDNGSIPHQIHLGELHAILRRQEDFYPFLKDNREKIEKILTFRIPYYVGPLARGNSRFAWMTRKSEETITPWNFEEVVDKGASAQSFIERMTNFDKNLPNEKVLPKHSLLYEYFTVYNELTKVKYVTEGMRKPAFLSGEQKKAIVDLLFKTNRKVTVKQLKEDYFKKIECFDSVEISGVEDRFNASLGTYHDLLKIIKDKDFLDNEENEDILEDIVLTLTLFEDREMIEERLKTYAHLFDDKVMKQLKRRRYTGWGRLSRKLINGIRDKQSGKTILDFLKSDGFANRNFMQLIHDDSLTFKEDIQKAQVSGQGDSLHEHIANLAGSPAIKKGILQTVKVVDELVKVMGRHKPENIVIEMARENQTTQKGQKNSRERMKRIEEGIKELGSQILKEHPVENTQLQNEKLYLYYLQNGRDMYVDQELDINRLSDYDVDHIVPQSFLKDDSIDNKVLTRSDKARGKSDNVPSEEVVKKMKNYWRQLLNAKLITQRKFDNLTKAERGGLSELDKAGFIKRQLVETRQITKHVAQILDSRMNTKYDENDKLIREVKVITLKSKLVSDFRKDFQFYKVREINNYHHAHDAYLNAVVGTALIKKYPKLESEFVYGDYKVYDVRKMIAKSEQEIGKATAKYFFYSNIMNFFKTEITLANGEIRKRPLIETNGETGEIVWDKGRDFATVRKVLSMPQVNIVKKTEVQTGGFSKESILPKRNSDKLIARKKDWDPKKYGGFDSPTVAYSVLVVAKVEKGKSKKLKSVKELLGITIMERSSFEKNPIDFLEAKGYKEVKKDLIIKLPKYSLFELENGRKRMLASAGELQKGNELALPSKYVNFLYLASHYEKLKGSPEDNEQKQLFVEQHKHYLDEIIEQISEFSKRVILADANLDKVLSAYNKHRDKPIREQAENIIHLFTLTNLGAPAAFKYFDTTIDRKRYTSTKEVLDATLIHQSITGLYETRIDLSQLGGDGGAEAAAKEAAAKEAAAKEAAAKALEAEAAAKEAAAKEAAAKEAAAKAGGMNPLQLLQPLPAEIKGTKLLAHWNSGATITCIPESFLEDEQPIKKTLIKTIHGEKQQNVYYVTFKVKGRKVEAEVIASPYEYILLSPTDVPWLTQQPLQLTILVPLQEYQEKILSKTALPEDQKQQLKTLFVKYDNLWQHWENQVGHRKIRPHNIATGDYPPRPQKQYPINPKAKPSIQIVIDDLLKQGVLTPQNSTMNTPVYPVPKPDGRWRMVLDYREVNKTIPLTAAQNQHSAGILATIVRQKYKTTLDLANGFWAHPITPESYWLTAFTWQGKQYCWTRLPQGFLNSPALFTADVVDLLKEIPNVQVYVDDIYLSHDDPKEHVQQLEKVFQILLQAGYVVSLKKSEIGQKTVEFLGFNITKEGRGLTDTFKTKLLNITPPKDLKQLQSILGLLNFARNFIPNFAELVQPLYNLIASAKGKYIEWSEENTKQLNMVIEALNTASNLEERLPEQRLVIKVNTSPSAGYVRYYNETGKKPIMYLNYVFSKAELKFSMLEKLLTTMHKALIKAMDLAMGQEILVYSPIVSMTKIQKTPLPERKALPIRWITWMTYLEDPRIQFHYDKTLPELKHIPDVYTSSQSPVKHPSQYEGVFYTDGSAIKSPDPTKSNNAGMGIVHATYKPEYQVLNQWSIPLGNHTAQMAEIAAVEFACKKALKIPGPVLVITDSFYVAESANKELPYWKSNGFVNNKKKPLKHISKWKSIAECLSMKPDITIQHEKGISLQIPVFILKGNALADKLATQGSYVVNAGKRTADGSEFEKRTADGSEFESPKKKAKVE

SEQ ID NO: 1283 - protein, 2190 aa, synthetic construct
MPAAKRVKLDGGDKKYSIGLDIGTNSVGWAVITDEYKVPSKKFKVLGNTDRHSIKKNLIGALLFDSGETAEATRLKRTARRRYTRRKNRICYLQEIFSNEMAKVDDSFFHRLEESFLVEEDKKHERHPIFGNIVDEVAYHEKYPTIYHLRKKLVDSTDKADLRLIYLALAHMIKFRGHFLIEGDLNPDNSDVDKLFIQLVQTYNQLFEENPINASGVDAKAILSARLSKSRRLENLIAQLPGEKKNGLFGNLIALSLGLTPNFKSNFDLAEDAKLQLSKDTYDDDLDNLLAQIGDQYADLFLAAKNLSDAILLSDILRVNTEITKAPLSASMIKRYDEHHQDLTLLKALVRQQLPEKYKEIFFDQSKNGYAGYIDGGASQEEFYKFIKPILEKMDGTEELLVKLNREDLLRKQRTFDNGSIPHQIHLGELHAILRRQEDFYPFLKDNREKIEKILTFRIPYYVGPLARGNSRFAWMTRKSEETITPWNFEEVVDKGASAQSFIERMTNFDKNLPNEKVLPKHSLLYEYFTVYNELTKVKYVTEGMRKPAFLSGEQKKAIVDLLFKTNRKVTVKQLKEDYFKKIECFDSVEISGVEDRFNASLGTYHDLLKIIKDKDFLDNEENEDILEDIVLTLTLFEDREMIEERLKTYAHLFDDKVMKQLKRRRYTGWGRLSRKLINGIRDKQSGKTILDFLKSDGFANRNFMQLIHDDSLTFKEDIQKAQVSGQGDSLHEHIANLAGSPAIKKGILQTVKVVDELVKVMGRHKPENIVIEMARENQTTQKGQKNSRERMKRIEEGIKELGSQILKEHPVENTQLQNEKLYLYYLQNGRDMYVDQELDINRLSDYDVDHIVPQSFLKDDSIDNKVLTRSDKARGKSDNVPSEEVVKKMKNYWRQLLNAKLITQRKFDNLTKAERGGLSELDKAGFIKRQLVETRQITKHVAQILDSRMNTKYDENDKLIREVKVITLKSKLVSDFRKDFQFYKVREINNYHHAHDAYLNAVVGTALIKKYPKLESEFVYGDYKVYDVRKMIAKSEQEIGKATAKYFFYSNIMNFFKTEITLANGEIRKRPLIETNGETGEIVWDKGRDFATVRKVLSMPQVNIVKKTEVQTGGFSKESILPKRNSDKLIARKKDWDPKKYGGFDSPTVAYSVLVVAKVEKGKSKKLKSVKELLGITIMERSSFEKNPIDFLEAKGYKEVKKDLIIKLPKYSLFELENGRKRMLASAGELQKGNELALPSKYVNFLYLASHYEKLKGSPEDNEQKQLFVEQHKHYLDEIIEQISEFSKRVILADANLDKVLSAYNKHRDKPIREQAENIIHLFTLTNLGAPAAFKYFDTTIDRKRYTSTKEVLDATLIHQSITGLYETRIDLSQLGGDGGEAAAKEAAAKEAAAKEAAAKEAAAKGGMNPLQLLQPLPAEIKGTKLLAHWNSGATITCIPESFLEDEQPIKKTLIKTIHGEKQQNVYYVTFKVKGRKVEAEVIASPYEYILLSPTDVPWLTQQPLQLTILVPLQEYQEKILSKTALPEDQKQQLKTLFVKYDNLWQHWENQVGHRKIRPHNIATGDYPPRPQKQYPINPKAKPSIQIVIDDLLKQGVLTPQNSTMNTPVYPVPKPDGRWRMVLDYREVNKTIPLTAAQNQHSAGILATIVRQKYKTTLDLANGFWAHPITPESYWLTAFTWQGKQYCWTRLPQGFLNSPALFTADVVDLLKEIPNVQVYVDDIYLSHDDPKEHVQQLEKVFQILLQAGYVVSLKKSEIGQKTVEFLGFNITKEGRGLTDTFKTKLLNITPPKDLKQLQSILGLLNFARNFIPNFAELVQPLYNLIASAKGKYIEWSEENTKQLNMVIEALNTASNLEERLPEQRLVIKVNTSPSAGYVRYYNETGKKPIMYLNYVFSKAELKFSMLEKLLTTMHKALIKAMDLAMGQEILVYSPIVSMTKIQKTPLPERKALPIRWITWMTYLEDPRIQFHYDKTLPELKHIPDVYTSSQSPVKHPSQYEGVFYTDGSAIKSPDPTKSNNAGMGIVHATYKPEYQVLNQWSIPLGNHTAQMAEIAAVEFACKKALKIPGPVLVITDSFYVAESANKELPYWKSNGFVNNKKKPLKHISKWKSIAECLSMKPDITIQHEKGISLQIPVFILKGNALADKLATQGSYVVNAGKRTADGSEFEKRTADGSEFESPKKKAKVE

SEQ ID NO: 1284 - protein, 2183 aa, synthetic construct
MPAAKRVKLDGGDKKYSIGLDIGTNSVGWAVITDEYKVPSKKFKVLGNTDRHSIKKNLIGALLFDSGETAEATRLKRTARRRYTRRKNRICYLQEIFSNEMAKVDDSFFHRLEESFLVEEDKKHERHPIFGNIVDEVAYHEKYPTIYHLRKKLVDSTDKADLRLIYLALAHMIKFRGHFLIEGDLNPDNSDVDKLFIQLVQTYNQLFEENPINASGVDAKAILSARLSKSRRLENLIAQLPGEKKNGLFGNLIALSLGLTPNFKSNFDLAEDAKLQLSKDTYDDDLDNLLAQIGDQYADLFLAAKNLSDAILLSDILRVNTEITKAPLSASMIKRYDEHHQDLTLLKALVRQQLPEKYKEIFFDQSKNGYAGYIDGGASQEEFYKFIKPILEKMDGTEELLVKLNREDLLRKQRTFDNGSIPHQIHLGELHAILRRQEDFYPFLKDNREKIEKILTFRIPYYVGPLARGNSRFAWMTRKSEETITPWNFEEVVDKGASAQSFIERMTNFDKNLPNEKVLPKHSLLYEYFTVYNELTKVKYVTEGMRKPAFLSGEQKKAIVDLLFKTNRKVTVKQLKEDYFKKIECFDSVEISGVEDRFNASLGTYHDLLKIIKDKDFLDNEENEDILEDIVLTLTLFEDREMIEERLKTYAHLFDDKVMKQLKRRRYTGWGRLSRKLINGIRDKQSGKTILDFLKSDGFANRNFMQLIHDDSLTFKEDIQKAQVSGQGDSLHEHIANLAGSPAIKKGILQTVKVVDELVKVMGRHKPENIVIEMARENQTTQKGQKNSRERMKRIEEGIKELGSQILKEHPVENTQLQNEKLYLYYLQNGRDMYVDQELDINRLSDYDVDHIVPQSFLKDDSIDNKVLTRSDKARGKSDNVPSEEVVKKMKNYWRQLLNAKLITQRKFDNLTKAERGGLSELDKAGFIKRQLVETRQITKHVAQILDSRMNTKYDENDKLIREVKVITLKSKLVSDFRKDFQFYKVREINNYHHAHDAYLNAVVGTALIKKYPKLESEFVYGDYKVYDVRKMIAKSEQEIGKATAKYFFYSNIMNFFKTEITLANGEIRKRPLIETNGETGEIVWDKGRDFATVRKVLSMPQVNIVKKTEVQTGGFSKESILPKRNSDKLIARKKDWDPKKYGGFDSPTVAYSVLVVAKVEKGKSKKLKSVKELLGITIMERSSFEKNPIDFLEAKGYKEVKKDLIIKLPKYSLFELENGRKRMLASAGELQKGNELALPSKYVNFLYLASHYEKLKGSPEDNEQKQLFVEQHKHYLDEIIEQISEFSKRVILADANLDKVLSAYNKHRDKPIREQAENIIHLFTLTNLGAPAAFKYFDTTIDRKRYTSTKEVLDATLIHQSITGLYETRIDLSQLGGDGGGSSGSSGSSGSSGSSGSSGGMNPLQLLQPLPAEIKGTKLLAHWNSGATITCIPESFLEDEQPIKKTLIKTIHGEKQQNVYYVTFKVKGRKVEAEVIASPYEYILLSPTDVPWLTQQPLQLTILVPLQEYQEKILSKTALPEDQKQQLKTLFVKYDNLWQHWENQVGHRKIRPHNIATGDYPPRPQKQYPINPKAKPSIQIVIDDLLKQGVLTPQNSTMNTPVYPVPKPDGRWRMVLDYREVNKTIPLTAAQNQHSAGILATIVRQKYKTTLDLANGFWAHPITPESYWLTAFTWQGKQYCWTRLPQGFLNSPALFTADVVDLLKEIPNVQVYVDDIYLSHDDPKEHVQQLEKVFQILLQAGYVVSLKKSEIGQKTVEFLGFNITKEGRGLTDTFKTKLLNITPPKDLKQLQSILGLLNFARNFIPNFAELVQPLYNLIASAKGKYIEWSEENTKQLNMVIEALNTASNLEERLPEQRLVIKVNTSPSAGYVRYYNETGKKPIMYLNYVFSKAELKFSMLEKLLTTMHKALIKAMDLAMGQEILVYSPIVSMTKIQKTPLPERKALPIRWITWMTYLEDPRIQFHYDKTLPELKHIPDVYTSSQSPVKHPSQYEGVFYTDGSAIKSPDPTKSNNAGMGIVHATYKPEYQVLNQWSIPLGNHTAQMAEIAAVEFACKKALKIPGPVLVITDSFYVAESANKELPYWKSNGFVNNKKKPLKHISKWKSIAECLSMKPDITIQHEKGISLQIPVFILKGNALADKLATQGSYVVNAGKRTADGSEFEKRTADGSEFESPKKKAKVE

SEQ ID NO: 1285 - protein, 2176 aa, synthetic construct
MPAAKRVKLDGGDKKYSIGLDIGTNSVGWAVITDEYKVPSKKFKVLGNTDRHSIKKNLIGALLFDSGETAEATRLKRTARRRYTRRKNRICYLQEIFSNEMAKVDDSFFHRLEESFLVEEDKKHERHPIFGNIVDEVAYHEKYPTIYHLRKKLVDSTDKADLRLIYLALAHMIKFRGHFLIEGDLNPDNSDVDKLFIQLVQTYNQLFEENPINASGVDAKAILSARLSKSRRLENLIAQLPGEKKNGLFGNLIALSLGLTPNFKSNFDLAEDAKLQLSKDTYDDDLDNLLAQIGDQYADLFLAAKNLSDAILLSDILRVNTEITKAPLSASMIKRYDEHHQDLTLLKALVRQQLPEKYKEIFFDQSKNGYAGYIDGGASQEEFYKFIKPILEKMDGTEELLVKLNREDLLRKQRTFDNGSIPHQIHLGELHAILRRQEDFYPFLKDNREKIEKILTFRIPYYVGPLARGNSRFAWMTRKSEETITPWNFEEVVDKGASAQSFIERMTNFDKNLPNEKVLPKHSLLYEYFTVYNELTKVKYVTEGMRKPAFLSGEQKKAIVDLLFKTNRKVTVKQLKEDYFKKIECFDSVEISGVEDRFNASLGTYHDLLKIIKDKDFLDNEENEDILEDIVLTLTLFEDREMIEERLKTYAHLFDDKVMKQLKRRRYTGWGRLSRKLINGIRDKQSGKTILDFLKSDGFANRNFMQLIHDDSLTFKEDIQKAQVSGQGDSLHEHIANLAGSPAIKKGILQTVKVVDELVKVMGRHKPENIVIEMARENQTTQKGQKNSRERMKRIEEGIKELGSQILKEHPVENTQLQNEKLYLYYLQNGRDMYVDQELDINRLSDYDVDHIVPQSFLKDDSIDNKVLTRSDKARGKSDNVPSEEVVKKMKNYWRQLLNAKLITQRKFDNLTKAERGGLSELDKAGFIKRQLVETRQITKHVAQILDSRMNTKYDENDKLIREVKVITLKSKLVSDFRKDFQFYKVREINNYHHAHDAYLNAVVGTALIKKYPKLESEFVYGDYKVYDVRKMIAKSEQEIGKATAKYFFYSNIMNFFKTEITLANGEIRKRPLIETNGETGEIVWDKGRDFATVRKVLSMPQVNIVKKTEVQTGGFSKESILPKRNSDKLIARKKDWDPKKYGGFDSPTVAYSVLVVAKVEKGKSKKLKSVKELLGITIMERSSFEKNPIDFLEAKGYKEVKKDLIIKLPKYSLFELENGRKRMLASAGELQKGNELALPSKYVNFLYLASHYEKLKGSPEDNEQKQLFVEQHKHYLDEIIEQISEFSKRVILADANLDKVLSAYNKHRDKPIREQAENIIHLFTLTNLGAPAAFKYFDTTIDRKRYTSTKEVLDATLIHQSITGLYETRIDLSQLGGDGGPAPAPAPAPAPGGMNPLQLLQPLPAEIKGTKLLAHWNSGATITCIPESFLEDEQPIKKTLIKTIHGEKQQNVYYVTFKVKGRKVEAEVIASPYEYILLSPTDVPWLTQQPLQLTILVPLQEYQEKILSKTALPEDQKQQLKTLFVKYDNLWQHWENQVGHRKIRPHNIATGDYPPRPQKQYPINPKAKPSIQIVIDDLLKQGVLTPQNSTMNTPVYPVPKPDGRWRMVLDYREVNKTIPLTAAQNQHSAGILATIVRQKYKTTLDLANGFWAHPITPESYWLTAFTWQGKQYCWTRLPQGFLNSPALFTADVVDLLKEIPNVQVYVDDIYLSHDDPKEHVQQLEKVFQILLQAGYVVSLKKSEIGQKTVEFLGFNITKEGRGLTDTFKTKLLNITPPKDLKQLQSILGLLNFARNFIPNFAELVQPLYNLIASAKGKYIEWSEENTKQLNMVIEALNTASNLEERLPEQRLVIKVNTSPSAGYVRYYNETGKKPIMYLNYVFSKAELKFSMLEKLLTTMHKALIKAMDLAMGQEILVYSPIVSMTKIQKTPLPERKALPIRWITWMTYLEDPRIQFHYDKTLPELKHIPDVYTSSQSPVKHPSQYEGVFYTDGSAIKSPDPTKSNNAGMGIVHATYKPEYQVLNQWSIPLGNHTAQMAEIAAVEFACKKALKIPGPVLVITDSFYVAESANKELPYWKSNGFVNNKKKPLKHISKWKSIAECLSMKPDITIQHEKGISLQIPVFILKGNALADKLATQGSYVVNAGKRTADGSEFEKRTADGSEFESPKKKAKVE

SEQ ID NO: 1286 - protein, 2176 aa, synthetic construct
MPAAKRVKLDGGDKKYSIGLDIGTNSVGWAVITDEYKVPSKKFKVLGNTDRHSIKKNLIGALLFDSGETAEATRLKRTARRRYTRRKNRICYLQEIFSNEMAKVDDSFFHRLEESFLVEEDKKHERHPIFGNIVDEVAYHEKYPTIYHLRKKLVDSTDKADLRLIYLALAHMIKFRGHFLIEGDLNPDNSDVDKLFIQLVQTYNQLFEENPINASGVDAKAILSARLSKSRRLENLIAQLPGEKKNGLFGNLIALSLGLTPNFKSNFDLAEDAKLQLSKDTYDDDLDNLLAQIGDQYADLFLAAKNLSDAILLSDILRVNTEITKAPLSASMIKRYDEHHQDLTLLKALVRQQLPEKYKEIFFDQSKNGYAGYIDGGASQEEFYKFIKPILEKMDGTEELLVKLNREDLLRKQRTFDNGSIPHQIHLGELHAILRRQEDFYPFLKDNREKIEKILTFRIPYYVGPLARGNSRFAWMTRKSEETITPWNFEEVVDKGASAQSFIERMTNFDKNLPNEKVLPKHSLLYEYFTVYNELTKVKYVTEGMRKPAFLSGEQKKAIVDLLFKTNRKVTVKQLKEDYFKKIECFDSVEISGVEDRFNASLGTYHDLLKIIKDKDFLDNEENEDILEDIVLTLTLFEDREMIEERLKTYAHLFDDKVMKQLKRRRYTGWGRLSRKLINGIRDKQSGKTILDFLKSDGFANRNFMQLIHDDSLTFKEDIQKAQVSGQGDSLHEHIANLAGSPAIKKGILQTVKVVDELVKVMGRHKPENIVIEMARENQTTQKGQKNSRERMKRIEEGIKELGSQILKEHPVENTQLQNEKLYLYYLQNGRDMYVDQELDINRLSDYDVDHIVPQSFLKDDSIDNKVLTRSDKARGKSDNVPSEEVVKKMKNYWRQLLNAKLITQRKFDNLTKAERGGLSELDKAGFIKRQLVETRQITKHVAQILDSRMNTKYDENDKLIREVKVITLKSKLVSDFRKDFQFYKVREINNYHHAHDAYLNAVVGTALIKKYPKLESEFVYGDYKVYDVRKMIAKSEQEIGKATAKYFFYSNIMNFFKTEITLANGEIRKRPLIETNGETGEIVWDKGRDFATVRKVLSMPQVNIVKKTEVQTGGFSKESILPKRNSDKLIARKKDWDPKKYGGFDSPTVAYSVLVVAKVEKGKSKKLKSVKELLGITIMERSSFEKNPIDFLEAKGYKEVKKDLIIKLPKYSLFELENGRKRMLASAGELQKGNELALPSKYVNFLYLASHYEKLKGSPEDNEQKQLFVEQHKHYLDEIIEQISEFSKRVILADANLDKVLSAYNKHRDKPIREQAENIIHLFTLTNLGAPAAFKYFDTTIDRKRYTSTKEVLDATLIHQSITGLYETRIDLSQLGGDGGGGSPAPEAAAKGGMNPLQLLQPLPAEIKGTKLLAHWNSGATITCIPESFLEDEQPIKKTLIKTIHGEKQQNVYYVTFKVKGRKVEAEVIASPYEYILLSPTDVPWLTQQPLQLTILVPLQEYQEKILSKTALPEDQKQQLKTLFVKYDNLWQHWENQVGHRKIRPHNIATGDYPPRPQKQYPINPKAKPSIQIVIDDLLKQGVLTPQNSTMNTPVYPVPKPDGRWRMVLDYREVNKTIPLTAAQNQHSAGILATIVRQKYKTTLDLANGFWAHPITPESYWLTAFTWQGKQYCWTRLPQGFLNSPALFTADVVDLLKEIPNVQVYVDDIYLSHDDPKEHVQQLEKVFQILLQAGYVVSLKKSEIGQKTVEFLGFNITKEGRGLTDTFKTKLLNITPPKDLKQLQSILGLLNFARNFIPNFAELVQPLYNLIASAKGKYIEWSEENTKQLNMVIEALNTASNLEERLPEQRLVIKVNTSPSAGYVRYYNETGKKPIMYLNYVFSKAELKFSMLEKLLTTMHKALIKAMDLAMGQEILVYSPIVSMTKIQKTPLPERKALPIRWITWMTYLEDPRIQFHYDKTLPELKHIPDVYTSSQSPVKHPSQYEGVFYTDGSAIKSPDPTKSNNAGMGIVHATYKPEYQVLNQWSIPLGNHTAQMAEIAAVEFACKKALKIPGPVLVITDSFYVAESANKELPYWKSNGFVNNKKKPLKHISKWKSIAECLSMKPDITIQHEKGISLQIPVFILKGNALADKLATQGSYVVNAGKRTADGSEFEKRTADGSEFESPKKKAKVE

SEQ ID NO: 1287 - protein, 2176 aa, synthetic construct
MPAAKRVKLDGGDKKYSIGLDIGTNSVGWAVITDEYKVPSKKFKVLGNTDRHSIKKNLIGALLFDSGETAEATRLKRTARRRYTRRKNRICYLQEIFSNEMAKVDDSFFHRLEESFLVEEDKKHERHPIFGNIVDEVAYHEKYPTIYHLRKKLVDSTDKADLRLIYLALAHMIKFRGHFLIEGDLNPDNSDVDKLFIQLVQTYNQLFEENPINASGVDAKAILSARLSKSRRLENLIAQLPGEKKNGLFGNLIALSLGLTPNFKSNFDLAEDAKLQLSKDTYDDDLDNLLAQIGDQYADLFLAAKNLSDAILLSDILRVNTEITKAPLSASMIKRYDEHHQDLTLLKALVRQQLPEKYKEIFFDQSKNGYAGYIDGGASQEEFYKFIKPILEKMDGTEELLVKLNREDLLRKQRTFDNGSIPHQIHLGELHAILRRQEDFYPFLKDNREKIEKILTFRIPYYVGPLARGNSRFAWMTRKSEETITPWNFEEVVDKGASAQSFIERMTNFDKNLPNEKVLPKHSLLYEYFTVYNELTKVKYVTEGMRKPAFLSGEQKKAIVDLLFKTNRKVTVKQLKEDYFKKIECFDSVEISGVEDRFNASLGTYHDLLKIIKDKDFLDNEENEDILEDIVLTLTLFEDREMIEERLKTYAHLFDDKVMKQLKRRRYTGWGRLSRKLINGIRDKQSGKTILDFLKSDGFANRNFMQLIHDDSLTFKEDIQKAQVSGQGDSLHEHIANLAGSPAIKKGILQTVKVVDELVKVMGRHKPENIVIEMARENQTTQKGQKNSRERMKRIEEGIKELGSQILKEHPVENTQLQNEKLYLYYLQNGRDMYVDQELDINRLSDYDVDHIVPQSFLKDDSIDNKVLTRSDKARGKSDNVPSEEVVKKMKNYWRQLLNAKLITQRKFDNLTKAERGGLSELDKAGFIKRQLVETRQITKHVAQILDSRMNTKYDENDKLIREVKVITLKSKLVSDFRKDFQFYKVREINNYHHAHDAYLNAVVGTALIKKYPKLESEFVYGDYKVYDVRKMIAKSEQEIGKATAKYFFYSNIMNFFKTEITLANGEIRKRPLIETNGETGEIVWDKGRDFATVRKVLSMPQVNIVKKTEVQTGGFSKESILPKRNSDKLIARKKDWDPKKYGGFDSPTVAYSVLVVAKVEKGKSKKLKSVKELLGITIMERSSFEKNPIDFLEAKGYKEVKKDLIIKLPKYSLFELENGRKRMLASAGELQKGNELALPSKYVNFLYLASHYEKLKGSPEDNEQKQLFVEQHKHYLDEIIEQISEFSKRVILADANLDKVLSAYNKHRDKPIREQAENIIHLFTLTNLGAPAAFKYFDTTIDRKRYTSTKEVLDATLIHQSITGLYETRIDLSQLGGDGGEAAAKGGSPAPGGMNPLQLLQPLPAEIKGTKLLAHWNSGATITCIPESFLEDEQPIKKTLIKTIHGEKQQNVYYVTFKVKGRKVEAEVIASPYEYILLSPTDVPWLTQQPLQLTILVPLQEYQEKILSKTALPEDQKQQLKTLFVKYDNLWQHWENQVGHRKIRPHNIATGDYPPRPQKQYPINPKAKPSIQIVIDDLLKQGVLTPQNSTMNTPVYPVPKPDGRWRMVLDYREVNKTIPLTAAQNQHSAGILATIVRQKYKTTLDLANGFWAHPITPESYWLTAFTWQGKQYCWTRLPQGFLNSPALFTADVVDLLKEIPNVQVYVDDIYLSHDDPKEHVQQLEKVFQILLQAGYVVSLKKSEIGQKTVEFLGFNITKEGRGLTDTFKTKLLNITPPKDLKQLQSILGLLNFARNFIPNFAELVQPLYNLIASAKGKYIEWSEENTKQLNMVIEALNTASNLEERLPEQRLVIKVNTSPSAGYVRYYNETGKKPIMYLNYVFSKAELKFSMLEKLLTTMHKALIKAMDLAMGQEILVYSPIVSMTKIQKTPLPERKALPIRWITWMTYLEDPRIQFHYDKTLPELKHIPDVYTSSQSPVKHPSQYEGVFYTDGSAIKSPDPTKSNNAGMGIVHATYKPEYQVLNQWSIPLGNHTAQMAEIAAVEFACKKALKIPGPVLVITDSFYVAESANKELPYWKSNGFVNNKKKPLKHISKWKSIAECLSMKPDITIQHEKGISLQIPVFILKGNALADKLATQGSYVVNAGKRTADGSEFEKRTADGSEFESPKKKAKVE

SEQ ID NO: 1288 - protein, 2180 aa, synthetic construct
MPAAKRVKLDGGDKKYSIGLDIGTNSVGWAVITDEYKVPSKKFKVLGNTDRHSIKKNLIGALLFDSGETAEATRLKRTARRRYTRRKNRICYLQEIFSNEMAKVDDSFFHRLEESFLVEEDKKHERHPIFGNIVDEVAYHEKYPTIYHLRKKLVDSTDKADLRLIYLALAHMIKFRGHFLIEGDLNPDNSDVDKLFIQLVQTYNQLFEENPINASGVDAKAILSARLSKSRRLENLIAQLPGEKKNGLFGNLIALSLGLTPNFKSNFDLAEDAKLQLSKDTYDDDLDNLLAQIGDQYADLFLAAKNLSDAILLSDILRVNTEITKAPLSASMIKRYDEHHQDLTLLKALVRQQLPEKYKEIFFDQSKNGYAGYIDGGASQEEFYKFIKPILEKMDGTEELLVKLNREDLLRKQRTFDNGSIPHQIHLGELHAILRRQEDFYPFLKDNREKIEKILTFRIPYYVGPLARGNSRFAWMTRKSEETITPWNFEEVVDKGASAQSFIERMTNFDKNLPNEKVLPKHSLLYEYFTVYNELTKVKYVTEGMRKPAFLSGEQKKAIVDLLFKTNRKVTVKQLKEDYFKKIECFDSVEISGVEDRFNASLGTYHDLLKIIKDKDFLDNEENEDILEDIVLTLTLFEDREMIEERLKTYAHLFDDKVMKQLKRRRYTGWGRLSRKLINGIRDKQSGKTILDFLKSDGFANRNFMQLIHDDSLTFKEDIQKAQVSGQGDSLHEHIANLAGSPAIKKGILQTVKVVDELVKVMGRHKPENIVIEMARENQTTQKGQKNSRERMKRIEEGIKELGSQILKEHPVENTQLQNEKLYLYYLQNGRDMYVDQELDINRLSDYDVDHIVPQSFLKDDSIDNKVLTRSDKARGKSDNVPSEEVVKKMKNYWRQLLNAKLITQRKFDNLTKAERGGLSELDKAGFIKRQLVETRQITKHVAQILDSRMNTKYDENDKLIREVKVITLKSKLVSDFRKDFQFYKVREINNYHHAHDAYLNAVVGTALIKKYPKLESEFVYGDYKVYDVRKMIAKSEQEIGKATAKYFFYSNIMNFFKTEITLANGEIRKRPLIETNGETGEIVWDKGRDFATVRKVLSMPQVNIVKKTEVQTGGFSKESILPKRNSDKLIARKKDWDPKKYGGFDSPTVAYSVLVVAKVEKGKSKKLKSVKELLGITIMERSSFEKNPIDFLEAKGYKEVKKDLIIKLPKYSLFELENGRKRMLASAGELQKGNELALPSKYVNFLYLASHYEKLKGSPEDNEQKQLFVEQHKHYLDEIIEQISEFSKRVILADANLDKVLSAYNKHRDKPIREQAENIIHLFTLTNLGAPAAFKYFDTTIDRKRYTSTKEVLDATLIHQSITGLYETRIDLSQLGGDGGEAAAKEAAAKEAAAKGGMNPLQLLQPLPAEIKGTKLLAHWNSGATITCIPESFLEDEQPIKKTLIKTIHGEKQQNVYYVTFKVKGRKVEAEVIASPYEYILLSPTDVPWLTQQPLQLTILVPLQEYQEKILSKTALPEDQKQQLKTLFVKYDNLWQHWENQVGHRKIRPHNIATGDYPPRPQKQYPINPKAKPSIQIVIDDLLKQGVLTPQNSTMNTPVYPVPKPDGRWRMVLDYREVNKTIPLTAAQNQHSAGILATIVRQKYKTTLDLANGFWAHPITPESYWLTAFTWQGKQYCWTRLPQGFLNSPALFTADVVDLLKEIPNVQVYVDDIYLSHDDPKEHVQQLEKVFQILLQAGYVVSLKKSEIGQKTVEFLGFNITKEGRGLTDTFKTKLLNITPPKDLKQLQSILGLLNFARNFIPNFAELVQPLYNLIASAKGKYIEWSEENTKQLNMVIEALNTASNLEERLPEQRLVIKVNTSPSAGYVRYYNETGKKPIMYLNYVFSKAELKFSMLEKLLTTMHKALIKAMDLAMGQEILVYSPIVSMTKIQKTPLPERKALPIRWITWMTYLEDPRIQFHYDKTLPELKHIPDVYTSSQSPVKHPSQYEGVFYTDGSAIKSPDPTKSNNAGMGIVHATYKPEYQVLNQWSIPLGNHTAQMAEIAAVEFACKKALKIPGPVLVITDSFYVAESANKELPYWKSNGFVNNKKKPLKHISKWKSIAECLSMKPDITIQHEKGISLQIPVFILKGNALADKLATQGSYVVNAGKRTADGSEFEKRTADGSEFESPKKKAKVE

SEQ ID NO: 1289 - protein, 2177 aa, synthetic construct
MPAAKRVKLDGGDKKYSIGLDIGTNSVGWAVITDEYKVPSKKFKVLGNTDRHSIKKNLIGALLFDSGETAEATRLKRTARRRYTRRKNRICYLQEIFSNEMAKVDDSFFHRLEESFLVEEDKKHERHPIFGNIVDEVAYHEKYPTIYHLRKKLVDSTDKADLRLIYLALAHMIKFRGHFLIEGDLNPDNSDVDKLFIQLVQTYNQLFEENPINASGVDAKAILSARLSKSRRLENLIAQLPGEKKNGLFGNLIALSLGLTPNFKSNFDLAEDAKLQLSKDTYDDDLDNLLAQIGDQYADLFLAAKNLSDAILLSDILRVNTEITKAPLSASMIKRYDEHHQDLTLLKALVRQQLPEKYKEIFFDQSKNGYAGYIDGGASQEEFYKFIKPILEKMDGTEELLVKLNREDLLRKQRTFDNGSIPHQIHLGELHAILRRQEDFYPFLKDNREKIEKILTFRIPYYVGPLARGNSRFAWMTRKSEETITPWNFEEVVDKGASAQSFIERMTNFDKNLPNEKVLPKHSLLYEYFTVYNELTKVKYVTEGMRKPAFLSGEQKKAIVDLLFKTNRKVTVKQLKEDYFKKIECFDSVEISGVEDRFNASLGTYHDLLKIIKDKDFLDNEENEDILEDIVLTLTLFEDREMIEERLKTYAHLFDDKVMKQLKRRRYTGWGRLSRKLINGIRDKQSGKTILDFLKSDGFANRNFMQLIHDDSLTFKEDIQKAQVSGQGDSLHEHIANLAGSPAIKKGILQTVKVVDELVKVMGRHKPENIVIEMARENQTTQKGQKNSRERMKRIEEGIKELGSQILKEHPVENTQLQNEKLYLYYLQNGRDMYVDQELDINRLSDYDVDHIVPQSFLKDDSIDNKVLTRSDKARGKSDNVPSEEVVKKMKNYWRQLLNAKLITQRKFDNLTKAERGGLSELDKAGFIKRQLVETRQITKHVAQILDSRMNTKYDENDKLIREVKVITLKSKLVSDFRKDFQFYKVREINNYHHAHDAYLNAVVGTALIKKYPKLESEFVYGDYKVYDVRKMIAKSEQEIGKATAKYFFYSNIMNFFKTEITLANGEIRKRPLIETNGETGEIVWDKGRDFATVRKVLSMPQVNIVKKTEVQTGGFSKESILPKRNSDKLIARKKDWDPKKYGGFDSPTVAYSVLVVAKVEKGKSKKLKSVKELLGITIMERSSFEKNPIDFLEAKGYKEVKKDLIIKLPKYSLFELENGRKRMLASAGELQKGNELALPSKYVNFLYLASHYEKLKGSPEDNEQKQLFVEQHKHYLDEIIEQISEFSKRVILADANLDKVLSAYNKHRDKPIREQAENIIHLFTLTNLGAPAAFKYFDTTIDRKRYTSTKEVLDATLIHQSITGLYETRIDLSQLGGDGGGGSGGSGGSGGSGGMNPLQLLQPLPAEIKGTKLLAHWNSGATITCIPESFLEDEQPIKKTLIKTIHGEKQQNVYYVTFKVKGRKVEAEVIASPYEYILLSPTDVPWLTQQPLQLTILVPLQEYQEKILSKTALPEDQKQQLKTLFVKYDNLWQHWENQVGHRKIRPHNIATGDYPPRPQKQYPINPKAKPSIQIVIDDLLKQGVLTPQNSTMNTPVYPVPKPDGRWRMVLDYREVNKTIPLTAAQNQHSAGILATIVRQKYKTTLDLANGFWAHPITPESYWLTAFTWQGKQYCWTRLPQGFLNSPALFTADVVDLLKEIPNVQVYVDDIYLSHDDPKEHVQQLEKVFQILLQAGYVVSLKKSEIGQKTVEFLGFNITKEGRGLTDTFKTKLLNITPPKDLKQLQSILGLLNFARNFIPNFAELVQPLYNLIASAKGKYIEWSEENTKQLNMVIEALNTASNLEERLPEQRLVIKVNTSPSAGYVRYYNETGKKPIMYLNYVFSKAELKFSMLEKLLTTMHKALIKAMDLAMGQEILVYSPIVSMTKIQKTPLPERKALPIRWITWMTYLEDPRIQFHYDKTLPELKHIPDVYTSSQSPVKHPSQYEGVFYTDGSAIKSPDPTKSNNAGMGIVHATYKPEYQVLNQWSIPLGNHTAQMAEIAAVEFACKKALKIPGPVLVITDSFYVAESANKELPYWKSNGFVNNKKKPLKHISKWKSIAECLSMKPDITIQHEKGISLQIPVFILKGNALADKLATQGSYVVNAGKRTADGSEFEKRTADGSEFESPKKKAKVE

SEQ ID NO: 1290 - protein, 2174 aa, synthetic construct
MPAAKRVKLDGGDKKYSIGLDIGTNSVGWAVITDEYKVPSKKFKVLGNTDRHSIKKNLIGALLFDSGETAEATRLKRTARRRYTRRKNRICYLQEIFSNEMAKVDDSFFHRLEESFLVEEDKKHERHPIFGNIVDEVAYHEKYPTIYHLRKKLVDSTDKADLRLIYLALAHMIKFRGHFLIEGDLNPDNSDVDKLFIQLVQTYNQLFEENPINASGVDAKAILSARLSKSRRLENLIAQLPGEKKNGLFGNLIALSLGLTPNFKSNFDLAEDAKLQLSKDTYDDDLDNLLAQIGDQYADLFLAAKNLSDAILLSDILRVNTEITKAPLSASMIKRYDEHHQDLTLLKALVRQQLPEKYKEIFFDQSKNGYAGYIDGGASQEEFYKFIKPILEKMDGTEELLVKLNREDLLRKQRTFDNGSIPHQIHLGELHAILRRQEDFYPFLKDNREKIEKILTFRIPYYVGPLARGNSRFAWMTRKSEETITPWNFEEVVDKGASAQSFIERMTNFDKNLPNEKVLPKHSLLYEYFTVYNELTKVKYVTEGMRKPAFLSGEQKKAIVDLLFKTNRKVTVKQLKEDYFKKIECFDSVEISGVEDRFNASLGTYHDLLKIIKDKDFLDNEENEDILEDIVLTLTLFEDREMIEERLKTYAHLFDDKVMKQLKRRRYTGWGRLSRKLINGIRDKQSGKTILDFLKSDGFANRNFMQLIHDDSLTFKEDIQKAQVSGQGDSLHEHIANLAGSPAIKKGILQTVKVVDELVKVMGRHKPENIVIEMARENQTTQKGQKNSRERMKRIEEGIKELGSQILKEHPVENTQLQNEKLYLYYLQNGRDMYVDQELDINRLSDYDVDHIVPQSFLKDDSIDNKVLTRSDKARGKSDNVPSEEVVKKMKNYWRQLLNAKLITQRKFDNLTKAERGGLSELDKAGFIKRQLVETRQITKHVAQILDSRMNTKYDENDKLIREVKVITLKSKLVSDFRKDFQFYKVREINNYHHAHDAYLNAVVGTALIKKYPKLESEFVYGDYKVYDVRKMIAKSEQEIGKATAKYFFYSNIMNFFKTEITLANGEIRKRPLIETNGETGEIVWDKGRDFATVRKVLSMPQVNIVKKTEVQTGGFSKESILPKRNSDKLIARKKDWDPKKYGGFDSPTVAYSVLVVAKVEKGKSKKLKSVKELLGITIMERSSFEKNPIDFLEAKGYKEVKKDLIIKLPKYSLFELENGRKRMLASAGELQKGNELALPSKYVNFLYLASHYEKLKGSPEDNEQKQLFVEQHKHYLDEIIEQISEFSKRVILADANLDKVLSAYNKHRDKPIREQAENIIHLFTLTNLGAPAAFKYFDTTIDRKRYTSTKEVLDATLIHQSITGLYETRIDLSQLGGDGGGGSGGGPAPGGMNPLQLLQPLPAEIKGTKLLAHWNSGATITCIPESFLEDEQPIKKTLIKTIHGEKQQNVYYVTFKVKGRKVEAEVIASPYEYILLSPTDVPWLTQQPLQLTILVPLQEYQEKILSKTALPEDQKQQLKTLFVKYDNLWQHWENQVGHRKIRPHNIATGDYPPRPQKQYPINPKAKPSIQIVIDDLLKQGVLTPQNSTMNTPVYPVPKPDGRWRMVLDYREVNKTIPLTAAQNQHSAGILATIVRQKYKTTLDLANGFWAHPITPESYWLTAFTWQGKQYCWTRLPQGFLNSPALFTADVVDLLKEIPNVQVYVDDIYLSHDDPKEHVQQLEKVFQILLQAGYVVSLKKSEIGQKTVEFLGFNITKEGRGLTDTFKTKLLNITPPKDLKQLQSILGLLNFARNFIPNFAELVQPLYNLIASAKGKYIEWSEENTKQLNMVIEALNTASNLEERLPEQRLVIKVNTSPSAGYVRYYNETGKKPIMYLNYVFSKAELKFSMLEKLLTTMHKALIKAMDLAMGQEILVYSPIVSMTKIQKTPLPERKALPIRWITWMTYLEDPRIQFHYDKTLPELKHIPDVYTSSQSPVKHPSQYEGVFYTDGSAIKSPDPTKSNNAGMGIVHATYKPEYQVLNQWSIPLGNHTAQMAEIAAVEFACKKALKIPGPVLVITDSFYVAESANKELPYWKSNGFVNNKKKPLKHISKWKSIAECLSMKPDITIQHEKGISLQIPVFILKGNALADKLATQGSYVVNAGKRTADGSEFEKRTADGSEFESPKKKAKVE

SEQ ID NO: 1291 - protein, 2176 aa, synthetic construct
MPAAKRVKLDGGDKKYSIGLDIGTNSVGWAVITDEYKVPSKKFKVLGNTDRHSIKKNLIGALLFDSGETAEATRLKRTARRRYTRRKNRICYLQEIFSNEMAKVDDSFFHRLEESFLVEEDKKHERHPIFGNIVDEVAYHEKYPTIYHLRKKLVDSTDKADLRLIYLALAHMIKFRGHFLIEGDLNPDNSDVDKLFIQLVQTYNQLFEENPINASGVDAKAILSARLSKSRRLENLIAQLPGEKKNGLFGNLIALSLGLTPNFKSNFDLAEDAKLQLSKDTYDDDLDNLLAQIGDQYADLFLAAKNLSDAILLSDILRVNTEITKAPLSASMIKRYDEHHQDLTLLKALVRQQLPEKYKEIFFDQSKNGYAGYIDGGASQEEFYKFIKPILEKMDGTEELLVKLNREDLLRKQRTFDNGSIPHQIHLGELHAILRRQEDFYPFLKDNREKIEKILTFRIPYYVGPLARGNSRFAWMTRKSEETITPWNFEEVVDKGASAQSFIERMTNFDKNLPNEKVLPKHSLLYEYFTVYNELTKVKYVTEGMRKPAFLSGEQKKAIVDLLFKTNRKVTVKQLKEDYFKKIECFDSVEISGVEDRFNASLGTYHDLLKIIKDKDFLDNEENEDILEDIVLTLTLFEDREMIEERLKTYAHLFDDKVMKQLKRRRYTGWGRLSRKLINGIRDKQSGKTILDFLKSDGFANRNFMQLIHDDSLTFKEDIQKAQVSGQGDSLHEHIANLAGSPAIKKGILQTVKVVDELVKVMGRHKPENIVIEMARENQTTQKGQKNSRERMKRIEEGIKELGSQILKEHPVENTQLQNEKLYLYYLQNGRDMYVDQELDINRLSDYDVDHIVPQSFLKDDSIDNKVLTRSDKARGKSDNVPSEEVVKKMKNYWRQLLNAKLITQRKFDNLTKAERGGLSELDKAGFIKRQLVETRQITKHVAQILDSRMNTKYDENDKLIREVKVITLKSKLVSDFRKDFQFYKVREINNYHHAHDAYLNAVVGTALIKKYPKLESEFVYGDYKVYDVRKMIAKSEQEIGKATAKYFFYSNIMNFFKTEITLANGEIRKRPLIETNGETGEIVWDKGRDFATVRKVLSMPQVNIVKKTEVQTGGFSKESILPKRNSDKLIARKKDWDPKKYGGFDSPTVAYSVLVVAKVEKGKSKKLKSVKELLGITIMERSSFEKNPIDFLEAKGYKEVKKDLIIKLPKYSLFELENGRKRMLASAGELQKGNELALPSKYVNFLYLASHYEKLKGSPEDNEQKQLFVEQHKHYLDEIIEQISEFSKRVILADANLDKVLSAYNKHRDKPIREQAENIIHLFTLTNLGAPAAFKYFDTTIDRKRYTSTKEVLDATLIHQSITGLYETRIDLSQLGGDGGPAPGGSEAAAKGGMNPLQLLQPLPAEIKGTKLLAHWNSGATITCIPESFLEDEQPIKKTLIKTIHGEKQQNVYYVTFKVKGRKVEAEVIASPYEYILLSPTDVPWLTQQPLQLTILVPLQEYQEKILSKTALPEDQKQQLKTLFVKYDNLWQHWENQVGHRKIRPHNIATGDYPPRPQKQYPINPKAKPSIQIVIDDLLKQGVLTPQNSTMNTPVYPVPKPDGRWRMVLDYREVNKTIPLTAAQNQHSAGILATIVRQKYKTTLDLANGFWAHPITPESYWLTAFTWQGKQYCWTRLPQGFLNSPALFTADVVDLLKEIPNVQVYVDDIYLSHDDPKEHVQQLEKVFQILLQAGYVVSLKKSEIGQKTVEFLGFNITKEGRGLTDTFKTKLLNITPPKDLKQLQSILGLLNFARNFIPNFAELVQPLYNLIASAKGKYIEWSEENTKQLNMVIEALNTASNLEERLPEQRLVIKVNTSPSAGYVRYYNETGKKPIMYLNYVFSKAELKFSMLEKLLTTMHKALIKAMDLAMGQEILVYSPIVSMTKIQKTPLPERKALPIRWITWMTYLEDPRIQFHYDKTLPELKHIPDVYTSSQSPVKHPSQYEGVFYTDGSAIKSPDPTKSNNAGMGIVHATYKPEYQVLNQWSIPLGNHTAQMAEIAAVEFACKKALKIPGPVLVITDSFYVAESANKELPYWKSNGFVNNKKKPLKHISKWKSIAECLSMKPDITIQHEKGISLQIPVFILKGNALADKLATQGSYVVNAGKRTADGSEFEKRTADGSEFESPKKKAKVE

SEQ ID NO: 1292 - protein, 2173 aa, synthetic construct
MPAAKRVKLDGGDKKYSIGLDIGTNSVGWAVITDEYKVPSKKFKVLGNTDRHSIKKNLIGALLFDSGETAEATRLKRTARRRYTRRKNRICYLQEIFSNEMAKVDDSFFHRLEESFLVEEDKKHERHPIFGNIVDEVAYHEKYPTIYHLRKKLVDSTDKADLRLIYLALAHMIKFRGHFLIEGDLNPDNSDVDKLFIQLVQTYNQLFEENPINASGVDAKAILSARLSKSRRLENLIAQLPGEKKNGLFGNLIALSLGLTPNFKSNFDLAEDAKLQLSKDTYDDDLDNLLAQIGDQYADLFLAAKNLSDAILLSDILRVNTEITKAPLSASMIKRYDEHHQDLTLLKALVRQQLPEKYKEIFFDQSKNGYAGYIDGGASQEEFYKFIKPILEKMDGTEELLVKLNREDLLRKQRTFDNGSIPHQIHLGELHAILRRQEDFYPFLKDNREKIEKILTFRIPYYVGPLARGNSRFAWMTRKSEETITPWNFEEVVDKGASAQSFIERMTNFDKNLPNEKVLPKHSLLYEYFTVYNELTKVKYVTEGMRKPAFLSGEQKKAIVDLLFKTNRKVTVKQLKEDYFKKIECFDSVEISGVEDRFNASLGTYHDLLKIIKDKDFLDNEENEDILEDIVLTLTLFEDREMIEERLKTYAHLFDDKVMKQLKRRRYTGWGRLSRKLINGIRDKQSGKTILDFLKSDGFANRNFMQLIHDDSLTFKEDIQKAQVSGQGDSLHEHIANLAGSPAIKKGILQTVKVVDELVKVMGRHKPENIVIEMARENQTTQKGQKNSRERMKRIEEGIKELGSQILKEHPVENTQLQNEKLYLYYLQNGRDMYVDQELDINRLSDYDVDHIVPQSFLKDDSIDNKVLTRSDKARGKSDNVPSEEVVKKMKNYWRQLLNAKLITQRKFDNLTKAERGGLSELDKAGFIKRQLVETRQITKHVAQILDSRMNTKYDENDKLIREVKVITLKSKLVSDFRKDFQFYKVREINNYHHAHDAYLNAVVGTALIKKYPKLESEFVYGDYKVYDVRKMIAKSEQEIGKATAKYFFYSNIMNFFKTEITLANGEIRKRPLIETNGETGEIVWDKGRDFATVRKVLSMPQVNIVKKTEVQTGGFSKESILPKRNSDKLIARKKDWDPKKYGGFDSPTVAYSVLVVAKVEKGKSKKLKSVKELLGITIMERSSFEKNPIDFLEAKGYKEVKKDLIIKLPKYSLFELENGRKRMLASAGELQKGNELALPSKYVNFLYLASHYEKLKGSPEDNEQKQLFVEQHKHYLDEIIEQISEFSKRVILADANLDKVLSAYNKHRDKPIREQAENIIHLFTLTNLGAPAAFKYFDTTIDRKRYTSTKEVLDATLIHQSITGLYETRIDLSQLGGDGGGSSEAAAKGGMNPLQLLQPLPAEIKGTKLLAHWNSGATITCIPESFLEDEQPIKKTLIKTIHGEKQQNVYYVTFKVKGRKVEAEVIASPYEYILLSPTDVPWLTQQPLQLTILVPLQEYQEKILSKTALPEDQKQQLKTLFVKYDNLWQHWENQVGHRKIRPHNIATGDYPPRPQKQYPINPKAKPSIQIVIDDLLKQGVLTPQNSTMNTPVYPVPKPDGRWRMVLDYREVNKTIPLTAAQNQHSAGILATIVRQKYKTTLDLANGFWAHPITPESYWLTAFTWQGKQYCWTRLPQGFLNSPALFTADVVDLLKEIPNVQVYVDDIYLSHDDPKEHVQQLEKVFQILLQAGYVVSLKKSEIGQKTVEFLGFNITKEGRGLTDTFKTKLLNITPPKDLKQLQSILGLLNFARNFIPNFAELVQPLYNLIASAKGKYIEWSEENTKQLNMVIEALNTASNLEERLPEQRLVIKVNTSPSAGYVRYYNETGKKPIMYLNYVFSKAELKFSMLEKLLTTMHKALIKAMDLAMGQEILVYSPIVSMTKIQKTPLPERKALPIRWITWMTYLEDPRIQFHYDKTLPELKHIPDVYTSSQSPVKHPSQYEGVFYTDGSAIKSPDPTKSNNAGMGIVHATYKPEYQVLNQWSIPLGNHTAQMAEIAAVEFACKKALKIPGPVLVITDSFYVAESANKELPYWKSNGFVNNKKKPLKHISKWKSIAECLSMKPDITIQHEKGISLQIPVFILKGNALADKLATQGSYVVNAGKRTADGSEFEKRTADGSEFESPKKKAKVE

SEQ ID NO: 1293 - protein, 2176 aa, synthetic construct
MPAAKRVKLDGGDKKYSIGLDIGTNSVGWAVITDEYKVPSKKFKVLGNTDRHSIKKNLIGALLFDSGETAEATRLKRTARRRYTRRKNRICYLQEIFSNEMAKVDDSFFHRLEESFLVEEDKKHERHPIFGNIVDEVAYHEKYPTIYHLRKKLVDSTDKADLRLIYLALAHMIKFRGHFLIEGDLNPDNSDVDKLFIQLVQTYNQLFEENPINASGVDAKAILSARLSKSRRLENLIAQLPGEKKNGLFGNLIALSLGLTPNFKSNFDLAEDAKLQLSKDTYDDDLDNLLAQIGDQYADLFLAAKNLSDAILLSDILRVNTEITKAPLSASMIKRYDEHHQDLTLLKALVRQQLPEKYKEIFFDQSKNGYAGYIDGGASQEEFYKFIKPILEKMDGTEELLVKLNREDLLRKQRTFDNGSIPHQIHLGELHAILRRQEDFYPFLKDNREKIEKILTFRIPYYVGPLARGNSRFAWMTRKSEETITPWNFEEVVDKGASAQSFIERMTNFDKNLPNEKVLPKHSLLYEYFTVYNELTKVKYVTEGMRKPAFLSGEQKKAIVDLLFKTNRKVTVKQLKEDYFKKIECFDSVEISGVEDRFNASLGTYHDLLKIIKDKDFLDNEENEDILEDIVLTLTLFEDREMIEERLKTYAHLFDDKVMKQLKRRRYTGWGRLSRKLINGIRDKQSGKTILDFLKSDGFANRNFMQLIHDDSLTFKEDIQKAQVSGQGDSLHEHIANLAGSPAIKKGILQTVKVVDELVKVMGRHKPENIVIEMARENQTTQKGQKNSRERMKRIEEGIKELGSQILKEHPVENTQLQNEKLYLYYLQNGRDMYVDQELDINRLSDYDVDHIVPQSFLKDDSIDNKVLTRSDKARGKSDNVPSEEVVKKMKNYWRQLLNAKLITQRKFDNLTKAERGGLSELDKAGFIKRQLVETRQITKHVAQILDSRMNTKYDENDKLIREVKVITLKSKLVSDFRKDFQFYKVREINNYHHAHDAYLNAVVGTALIKKYPKLESEFVYGDYKVYDVRKMIAKSEQEIGKATAKYFFYSNIMNFFKTEITLANGEIRKRPLIETNGETGEIVWDKGRDFATVRKVLSMPQVNIVKKTEVQTGGFSKESILPKRNSDKLIARKKDWDPKKYGGFDSPTVAYSVLVVAKVEKGKSKKLKSVKELLGITIMERSSFEKNPIDFLEAKGYKEVKKDLIIKLPKYSLFELENGRKRMLASAGELQKGNELALPSKYVNFLYLASHYEKLKGSPEDNEQKQLFVEQHKHYLDEIIEQISEFSKRVILADANLDKVLSAYNKHRDKPIREQAENIIHLFTLTNLGAPAAFKYFDTTIDRKRYTSTKEVLDATLIHQSITGLYETRIDLSQLGGDGGGGSGSSEAAAKGGMNPLQLLQPLPAEIKGTKLLAHWNSGATITCIPESFLEDEQPIKKTLIKTIHGEKQQNVYYVTFKVKGRKVEAEVIASPYEYILLSPTDVPWLTQQPLQLTILVPLQEYQEKILSKTALPEDQKQQLKTLFVKYDNLWQHWENQVGHRKIRPHNIATGDYPPRPQKQYPINPKAKPSIQIVIDDLLKQGVLTPQNSTMNTPVYPVPKPDGRWRMVLDYREVNKTIPLTAAQNQHSAGILATIVRQKYKTTLDLANGFWAHPITPESYWLTAFTWQGKQYCWTRLPQGFLNSPALFTADVVDLLKEIPNVQVYVDDIYLSHDDPKEHVQQLEKVFQILLQAGYVVSLKKSEIGQKTVEFLGFNITKEGRGLTDTFKTKLLNITPPKDLKQLQSILGLLNFARNFIPNFAELVQPLYNLIASAKGKYIEWSEENTKQLNMVIEALNTASNLEERLPEQRLVIKVNTSPSAGYVRYYNETGKKPIMYLNYVFSKAELKFSMLEKLLTTMHKALIKAMDLAMGQEILVYSPIVSMTKIQKTPLPERKALPIRWITWMTYLEDPRIQFHYDKTLPELKHIPDVYTSSQSPVKHPSQYEGVFYTDGSAIKSPDPTKSNNAGMGIVHATYKPEYQVLNQWSIPLGNHTAQMAEIAAVEFACKKALKIPGPVLVITDSFYVAESANKELPYWKSNGFVNNKKKPLKHISKWKSIAECLSMKPDITIQHEKGISLQIPVFILKGNALADKLATQGSYVVNAGKRTADGSEFEKRTADGSEFESPKKKAKVE

SEQ ID NO: 1294 - protein, 2171 aa, synthetic construct
MPAAKRVKLDGGDKKYSIGLDIGTNSVGWAVITDEYKVPSKKFKVLGNTDRHSIKKNLIGALLFDSGETAEATRLKRTARRRYTRRKNRICYLQEIFSNEMAKVDDSFFHRLEESFLVEEDKKHERHPIFGNIVDEVAYHEKYPTIYHLRKKLVDSTDKADLRLIYLALAHMIKFRGHFLIEGDLNPDNSDVDKLFIQLVQTYNQLFEENPINASGVDAKAILSARLSKSRRLENLIAQLPGEKKNGLFGNLIALSLGLTPNFKSNFDLAEDAKLQLSKDTYDDDLDNLLAQIGDQYADLFLAAKNLSDAILLSDILRVNTEITKAPLSASMIKRYDEHHQDLTLLKALVRQQLPEKYKEIFFDQSKNGYAGYIDGGASQEEFYKFIKPILEKMDGTEELLVKLNREDLLRKQRTFDNGSIPHQIHLGELHAILRRQEDFYPFLKDNREKIEKILTFRIPYYVGPLARGNSRFAWMTRKSEETITPWNFEEVVDKGASAQSFIERMTNFDKNLPNEKVLPKHSLLYEYFTVYNELTKVKYVTEGMRKPAFLSGEQKKAIVDLLFKTNRKVTVKQLKEDYFKKIECFDSVEISGVEDRFNASLGTYHDLLKIIKDKDFLDNEENEDILEDIVLTLTLFEDREMIEERLKTYAHLFDDKVMKQLKRRRYTGWGRLSRKLINGIRDKQSGKTILDFLKSDGFANRNFMQLIHDDSLTFKEDIQKAQVSGQGDSLHEHIANLAGSPAIKKGILQTVKVVDELVKVMGRHKPENIVIEMARENQTTQKGQKNSRERMKRIEEGIKELGSQILKEHPVENTQLQNEKLYLYYLQNGRDMYVDQELDINRLSDYDVDHIVPQSFLKDDSIDNKVLTRSDKARGKSDNVPSEEVVKKMKNYWRQLLNAKLITQRKFDNLTKAERGGLSELDKAGFIKRQLVETRQITKHVAQILDSRMNTKYDENDKLIREVKVITLKSKLVSDFRKDFQFYKVREINNYHHAHDAYLNAVVGTALIKKYPKLESEFVYGDYKVYDVRKMIAKSEQEIGKATAKYFFYSNIMNFFKTEITLANGEIRKRPLIETNGETGEIVWDKGRDFATVRKVLSMPQVNIVKKTEVQTGGFSKESILPKRNSDKLIARKKDWDPKKYGGFDSPTVAYSVLVVAKVEKGKSKKLKSVKELLGITIMERSSFEKNPIDFLEAKGYKEVKKDLIIKLPKYSLFELENGRKRMLASAGELQKGNELALPSKYVNFLYLASHYEKLKGSPEDNEQKQLFVEQHKHYLDEIIEQISEFSKRVILADANLDKVLSAYNKHRDKPIREQAENIIHLFTLTNLGAPAAFKYFDTTIDRKRYTSTKEVLDATLIHQSITGLYETRIDLSQLGGDGGGGSGGSGGMNPLQLLQPLPAEIKGTKLLAHWNSGATITCIPESFLEDEQPIKKTLIKTIHGEKQQNVYYVTFKVKGRKVEAEVIASPYEYILLSPTDVPWLTQQPLQLTILVPLQEYQEKILSKTALPEDQKQQLKTLFVKYDNLWQHWENQVGHRKIRPHNIATGDYPPRPQKQYPINPKAKPSIQIVIDDLLKQGVLTPQNSTMNTPVYPVPKPDGRWRMVLDYREVNKTIPLTAAQNQHSAGILATIVRQKYKTTLDLANGFWAHPITPESYWLTAFTWQGKQYCWTRLPQGFLNSPALFTADVVDLLKEIPNVQVYVDDIYLSHDDPKEHVQQLEKVFQILLQAGYVVSLKKSEIGQKTVEFLGFNITKEGRGLTDTFKTKLLNITPPKDLKQLQSILGLLNFARNFIPNFAELVQPLYNLIASAKGKYIEWSEENTKQLNMVIEALNTASNLEERLPEQRLVIKVNTSPSAGYVRYYNETGKKPIMYLNYVFSKAELKFSMLEKLLTTMHKALIKAMDLAMGQEILVYSPIVSMTKIQKTPLPERKALPIRWITWMTYLEDPRIQFHYDKTLPELKHIPDVYTSSQSPVKHPSQYEGVFYTDGSAIKSPDPTKSNNAGMGIVHATYKPEYQVLNQWSIPLGNHTAQMAEIAAVEFACKKALKIPGPVLVITDSFYVAESANKELPYWKSNGFVNNKKKPLKHISKWKSIAECLSMKPDITIQHEKGISLQIPVFILKGNALADKLATQGSYVVNAGKRTADGSEFEKRTADGSEFESPKKKAKVE

SEQ ID NO: 1295 - protein, 2084 aa, synthetic construct
MPAAKRVKLDGGDKKYSIGLDIGTNSVGWAVITDEYKVPSKKFKVLGNTDRHSIKKNLIGALLFDSGETAEATRLKRTARRRYTRRKNRICYLQEIFSNEMAKVDDSFFHRLEESFLVEEDKKHERHPIFGNIVDEVAYHEKYPTIYHLRKKLVDSTDKADLRLIYLALAHMIKFRGHFLIEGDLNPDNSDVDKLFIQLVQTYNQLFEENPINASGVDAKAILSARLSKSRRLENLIAQLPGEKKNGLFGNLIALSLGLTPNFKSNFDLAEDAKLQLSKDTYDDDLDNLLAQIGDQYADLFLAAKNLSDAILLSDILRVNTEITKAPLSASMIKRYDEHHQDLTLLKALVRQQLPEKYKEIFFDQSKNGYAGYIDGGASQEEFYKFIKPILEKMDGTEELLVKLNREDLLRKQRTFDNGSIPHQIHLGELHAILRRQEDFYPFLKDNREKIEKILTFRIPYYVGPLARGNSRFAWMTRKSEETITPWNFEEVVDKGASAQSFIERMTNFDKNLPNEKVLPKHSLLYEYFTVYNELTKVKYVTEGMRKPAFLSGEQKKAIVDLLFKTNRKVTVKQLKEDYFKKIECFDSVEISGVEDRFNASLGTYHDLLKIIKDKDFLDNEENEDILEDIVLTLTLFEDREMIEERLKTYAHLFDDKVMKQLKRRRYTGWGRLSRKLINGIRDKQSGKTILDFLKSDGFANRNFMQLIHDDSLTFKEDIQKAQVSGQGDSLHEHIANLAGSPAIKKGILQTVKVVDELVKVMGRHKPENIVIEMARENQTTQKGQKNSRERMKRIEEGIKELGSQILKEHPVENTQLQNEKLYLYYLQNGRDMYVDQELDINRLSDYDVDHIVPQSFLKDDSIDNKVLTRSDKARGKSDNVPSEEVVKKMKNYWRQLLNAKLITQRKFDNLTKAERGGLSELDKAGFIKRQLVETRQITKHVAQILDSRMNTKYDENDKLIREVKVITLKSKLVSDFRKDFQFYKVREINNYHHAHDAYLNAVVGTALIKKYPKLESEFVYGDYKVYDVRKMIAKSEQEIGKATAKYFFYSNIMNFFKTEITLANGEIRKRPLIETNGETGEIVWDKGRDFATVRKVLSMPQVNIVKKTEVQTGGFSKESILPKRNSDKLIARKKDWDPKKYGGFDSPTVAYSVLVVAKVEKGKSKKLKSVKELLGITIMERSSFEKNPIDFLEAKGYKEVKKDLIIKLPKYSLFELENGRKRMLASAGELQKGNELALPSKYVNFLYLASHYEKLKGSPEDNEQKQLFVEQHKHYLDEIIEQISEFSKRVILADANLDKVLSAYNKHRDKPIREQAENIIHLFTLTNLGAPAAFKYFDTTIDRKRYTSTKEVLDATLIHQSITGLYETRIDLSQLGGDGGEAAAKPAPGGVPWLTQQPLQLTILVPLQEYQEKILSKTALPEDQKQQLKTLFVKYDNLWQHWENQVGHRKIRPHNIATGDYPPRPQKQYPINPKAKPSIQIVIDDLLKQGVLTPQNSTMNTPVYPVPKPDGRWRMVLDYREVNKTIPLTAAQNQHSAGILATIVRQKYKTTLDLANGFWAHPITPESYWLTAFTWQGKQYCWTRLPQGFLNSPALFTADVVDLLKEIPNVQVYVDDIYLSHDDPKEHVQQLEKVFQILLQAGYVVSLKKSEIGQKTVEFLGFNITKEGRGLTDTFKTKLLNITPPKDLKQLQSILGLLNFARNFIPNFAELVQPLYNLIASAKGKYIEWSEENTKQLNMVIEALNTASNLEERLPEQRLVIKVNTSPSAGYVRYYNETGKKPIMYLNYVFSKAELKFSMLEKLLTTMHKALIKAMDLAMGQEILVYSPIVSMTKIQKTPLPERKALPIRWITWMTYLEDPRIQFHYDKTLPELKHIPDVYTSSQSPVKHPSQYEGVFYTDGSAIKSPDPTKSNNAGMGIVHATYKPEYQVLNQWSIPLGNHTAQMAEIAAVEFACKKALKIPGPVLVITDSFYVAESANKELPYWKSNGFVNNKKKPLKHISKWKSIAECLSMKPDITIQHEKGISLQIPVFILKGNALADKLATQGSYVVNAGKRTADGSEFEKRTADGSEFESPKKKAKVE

SEQ ID NO: 1296 - protein, 2087 aa, synthetic construct
MPAAKRVKLDGGDKKYSIGLDIGTNSVGWAVITDEYKVPSKKFKVLGNTDRHSIKKNLIGALLFDSGETAEATRLKRTARRRYTRRKNRICYLQEIFSNEMAKVDDSFFHRLEESFLVEEDKKHERHPIFGNIVDEVAYHEKYPTIYHLRKKLVDSTDKADLRLIYLALAHMIKFRGHFLIEGDLNPDNSDVDKLFIQLVQTYNQLFEENPINASGVDAKAILSARLSKSRRLENLIAQLPGEKKNGLFGNLIALSLGLTPNFKSNFDLAEDAKLQLSKDTYDDDLDNLLAQIGDQYADLFLAAKNLSDAILLSDILRVNTEITKAPLSASMIKRYDEHHQDLTLLKALVRQQLPEKYKEIFFDQSKNGYAGYIDGGASQEEFYKFIKPILEKMDGTEELLVKLNREDLLRKQRTFDNGSIPHQIHLGELHAILRRQEDFYPFLKDNREKIEKILTFRIPYYVGPLARGNSRFAWMTRKSEETITPWNFEEVVDKGASAQSFIERMTNFDKNLPNEKVLPKHSLLYEYFTVYNELTKVKYVTEGMRKPAFLSGEQKKAIVDLLFKTNRKVTVKQLKEDYFKKIECFDSVEISGVEDRFNASLGTYHDLLKIIKDKDFLDNEENEDILEDIVLTLTLFEDREMIEERLKTYAHLFDDKVMKQLKRRRYTGWGRLSRKLINGIRDKQSGKTILDFLKSDGFANRNFMQLIHDDSLTFKEDIQKAQVSGQGDSLHEHIANLAGSPAIKKGILQTVKVVDELVKVMGRHKPENIVIEMARENQTTQKGQKNSRERMKRIEEGIKELGSQILKEHPVENTQLQNEKLYLYYLQNGRDMYVDQELDINRLSDYDVDHIVPQSFLKDDSIDNKVLTRSDKARGKSDNVPSEEVVKKMKNYWRQLLNAKLITQRKFDNLTKAERGGLSELDKAGFIKRQLVETRQITKHVAQILDSRMNTKYDENDKLIREVKVITLKSKLVSDFRKDFQFYKVREINNYHHAHDAYLNAVVGTALIKKYPKLESEFVYGDYKVYDVRKMIAKSEQEIGKATAKYFFYSNIMNFFKTEITLANGEIRKRPLIETNGETGEIVWDKGRDFATVRKVLSMPQVNIVKKTEVQTGGFSKESILPKRNSDKLIARKKDWDPKKYGGFDSPTVAYSVLVVAKVEKGKSKKLKSVKELLGITIMERSSFEKNPIDFLEAKGYKEVKKDLIIKLPKYSLFELENGRKRMLASAGELQKGNELALPSKYVNFLYLASHYEKLKGSPEDNEQKQLFVEQHKHYLDEIIEQISEFSKRVILADANLDKVLSAYNKHRDKPIREQAENIIHLFTLTNLGAPAAFKYFDTTIDRKRYTSTKEVLDATLIHQSITGLYETRIDLSQLGGDGGEAAAKGSSGGSGGVPWLTQQPLQLTILVPLQEYQEKILSKTALPEDQKQQLKTLFVKYDNLWQHWENQVGHRKIRPHNIATGDYPPRPQKQYPINPKAKPSIQIVIDDLLKQGVLTPQNSTMNTPVYPVPKPDGRWRMVLDYREVNKTIPLTAAQNQHSAGILATIVRQKYKTTLDLANGFWAHPITPESYWLTAFTWQGKQYCWTRLPQGFLNSPALFTADVVDLLKEIPNVQVYVDDIYLSHDDPKEHVQQLEKVFQILLQAGYVVSLKKSEIGQKTVEFLGFNITKEGRGLTDTFKTKLLNITPPKDLKQLQSILGLLNFARNFIPNFAELVQPLYNLIASAKGKYIEWSEENTKQLNMVIEALNTASNLEERLPEQRLVIKVNTSPSAGYVRYYNETGKKPIMYLNYVFSKAELKFSMLEKLLTTMHKALIKAMDLAMGQEILVYSPIVSMTKIQKTPLPERKALPIRWITWMTYLEDPRIQFHYDKTLPELKHIPDVYTSSQSPVKHPSQYEGVFYTDGSAIKSPDPTKSNNAGMGIVHATYKPEYQVLNQWSIPLGNHTAQMAEIAAVEFACKKALKIPGPVLVITDSFYVAESANKELPYWKSNGFVNNKKKPLKHISKWKSIAECLSMKPDITIQHEKGISLQIPVFILKGNALADKLATQGSYVVNAGKRTADGSEFEKRTADGSEFESPKKKAKVE

SEQ ID NO: 1297 - protein, 2094 aa, synthetic construct
MPAAKRVKLDGGDKKYSIGLDIGTNSVGWAVITDEYKVPSKKFKVLGNTDRHSIKKNLIGALLFDSGETAEATRLKRTARRRYTRRKNRICYLQEIFSNEMAKVDDSFFHRLEESFLVEEDKKHERHPIFGNIVDEVAYHEKYPTIYHLRKKLVDSTDKADLRLIYLALAHMIKFRGHFLIEGDLNPDNSDVDKLFIQLVQTYNQLFEENPINASGVDAKAILSARLSKSRRLENLIAQLPGEKKNGLFGNLIALSLGLTPNFKSNFDLAEDAKLQLSKDTYDDDLDNLLAQIGDQYADLFLAAKNLSDAILLSDILRVNTEITKAPLSASMIKRYDEHHQDLTLLKALVRQQLPEKYKEIFFDQSKNGYAGYIDGGASQEEFYKFIKPILEKMDGTEELLVKLNREDLLRKQRTFDNGSIPHQIHLGELHAILRRQEDFYPFLKDNREKIEKILTFRIPYYVGPLARGNSRFAWMTRKSEETITPWNFEEVVDKGASAQSFIERMTNFDKNLPNEKVLPKHSLLYEYFTVYNELTKVKYVTEGMRKPAFLSGEQKKAIVDLLFKTNRKVTVKQLKEDYFKKIECFDSVEISGVEDRFNASLGTYHDLLKIIKDKDFLDNEENEDILEDIVLTLTLFEDREMIEERLKTYAHLFDDKVMKQLKRRRYTGWGRLSRKLINGIRDKQSGKTILDFLKSDGFANRNFMQLIHDDSLTFKEDIQKAQVSGQGDSLHEHIANLAGSPAIKKGILQTVKVVDELVKVMGRHKPENIVIEMARENQTTQKGQKNSRERMKRIEEGIKELGSQILKEHPVENTQLQNEKLYLYYLQNGRDMYVDQELDINRLSDYDVDHIVPQSFLKDDSIDNKVLTRSDKARGKSDNVPSEEVVKKMKNYWRQLLNAKLITQRKFDNLTKAERGGLSELDKAGFIKRQLVETRQITKHVAQILDSRMNTKYDENDKLIREVKVITLKSKLVSDFRKDFQFYKVREINNYHHAHDAYLNAVVGTALIKKYPKLESEFVYGDYKVYDVRKMIAKSEQEIGKATAKYFFYSNIMNFFKTEITLANGEIRKRPLIETNGETGEIVWDKGRDFATVRKVLSMPQVNIVKKTEVQTGGFSKESILPKRNSDKLIARKKDWDPKKYGGFDSPTVAYSVLVVAKVEKGKSKKLKSVKELLGITIMERSSFEKNPIDFLEAKGYKEVKKDLIIKLPKYSLFELENGRKRMLASAGELQKGNELALPSKYVNFLYLASHYEKLKGSPEDNEQKQLFVEQHKHYLDEIIEQISEFSKRVILADANLDKVLSAYNKHRDKPIREQAENIIHLFTLTNLGAPAAFKYFDTTIDRKRYTSTKEVLDATLIHQSITGLYETRIDLSQLGGDGGGSSGSSGSSGSSGSSGSSGGVPWLTQQPLQLTILVPLQEYQEKILSKTALPEDQKQQLKTLFVKYDNLWQHWENQVGHRKIRPHNIATGDYPPRPQKQYPINPKAKPSIQIVIDDLLKQGVLTPQNSTMNTPVYPVPKPDGRWRMVLDYREVNKTIPLTAAQNQHSAGILATIVRQKYKTTLDLANGFWAHPITPESYWLTAFTWQGKQYCWTRLPQGFLNSPALFTADVVDLLKEIPNVQVYVDDIYLSHDDPKEHVQQLEKVFQILLQAGYVVSLKKSEIGQKTVEFLGFNITKEGRGLTDTFKTKLLNITPPKDLKQLQSILGLLNFARNFIPNFAELVQPLYNLIASAKGKYIEWSEENTKQLNMVIEALNTASNLEERLPEQRLVIKVNTSPSAGYVRYYNETGKKPIMYLNYVFSKAELKFSMLEKLLTTMHKALIKAMDLAMGQEILVYSPIVSMTKIQKTPLPERKALPIRWITWMTYLEDPRIQFHYDKTLPELKHIPDVYTSSQSPVKHPSQYEGVFYTDGSAIKSPDPTKSNNAGMGIVHATYKPEYQVLNQWSIPLGNHTAQMAEIAAVEFACKKALKIPGPVLVITDSFYVAESANKELPYWKSNGFVNNKKKPLKHISKWKSIAECLSMKPDITIQHEKGISLQIPVFILKGNALADKLATQGSYVVNAGKRTADGSEFEKRTADGSEFESPKKKAKVE

SEQ ID NO: 1298 - protein, 2122 aa, synthetic construct
MPAAKRVKLDGGDKKYSIGLDIGTNSVGWAVITDEYKVPSKKFKVLGNTDRHSIKKNLIGALLFDSGETAEATRLKRTARRRYTRRKNRICYLQEIFSNEMAKVDDSFFHRLEESFLVEEDKKHERHPIFGNIVDEVAYHEKYPTIYHLRKKLVDSTDKADLRLIYLALAHMIKFRGHFLIEGDLNPDNSDVDKLFIQLVQTYNQLFEENPINASGVDAKAILSARLSKSRRLENLIAQLPGEKKNGLFGNLIALSLGLTPNFKSNFDLAEDAKLQLSKDTYDDDLDNLLAQIGDQYADLFLAAKNLSDAILLSDILRVNTEITKAPLSASMIKRYDEHHQDLTLLKALVRQQLPEKYKEIFFDQSKNGYAGYIDGGASQEEFYKFIKPILEKMDGTEELLVKLNREDLLRKQRTFDNGSIPHQIHLGELHAILRRQEDFYPFLKDNREKIEKILTFRIPYYVGPLARGNSRFAWMTRKSEETITPWNFEEVVDKGASAQSFIERMTNFDKNLPNEKVLPKHSLLYEYFTVYNELTKVKYVTEGMRKPAFLSGEQKKAIVDLLFKTNRKVTVKQLKEDYFKKIECFDSVEISGVEDRFNASLGTYHDLLKIIKDKDFLDNEENEDILEDIVLTLTLFEDREMIEERLKTYAHLFDDKVMKQLKRRRYTGWGRLSRKLINGIRDKQSGKTILDFLKSDGFANRNFMQLIHDDSLTFKEDIQKAQVSGQGDSLHEHIANLAGSPAIKKGILQTVKVVDELVKVMGRHKPENIVIEMARENQTTQKGQKNSRERMKRIEEGIKELGSQILKEHPVENTQLQNEKLYLYYLQNGRDMYVDQELDINRLSDYDVDHIVPQSFLKDDSIDNKVLTRSDKARGKSDNVPSEEVVKKMKNYWRQLLNAKLITQRKFDNLTKAERGGLSELDKAGFIKRQLVETRQITKHVAQILDSRMNTKYDENDKLIREVKVITLKSKLVSDFRKDFQFYKVREINNYHHAHDAYLNAVVGTALIKKYPKLESEFVYGDYKVYDVRKMIAKSEQEIGKATAKYFFYSNIMNFFKTEITLANGEIRKRPLIETNGETGEIVWDKGRDFATVRKVLSMPQVNIVKKTEVQTGGFSKESILPKRNSDKLIARKKDWDPKKYGGFDSPTVAYSVLVVAKVEKGKSKKLKSVKELLGITIMERSSFEKNPIDFLEAKGYKEVKKDLIIKLPKYSLFELENGRKRMLASAGELQKGNELALPSKYVNFLYLASHYEKLKGSPEDNEQKQLFVEQHKHYLDEIIEQISEFSKRVILADANLDKVLSAYNKHRDKPIREQAENIIHLFTLTNLGAPAAFKYFDTTIDRKRYTSTKEVLDATLIHQSITGLYETRIDLSQLGGDGGAEAAAKEAAAKEAAAKEAAAKALEAEAAAKEAAAKEAAAKEAAAKAGGVPWLTQQPLQLTILVPLQEYQEKILSKTALPEDQKQQLKTLFVKYDNLWQHWENQVGHRKIRPHNIATGDYPPRPQKQYPINPKAKPSIQIVIDDLLKQGVLTPQNSTMNTPVYPVPKPDGRWRMVLDYREVNKTIPLTAAQNQHSAGILATIVRQKYKTTLDLANGFWAHPITPESYWLTAFTWQGKQYCWTRLPQGFLNSPALFNADVVDLLKEIPNVQVYVDDIYLSHDDPKEHVQQLEKVFQILLQAGYVVSLKKSEIGQKTVEFLGFNITKEGRGLTDTFKTKLLNITPPKDLKQLQSILGLLNFARNFIPNFAELVQPLYNLIAPAKGKYIEWSEENTKQLNMVIEALNTASNLEERLPEQRLVIKVNTSPSAGYVRYYNETGKKPIMYLNYVFSKAELKFSMLEKLLTTMHKALIKAMDLAMGQEILVYSPIVSMTKIQKTPLPERKALPIRWITWMTYLEDPRIQFHYDKTLPELKHIPDVYTSSQSPVKHPSQYEGVFYTDGSAIKSPDPTKSNNAGMGIVHATYKPEYQVLNQWSIPLGNHTAQMAEIAAVEFACKKALKIPGPVLVITDSFYVAESANKELPYWKSNGFVNNKKKPLKHISKWKSIAECLSMKPDITIQHEKGISLQIPVFILKGNALADKLATQGSYVVNAGKRTADGSEFEKRTADGSEFESPKKKAKVE

SEQ ID NO: 1299 - protein, 2096 aa, synthetic construct
MPAAKRVKLDGGDKKYSIGLDIGTNSVGWAVITDEYKVPSKKFKVLGNTDRHSIKKNLIGALLFDSGETAEATRLKRTARRRYTRRKNRICYLQEIFSNEMAKVDDSFFHRLEESFLVEEDKKHERHPIFGNIVDEVAYHEKYPTIYHLRKKLVDSTDKADLRLIYLALAHMIKFRGHFLIEGDLNPDNSDVDKLFIQLVQTYNQLFEENPINASGVDAKAILSARLSKSRRLENLIAQLPGEKKNGLFGNLIALSLGLTPNFKSNFDLAEDAKLQLSKDTYDDDLDNLLAQIGDQYADLFLAAKNLSDAILLSDILRVNTEITKAPLSASMIKRYDEHHQDLTLLKALVRQQLPEKYKEIFFDQSKNGYAGYIDGGASQEEFYKFIKPILEKMDGTEELLVKLNREDLLRKQRTFDNGSIPHQIHLGELHAILRRQEDFYPFLKDNREKIEKILTFRIPYYVGPLARGNSRFAWMTRKSEETITPWNFEEVVDKGASAQSFIERMTNFDKNLPNEKVLPKHSLLYEYFTVYNELTKVKYVTEGMRKPAFLSGEQKKAIVDLLFKTNRKVTVKQLKEDYFKKIECFDSVEISGVEDRFNASLGTYHDLLKIIKDKDFLDNEENEDILEDIVLTLTLFEDREMIEERLKTYAHLFDDKVMKQLKRRRYTGWGRLSRKLINGIRDKQSGKTILDFLKSDGFANRNFMQLIHDDSLTFKEDIQKAQVSGQGDSLHEHIANLAGSPAIKKGILQTVKVVDELVKVMGRHKPENIVIEMARENQTTQKGQKNSRERMKRIEEGIKELGSQILKEHPVENTQLQNEKLYLYYLQNGRDMYVDQELDINRLSDYDVDHIVPQSFLKDDSIDNKVLTRSDKARGKSDNVPSEEVVKKMKNYWRQLLNAKLITQRKFDNLTKAERGGLSELDKAGFIKRQLVETRQITKHVAQILDSRMNTKYDENDKLIREVKVITLKSKLVSDFRKDFQFYKVREINNYHHAHDAYLNAVVGTALIKKYPKLESEFVYGDYKVYDVRKMIAKSEQEIGKATAKYFFYSNIMNFFKTEITLANGEIRKRPLIETNGETGEIVWDKGRDFATVRKVLSMPQVNIVKKTEVQTGGFSKESILPKRNSDKLIARKKDWDPKKYGGFDSPTVAYSVLVVAKVEKGKSKKLKSVKELLGITIMERSSFEKNPIDFLEAKGYKEVKKDLIIKLPKYSLFELENGRKRMLASAGELQKGNELALPSKYVNFLYLASHYEKLKGSPEDNEQKQLFVEQHKHYLDEIIEQISEFSKRVILADANLDKVLSAYNKHRDKPIREQAENIIHLFTLTNLGAPAAFKYFDTTIDRKRYTSTKEVLDATLIHQSITGLYETRIDLSQLGGDGGGGGGSGGGGSGGGGSGGGGSGGVPWLTQQPLQLTILVPLQEYQEKILSKTALPEDQKQQLKTLFVKYDNLWQHWENQVGHRKIRPHNIATGDYPPRPQKQYPINPKAKPSIQIVIDDLLKQGVLTPQNSTMNTPVYPVPKPDGRWRMVLDYREVNKTIPLTAAQNQHSAGILATIVRQKYKTTLDLANGFWAHPITPESYWLTAFTWQGKQYCWTRLPQGFLNSPALFNADVVDLLKEIPNVQVYVDDIYLSHDDPKEHVQQLEKVFQILLQAGYVVSLKKSEIGQKTVEFLGFNITKEGRGLTDTFKTKLLNITPPKDLKQLQSILGLLNFARNFIPNFAELVQPLYNLIAPAKGKYIEWSEENTKQLNMVIEALNTASNLEERLPEQRLVIKVNTSPSAGYVRYYNETGKKPIMYLNYVFSKAELKFSMLEKLLTTMHKALIKAMDLAMGQEILVYSPIVSMTKIQKTPLPERKALPIRWITWMTYLEDPRIQFHYDKTLPELKHIPDVYTSSQSPVKHPSQYEGVFYTDGSAIKSPDPTKSNNAGMGIVHATYKPEYQVLNQWSIPLGNHTAQMAEIAAVEFACKKALKIPGPVLVITDSFYVAESANKELPYWKSNGFVNNKKKPLKHISKWKSIAECLSMKPDITIQHEKGISLQIPVFILKGNALADKLATQGSYVVNAGKRTADGSEFEKRTADGSEFESPKKKAKVE

SEQ ID NO: 1300 - protein, 2096 aa, synthetic construct
MPAAKRVKLDGGDKKYSIGLDIGTNSVGWAVITDEYKVPSKKFKVLGNTDRHSIKKNLIGALLFDSGETAEATRLKRTARRRYTRRKNRICYLQEIFSNEMAKVDDSFFHRLEESFLVEEDKKHERHPIFGNIVDEVAYHEKYPTIYHLRKKLVDSTDKADLRLIYLALAHMIKFRGHFLIEGDLNPDNSDVDKLFIQLVQTYNQLFEENPINASGVDAKAILSARLSKSRRLENLIAQLPGEKKNGLFGNLIALSLGLTPNFKSNFDLAEDAKLQLSKDTYDDDLDNLLAQIGDQYADLFLAAKNLSDAILLSDILRVNTEITKAPLSASMIKRYDEHHQDLTLLKALVRQQLPEKYKEIFFDQSKNGYAGYIDGGASQEEFYKFIKPILEKMDGTEELLVKLNREDLLRKQRTFDNGSIPHQIHLGELHAILRRQEDFYPFLKDNREKIEKILTFRIPYYVGPLARGNSRFAWMTRKSEETITPWNFEEVVDKGASAQSFIERMTNFDKNLPNEKVLPKHSLLYEYFTVYNELTKVKYVTEGMRKPAFLSGEQKKAIVDLLFKTNRKVTVKQLKEDYFKKIECFDSVEISGVEDRFNASLGTYHDLLKIIKDKDFLDNEENEDILEDIVLTLTLFEDREMIEERLKTYAHLFDDKVMKQLKRRRYTGWGRLSRKLINGIRDKQSGKTILDFLKSDGFANRNFMQLIHDDSLTFKEDIQKAQVSGQGDSLHEHIANLAGSPAIKKGILQTVKVVDELVKVMGRHKPENIVIEMARENQTTQKGQKNSRERMKRIEEGIKELGSQILKEHPVENTQLQNEKLYLYYLQNGRDMYVDQELDINRLSDYDVDHIVPQSFLKDDSIDNKVLTRSDKARGKSDNVPSEEVVKKMKNYWRQLLNAKLITQRKFDNLTKAERGGLSELDKAGFIKRQLVETRQITKHVAQILDSRMNTKYDENDKLIREVKVITLKSKLVSDFRKDFQFYKVREINNYHHAHDAYLNAVVGTALIKKYPKLESEFVYGDYKVYDVRKMIAKSEQEIGKATAKYFFYSNIMNFFKTEITLANGEIRKRPLIETNGETGEIVWDKGRDFATVRKVLSMPQVNIVKKTEVQTGGFSKESILPKRNSDKLIARKKDWDPKKYGGFDSPTVAYSVLVVAKVEKGKSKKLKSVKELLGITIMERSSFEKNPIDFLEAKGYKEVKKDLIIKLPKYSLFELENGRKRMLASAGELQKGNELALPSKYVNFLYLASHYEKLKGSPEDNEQKQLFVEQHKHYLDEIIEQISEFSKRVILADANLDKVLSAYNKHRDKPIREQAENIIHLFTLTNLGAPAAFKYFDTTIDRKRYTSTKEVLDATLIHQSITGLYETRIDLSQLGGDGGEAAAKEAAAKEAAAKEAAAKGGVPWLTQQPLQLTILVPLQEYQEKILSKTALPEDQKQQLKTLFVKYDNLWQHWENQVGHRKIRPHNIATGDYPPRPQKQYPINPKAKPSIQIVIDDLLKQGVLTPQNSTMNTPVYPVPKPDGRWRMVLDYREVNKTIPLTAAQNQHSAGILATIVRQKYKTTLDLANGFWAHPITPESYWLTAFTWQGKQYCWTRLPQGFLNSPALFNADVVDLLKEIPNVQVYVDDIYLSHDDPKEHVQQLEKVFQILLQAGYVVSLKKSEIGQKTVEFLGFNITKEGRGLTDTFKTKLLNITPPKDLKQLQSILGLLNFARNFIPNFAELVQPLYNLIAPAKGKYIEWSEENTKQLNMVIEALNTASNLEERLPEQRLVIKVNTSPSAGYVRYYNETGKKPIMYLNYVFSKAELKFSMLEKLLTTMHKALIKAMDLAMGQEILVYSPIVSMTKIQKTPLPERKALPIRWITWMTYLEDPRIQFHYDKTLPELKHIPDVYTSSQSPVKHPSQYEGVFYTDGSAIKSPDPTKSNNAGMGIVHATYKPEYQVLNQWSIPLGNHTAQMAEIAAVEFACKKALKIPGPVLVITDSFYVAESANKELPYWKSNGFVNNKKKPLKHISKWKSIAECLSMKPDITIQHEKGISLQIPVFILKGNALADKLATQGSYVVNAGKRTADGSEFEKRTADGSEFESPKKKAKVE

SEQ ID NO: 1301 - protein, 2084 aa, synthetic construct
MPAAKRVKLDGGDKKYSIGLDIGTNSVGWAVITDEYKVPSKKFKVLGNTDRHSIKKNLIGALLFDSGETAEATRLKRTARRRYTRRKNRICYLQEIFSNEMAKVDDSFFHRLEESFLVEEDKKHERHPIFGNIVDEVAYHEKYPTIYHLRKKLVDSTDKADLRLIYLALAHMIKFRGHFLIEGDLNPDNSDVDKLFIQLVQTYNQLFEENPINASGVDAKAILSARLSKSRRLENLIAQLPGEKKNGLFGNLIALSLGLTPNFKSNFDLAEDAKLQLSKDTYDDDLDNLLAQIGDQYADLFLAAKNLSDAILLSDILRVNTEITKAPLSASMIKRYDEHHQDLTLLKALVRQQLPEKYKEIFFDQSKNGYAGYIDGGASQEEFYKFIKPILEKMDGTEELLVKLNREDLLRKQRTFDNGSIPHQIHLGELHAILRRQEDFYPFLKDNREKIEKILTFRIPYYVGPLARGNSRFAWMTRKSEETITPWNFEEVVDKGASAQSFIERMTNFDKNLPNEKVLPKHSLLYEYFTVYNELTKVKYVTEGMRKPAFLSGEQKKAIVDLLFKTNRKVTVKQLKEDYFKKIECFDSVEISGVEDRFNASLGTYHDLLKIIKDKDFLDNEENEDILEDIVLTLTLFEDREMIEERLKTYAHLFDDKVMKQLKRRRYTGWGRLSRKLINGIRDKQSGKTILDFLKSDGFANRNFMQLIHDDSLTFKEDIQKAQVSGQGDSLHEHIANLAGSPAIKKGILQTVKVVDELVKVMGRHKPENIVIEMARENQTTQKGQKNSRERMKRIEEGIKELGSQILKEHPVENTQLQNEKLYLYYLQNGRDMYVDQELDINRLSDYDVDHIVPQSFLKDDSIDNKVLTRSDKARGKSDNVPSEEVVKKMKNYWRQLLNAKLITQRKFDNLTKAERGGLSELDKAGFIKRQLVETRQITKHVAQILDSRMNTKYDENDKLIREVKVITLKSKLVSDFRKDFQFYKVREINNYHHAHDAYLNAVVGTALIKKYPKLESEFVYGDYKVYDVRKMIAKSEQEIGKATAKYFFYSNIMNFFKTEITLANGEIRKRPLIETNGETGEIVWDKGRDFATVRKVLSMPQVNIVKKTEVQTGGFSKESILPKRNSDKLIARKKDWDPKKYGGFDSPTVAYSVLVVAKVEKGKSKKLKSVKELLGITIMERSSFEKNPIDFLEAKGYKEVKKDLIIKLPKYSLFELENGRKRMLASAGELQKGNELALPSKYVNFLYLASHYEKLKGSPEDNEQKQLFVEQHKHYLDEIIEQISEFSKRVILADANLDKVLSAYNKHRDKPIREQAENIIHLFTLTNLGAPAAFKYFDTTIDRKRYTSTKEVLDATLIHQSITGLYETRIDLSQLGGDGGEAAAKPAPGGVPWLTQQPLQLTILVPLQEYQEKILSKTALPEDQKQQLKTLFVKYDNLWQHWENQVGHRKIRPHNIATGDYPPRPQKQYPINPKAKPSIQIVIDDLLKQGVLTPQNSTMNTPVYPVPKPDGRWRMVLDYREVNKTIPLTAAQNQHSAGILATIVRQKYKTTLDLANGFWAHPITPESYWLTAFTWQGKQYCWTRLPQGFLNSPALFNADVVDLLKEIPNVQVYVDDIYLSHDDPKEHVQQLEKVFQILLQAGYVVSLKKSEIGQKTVEFLGFNITKEGRGLTDTFKTKLLNITPPKDLKQLQSILGLLNFARNFIPNFAELVQPLYNLIAPAKGKYIEWSEENTKQLNMVIEALNTASNLEERLPEQRLVIKVNTSPSAGYVRYYNETGKKPIMYLNYVFSKAELKFSMLEKLLTTMHKALIKAMDLAMGQEILVYSPIVSMTKIQKTPLPERKALPIRWITWMTYLEDPRIQFHYDKTLPELKHIPDVYTSSQSPVKHPSQYEGVFYTDGSAIKSPDPTKSNNAGMGIVHATYKPEYQVLNQWSIPLGNHTAQMAEIAAVEFACKKALKIPGPVLVITDSFYVAESANKELPYWKSNGFVNNKKKPLKHISKWKSIAECLSMKPDITIQHEKGISLQIPVFILKGNALADKLATQGSYVVNAGKRTADGSEFEKRTADGSEFESPKKKAKVE

SEQ ID NO: 1302 - protein, 2087 aa, synthetic construct
MPAAKRVKLDGGDKKYSIGLDIGTNSVGWAVITDEYKVPSKKFKVLGNTDRHSIKKNLIGALLFDSGETAEATRLKRTARRRYTRRKNRICYLQEIFSNEMAKVDDSFFHRLEESFLVEEDKKHERHPIFGNIVDEVAYHEKYPTIYHLRKKLVDSTDKADLRLIYLALAHMIKFRGHFLIEGDLNPDNSDVDKLFIQLVQTYNQLFEENPINASGVDAKAILSARLSKSRRLENLIAQLPGEKKNGLFGNLIALSLGLTPNFKSNFDLAEDAKLQLSKDTYDDDLDNLLAQIGDQYADLFLAAKNLSDAILLSDILRVNTEITKAPLSASMIKRYDEHHQDLTLLKALVRQQLPEKYKEIFFDQSKNGYAGYIDGGASQEEFYKFIKPILEKMDGTEELLVKLNREDLLRKQRTFDNGSIPHQIHLGELHAILRRQEDFYPFLKDNREKIEKILTFRIPYYVGPLARGNSRFAWMTRKSEETITPWNFEEVVDKGASAQSFIERMTNFDKNLPNEKVLPKHSLLYEYFTVYNELTKVKYVTEGMRKPAFLSGEQKKAIVDLLFKTNRKVTVKQLKEDYFKKIECFDSVEISGVEDRFNASLGTYHDLLKIIKDKDFLDNEENEDILEDIVLTLTLFEDREMIEERLKTYAHLFDDKVMKQLKRRRYTGWGRLSRKLINGIRDKQSGKTILDFLKSDGFANRNFMQLIHDDSLTFKEDIQKAQVSGQGDSLHEHIANLAGSPAIKKGILQTVKVVDELVKVMGRHKPENIVIEMARENQTTQKGQKNSRERMKRIEEGIKELGSQILKEHPVENTQLQNEKLYLYYLQNGRDMYVDQELDINRLSDYDVDHIVPQSFLKDDSIDNKVLTRSDKARGKSDNVPSEEVVKKMKNYWRQLLNAKLITQRKFDNLTKAERGGLSELDKAGFIKRQLVETRQITKHVAQILDSRMNTKYDENDKLIREVKVITLKSKLVSDFRKDFQFYKVREINNYHHAHDAYLNAVVGTALIKKYPKLESEFVYGDYKVYDVRKMIAKSEQEIGKATAKYFFYSNIMNFFKTEITLANGEIRKRPLIETNGETGEIVWDKGRDFATVRKVLSMPQVNIVKKTEVQTGGFSKESILPKRNSDKLIARKKDWDPKKYGGFDSPTVAYSVLVVAKVEKGKSKKLKSVKELLGITIMERSSFEKNPIDFLEAKGYKEVKKDLIIKLPKYSLFELENGRKRMLASAGELQKGNELALPSKYVNFLYLASHYEKLKGSPEDNEQKQLFVEQHKHYLDEIIEQISEFSKRVILADANLDKVLSAYNKHRDKPIREQAENIIHLFTLTNLGAPAAFKYFDTTIDRKRYTSTKEVLDATLIHQSITGLYETRIDLSQLGGDGGPAPGSSEAAAKGGVPWLTQQPLQLTILVPLQEYQEKILSKTALPEDQKQQLKTLFVKYDNLWQHWENQVGHRKIRPHNIATGDYPPRPQKQYPINPKAKPSIQIVIDDLLKQGVLTPQNSTMNTPVYPVPKPDGRWRMVLDYREVNKTIPLTAAQNQHSAGILATIVRQKYKTTLDLANGFWAHPITPESYWLTAFTWQGKQYCWTRLPQGFLNSPALFNADVVDLLKEIPNVQVYVDDIYLSHDDPKEHVQQLEKVFQILLQAGYVVSLKKSEIGQKTVEFLGFNITKEGRGLTDTFKTKLLNITPPKDLKQLQSILGLLNFARNFIPNFAELVQPLYNLIAPAKGKYIEWSEENTKQLNMVIEALNTASNLEERLPEQRLVIKVNTSPSAGYVRYYNETGKKPIMYLNYVFSKAELKFSMLEKLLTTMHKALIKAMDLAMGQEILVYSPIVSMTKIQKTPLPERKALPIRWITWMTYLEDPRIQFHYDKTLPELKHIPDVYTSSQSPVKHPSQYEGVFYTDGSAIKSPDPTKSNNAGMGIVHATYKPEYQVLNQWSIPLGNHTAQMAEIAAVEFACKKALKIPGPVLVITDSFYVAESANKELPYWKSNGFVNNKKKPLKHISKWKSIAECLSMKPDITIQHEKGISLQIPVFILKGNALADKLATQGSYVVNAGKRTADGSEFEKRTADGSEFESPKKKAKVE

SEQ ID NO: 1303 - protein, 2091 aa, synthetic construct
MPAAKRVKLDGGDKKYSIGLDIGTNSVGWAVITDEYKVPSKKFKVLGNTDRHSIKKNLIGALLFDSGETAEATRLKRTARRRYTRRKNRICYLQEIFSNEMAKVDDSFFHRLEESFLVEEDKKHERHPIFGNIVDEVAYHEKYPTIYHLRKKLVDSTDKADLRLIYLALAHMIKFRGHFLIEGDLNPDNSDVDKLFIQLVQTYNQLFEENPINASGVDAKAILSARLSKSRRLENLIAQLPGEKKNGLFGNLIALSLGLTPNFKSNFDLAEDAKLQLSKDTYDDDLDNLLAQIGDQYADLFLAAKNLSDAILLSDILRVNTEITKAPLSASMIKRYDEHHQDLTLLKALVRQQLPEKYKEIFFDQSKNGYAGYIDGGASQEEFYKFIKPILEKMDGTEELLVKLNREDLLRKQRTFDNGSIPHQIHLGELHAILRRQEDFYPFLKDNREKIEKILTFRIPYYVGPLARGNSRFAWMTRKSEETITPWNFEEVVDKGASAQSFIERMTNFDKNLPNEKVLPKHSLLYEYFTVYNELTKVKYVTEGMRKPAFLSGEQKKAIVDLLFKTNRKVTVKQLKEDYFKKIECFDSVEISGVEDRFNASLGTYHDLLKIIKDKDFLDNEENEDILEDIVLTLTLFEDREMIEERLKTYAHLFDDKVMKQLKRRRYTGWGRLSRKLINGIRDKQSGKTILDFLKSDGFANRNFMQLIHDDSLTFKEDIQKAQVSGQGDSLHEHIANLAGSPAIKKGILQTVKVVDELVKVMGRHKPENIVIEMARENQTTQKGQKNSRERMKRIEEGIKELGSQILKEHPVENTQLQNEKLYLYYLQNGRDMYVDQELDINRLSDYDVDHIVPQSFLKDDSIDNKVLTRSDKARGKSDNVPSEEVVKKMKNYWRQLLNAKLITQRKFDNLTKAERGGLSELDKAGFIKRQLVETRQITKHVAQILDSRMNTKYDENDKLIREVKVITLKSKLVSDFRKDFQFYKVREINNYHHAHDAYLNAVVGTALIKKYPKLESEFVYGDYKVYDVRKMIAKSEQEIGKATAKYFFYSNIMNFFKTEITLANGEIRKRPLIETNGETGEIVWDKGRDFATVRKVLSMPQVNIVKKTEVQTGGFSKESILPKRNSDKLIARKKDWDPKKYGGFDSPTVAYSVLVVAKVEKGKSKKLKSVKELLGITIMERSSFEKNPIDFLEAKGYKEVKKDLIIKLPKYSLFELENGRKRMLASAGELQKGNELALPSKYVNFLYLASHYEKLKGSPEDNEQKQLFVEQHKHYLDEIIEQISEFSKRVILADANLDKVLSAYNKHRDKPIREQAENIIHLFTLTNLGAPAAFKYFDTTIDRKRYTSTKEVLDATLIHQSITGLYETRIDLSQLGGDGGGSSGSSGSSGSSGSSGGVPWLTQQPLQLTILVPLQEYQEKILSKTALPEDQKQQLKTLFVKYDNLWQHWENQVGHRKIRPHNIATGDYPPRPQKQYPINPKAKPSIQIVIDDLLKQGVLTPQNSTMNTPVYPVPKPDGRWRMVLDYREVNKTIPLTAAQNQHSAGILATIVRQKYKTTLDLANGFWAHPITPESYWLTAFTWQGKQYCWTRLPQGFLNSPALFNADVVDLLKEIPNVQVYVDDIYLSHDDPKEHVQQLEKVFQILLQAGYVVSLKKSEIGQKTVEFLGFNITKEGRGLTDTFKTKLLNITPPKDLKQLQSILGLLNFARNFIPNFAELVQPLYNLIAPAKGKYIEWSEENTKQLNMVIEALNTASNLEERLPEQRLVIKVNTSPSAGYVRYYNETGKKPIMYLNYVFSKAELKFSMLEKLLTTMHKALIKAMDLAMGQEILVYSPIVSMTKIQKTPLPERKALPIRWITWMTYLEDPRIQFHYDKTLPELKHIPDVYTSSQSPVKHPSQYEGVFYTDGSAIKSPDPTKSNNAGMGIVHATYKPEYQVLNQWSIPLGNHTAQMAEIAAVEFACKKALKIPGPVLVITDSFYVAESANKELPYWKSNGFVNNKKKPLKHISKWKSIAECLSMKPDITIQHEKGISLQIPVFILKGNALADKLATQGSYVVNAGKRTADGSEFEKRTADGSEFESPKKKAKVE

SEQ ID NO: 1304 - protein, 2085 aa, synthetic construct
MPAAKRVKLDGGDKKYSIGLDIGTNSVGWAVITDEYKVPSKKFKVLGNTDRHSIKKNLIGALLFDSGETAEATRLKRTARRRYTRRKNRICYLQEIFSNEMAKVDDSFFHRLEESFLVEEDKKHERHPIFGNIVDEVAYHEKYPTIYHLRKKLVDSTDKADLRLIYLALAHMIKFRGHFLIEGDLNPDNSDVDKLFIQLVQTYNQLFEENPINASGVDAKAILSARLSKSRRLENLIAQLPGEKKNGLFGNLIALSLGLTPNFKSNFDLAEDAKLQLSKDTYDDDLDNLLAQIGDQYADLFLAAKNLSDAILLSDILRVNTEITKAPLSASMIKRYDEHHQDLTLLKALVRQQLPEKYKEIFFDQSKNGYAGYIDGGASQEEFYKFIKPILEKMDGTEELLVKLNREDLLRKQRTFDNGSIPHQIHLGELHAILRRQEDFYPFLKDNREKIEKILTFRIPYYVGPLARGNSRFAWMTRKSEETITPWNFEEVVDKGASAQSFIERMTNFDKNLPNEKVLPKHSLLYEYFTVYNELTKVKYVTEGMRKPAFLSGEQKKAIVDLLFKTNRKVTVKQLKEDYFKKIECFDSVEISGVEDRFNASLGTYHDLLKIIKDKDFLDNEENEDILEDIVLTLTLFEDREMIEERLKTYAHLFDDKVMKQLKRRRYTGWGRLSRKLINGIRDKQSGKTILDFLKSDGFANRNFMQLIHDDSLTFKEDIQKAQVSGQGDSLHEHIANLAGSPAIKKGILQTVKVVDELVKVMGRHKPENIVIEMARENQTTQKGQKNSRERMKRIEEGIKELGSQILKEHPVENTQLQNEKLYLYYLQNGRDMYVDQELDINRLSDYDVDHIVPQSFLKDDSIDNKVLTRSDKARGKSDNVPSEEVVKKMKNYWRQLLNAKLITQRKFDNLTKAERGGLSELDKAGFIKRQLVETRQITKHVAQILDSRMNTKYDENDKLIREVKVITLKSKLVSDFRKDFQFYKVREINNYHHAHDAYLNAVVGTALIKKYPKLESEFVYGDYKVYDVRKMIAKSEQEIGKATAKYFFYSNIMNFFKTEITLANGEIRKRPLIETNGETGEIVWDKGRDFATVRKVLSMPQVNIVKKTEVQTGGFSKESILPKRNSDKLIARKKDWDPKKYGGFDSPTVAYSVLVVAKVEKGKSKKLKSVKELLGITIMERSSFEKNPIDFLEAKGYKEVKKDLIIKLPKYSLFELENGRKRMLASAGELQKGNELALPSKYVNFLYLASHYEKLKGSPEDNEQKQLFVEQHKHYLDEIIEQISEFSKRVILADANLDKVLSAYNKHRDKPIREQAENIIHLFTLTNLGAPAAFKYFDTTIDRKRYTSTKEVLDATLIHQSITGLYETRIDLSQLGGDGGGGSGGSGGSGGVPWLTQQPLQLTILVPLQEYQEKILSKTALPEDQKQQLKTLFVKYDNLWQHWENQVGHRKIRPHNIATGDYPPRPQKQYPINPKAKPSIQIVIDDLLKQGVLTPQNSTMNTPVYPVPKPDGRWRMVLDYREVNKTIPLTAAQNQHSAGILATIVRQKYKTTLDLANGFWAHPITPESYWLTAFTWQGKQYCWTRLPQGFLNSPALFNADVVDLLKEIPNVQVYVDDIYLSHDDPKEHVQQLEKVFQILLQAGYVVSLKKSEIGQKTVEFLGFNITKEGRGLTDTFKTKLLNITPPKDLKQLQSILGLLNFARNFIPNFAELVQPLYNLIAPAKGKYIEWSEENTKQLNMVIEALNTASNLEERLPEQRLVIKVNTSPSAGYVRYYNETGKKPIMYLNYVFSKAELKFSMLEKLLTTMHKALIKAMDLAMGQEILVYSPIVSMTKIQKTPLPERKALPIRWITWMTYLEDPRIQFHYDKTLPELKHIPDVYTSSQSPVKHPSQYEGVFYTDGSAIKSPDPTKSNNAGMGIVHATYKPEYQVLNQWSIPLGNHTAQMAEIAAVEFACKKALKIPGPVLVITDSFYVAESANKELPYWKSNGFVNNKKKPLKHISKWKSIAECLSMKPDITIQHEKGISLQIPVFILKGNALADKLATQGSYVVNAGKRTADGSEFEKRTADGSEFESPKKKAKVE

SEQ ID NO: 1305 - protein, 2085 aa, synthetic construct
MPAAKRVKLDGGDKKYSIGLDIGTNSVGWAVITDEYKVPSKKFKVLGNTDRHSIKKNLIGALLFDSGETAEATRLKRTARRRYTRRKNRICYLQEIFSNEMAKVDDSFFHRLEESFLVEEDKKHERHPIFGNIVDEVAYHEKYPTIYHLRKKLVDSTDKADLRLIYLALAHMIKFRGHFLIEGDLNPDNSDVDKLFIQLVQTYNQLFEENPINASGVDAKAILSARLSKSRRLENLIAQLPGEKKNGLFGNLIALSLGLTPNFKSNFDLAEDAKLQLSKDTYDDDLDNLLAQIGDQYADLFLAAKNLSDAILLSDILRVNTEITKAPLSASMIKRYDEHHQDLTLLKALVRQQLPEKYKEIFFDQSKNGYAGYIDGGASQEEFYKFIKPILEKMDGTEELLVKLNREDLLRKQRTFDNGSIPHQIHLGELHAILRRQEDFYPFLKDNREKIEKILTFRIPYYVGPLARGNSRFAWMTRKSEETITPWNFEEVVDKGASAQSFIERMTNFDKNLPNEKVLPKHSLLYEYFTVYNELTKVKYVTEGMRKPAFLSGEQKKAIVDLLFKTNRKVTVKQLKEDYFKKIECFDSVEISGVEDRFNASLGTYHDLLKIIKDKDFLDNEENEDILEDIVLTLTLFEDREMIEERLKTYAHLFDDKVMKQLKRRRYTGWGRLSRKLINGIRDKQSGKTILDFLKSDGFANRNFMQLIHDDSLTFKEDIQKAQVSGQGDSLHEHIANLAGSPAIKKGILQTVKVVDELVKVMGRHKPENIVIEMARENQTTQKGQKNSRERMKRIEEGIKELGSQILKEHPVENTQLQNEKLYLYYLQNGRDMYVDQELDINRLSDYDVDHIVPQSFLKDDSIDNKVLTRSDKARGKSDNVPSEEVVKKMKNYWRQLLNAKLITQRKFDNLTKAERGGLSELDKAGFIKRQLVETRQITKHVAQILDSRMNTKYDENDKLIREVKVITLKSKLVSDFRKDFQFYKVREINNYHHAHDAYLNAVVGTALIKKYPKLESEFVYGDYKVYDVRKMIAKSEQEIGKATAKYFFYSNIMNFFKTEITLANGEIRKRPLIETNGETGEIVWDKGRDFATVRKVLSMPQVNIVKKTEVQTGGFSKESILPKRNSDKLIARKKDWDPKKYGGFDSPTVAYSVLVVAKVEKGKSKKLKSVKELLGITIMERSSFEKNPIDFLEAKGYKEVKKDLIIKLPKYSLFELENGRKRMLASAGELQKGNELALPSKYVNFLYLASHYEKLKGSPEDNEQKQLFVEQHKHYLDEIIEQISEFSKRVILADANLDKVLSAYNKHRDKPIREQAENIIHLFTLTNLGAPAAFKYFDTTIDRKRYTSTKEVLDATLIHQSITGLYETRIDLSQLGGDGGGGGGSSPAPGGVPWLTQQPLQLTILVPLQEYQEKILSKTALPEDQKQQLKTLFVKYDNLWQHWENQVGHRKIRPHNIATGDYPPRPQKQYPINPKAKPSIQIVIDDLLKQGVLTPQNSTMNTPVYPVPKPDGRWRMVLDYREVNKTIPLTAAQNQHSAGILATIVRQKYKTTLDLANGFWAHPITPESYWLTAFTWQGKQYCWTRLPQGFLNSPALFNADVVDLLKEIPNVQVYVDDIYLSHDDPKEHVQQLEKVFQILLQAGYVVSLKKSEIGQKTVEFLGFNITKEGRGLTDTFKTKLLNITPPKDLKQLQSILGLLNFARNFIPNFAELVQPLYNLIAPAKGKYIEWSEENTKQLNMVIEALNTASNLEERLPEQRLVIKVNTSPSAGYVRYYNETGKKPIMYLNYVFSKAELKFSMLEKLLTTMHKALIKAMDLAMGQEILVYSPIVSMTKIQKTPLPERKALPIRWITWMTYLEDPRIQFHYDKTLPELKHIPDVYTSSQSPVKHPSQYEGVFYTDGSAIKSPDPTKSNNAGMGIVHATYKPEYQVLNQWSIPLGNHTAQMAEIAAVEFACKKALKIPGPVLVITDSFYVAESANKELPYWKSNGFVNNKKKPLKHISKWKSIAECLSMKPDITIQHEKGISLQIPVFILKGNALADKLATQGSYVVNAGKRTADGSEFEKRTADGSEFESPKKKAKVE

SEQ ID NO: 1306 - protein, 2087 aa, synthetic construct
MPAAKRVKLDGGDKKYSIGLDIGTNSVGWAVITDEYKVPSKKFKVLGNTDRHSIKKNLIGALLFDSGETAEATRLKRTARRRYTRRKNRICYLQEIFSNEMAKVDDSFFHRLEESFLVEEDKKHERHPIFGNIVDEVAYHEKYPTIYHLRKKLVDSTDKADLRLIYLALAHMIKFRGHFLIEGDLNPDNSDVDKLFIQLVQTYNQLFEENPINASGVDAKAILSARLSKSRRLENLIAQLPGEKKNGLFGNLIALSLGLTPNFKSNFDLAEDAKLQLSKDTYDDDLDNLLAQIGDQYADLFLAAKNLSDAILLSDILRVNTEITKAPLSASMIKRYDEHHQDLTLLKALVRQQLPEKYKEIFFDQSKNGYAGYIDGGASQEEFYKFIKPILEKMDGTEELLVKLNREDLLRKQRTFDNGSIPHQIHLGELHAILRRQEDFYPFLKDNREKIEKILTFRIPYYVGPLARGNSRFAWMTRKSEETITPWNFEEVVDKGASAQSFIERMTNFDKNLPNEKVLPKHSLLYEYFTVYNELTKVKYVTEGMRKPAFLSGEQKKAIVDLLFKTNRKVTVKQLKEDYFKKIECFDSVEISGVEDRFNASLGTYHDLLKIIKDKDFLDNEENEDILEDIVLTLTLFEDREMIEERLKTYAHLFDDKVMKQLKRRRYTGWGRLSRKLINGIRDKQSGKTILDFLKSDGFANRNFMQLIHDDSLTFKEDIQKAQVSGQGDSLHEHIANLAGSPAIKKGILQTVKVVDELVKVMGRHKPENIVIEMARENQTTQKGQKNSRERMKRIEEGIKELGSQILKEHPVENTQLQNEKLYLYYLQNGRDMYVDQELDINRLSDYDVDHIVPQSFLKDDSIDNKVLTRSDKARGKSDNVPSEEVVKKMKNYWRQLLNAKLITQRKFDNLTKAERGGLSELDKAGFIKRQLVETRQITKHVAQILDSRMNTKYDENDKLIREVKVITLKSKLVSDFRKDFQFYKVREINNYHHAHDAYLNAVVGTALIKKYPKLESEFVYGDYKVYDVRKMIAKSEQEIGKATAKYFFYSNIMNFFKTEITLANGEIRKRPLIETNGETGEIVWDKGRDFATVRKVLSMPQVNIVKKTEVQTGGFSKESILPKRNSDKLIARKKDWDPKKYGGFDSPTVAYSVLVVAKVEKGKSKKLKSVKELLGITIMERSSFEKNPIDFLEAKGYKEVKKDLIIKLPKYSLFELENGRKRMLASAGELQKGNELALPSKYVNFLYLASHYEKLKGSPEDNEQKQLFVEQHKHYLDEIIEQISEFSKRVILADANLDKVLSAYNKHRDKPIREQAENIIHLFTLTNLGAPAAFKYFDTTIDRKRYTSTKEVLDATLIHQSITGLYETRIDLSQLGGDGGGSSGGSEAAAKGGVPWLTQQPLQLTILVPLQEYQEKILSKTALPEDQKQQLKTLFVKYDNLWQHWENQVGHRKIRPHNIATGDYPPRPQKQYPINPKAKPSIQIVIDDLLKQGVLTPQNSTMNTPVYPVPKPDGRWRMVLDYREVNKTIPLTAAQNQHSAGILATIVRQKYKTTLDLANGFWAHPITPESYWLTAFTWQGKQYCWTRLPQGFLNSPALFNADVVDLLKEIPNVQVYVDDIYLSHDDPKEHVQQLEKVFQILLQAGYVVSLKKSEIGQKTVEFLGFNITKEGRGLTDTFKTKLLNITPPKDLKQLQSILGLLNFARNFIPNFAELVQPLYNLIAPAKGKYIEWSEENTKQLNMVIEALNTASNLEERLPEQRLVIKVNTSPSAGYVRYYNETGKKPIMYLNYVFSKAELKFSMLEKLLTTMHKALIKAMDLAMGQEILVYSPIVSMTKIQKTPLPERKALPIRWITWMTYLEDPRIQFHYDKTLPELKHIPDVYTSSQSPVKHPSQYEGVFYTDGSAIKSPDPTKSNNAGMGIVHATYKPEYQVLNQWSIPLGNHTAQMAEIAAVEFACKKALKIPGPVLVITDSFYVAESANKELPYWKSNGFVNNKKKPLKHISKWKSIAECLSMKPDITIQHEKGISLQIPVFILKGNALADKLATQGSYVVNAGKRTADGSEFEKRTADGSEFESPKKKAKVE

SEQ ID NO: 1307 - protein, 2085 aa, synthetic construct
MPAAKRVKLDGGDKKYSIGLDIGTNSVGWAVITDEYKVPSKKFKVLGNTDRHSIKKNLIGALLFDSGETAEATRLKRTARRRYTRRKNRICYLQEIFSNEMAKVDDSFFHRLEESFLVEEDKKHERHPIFGNIVDEVAYHEKYPTIYHLRKKLVDSTDKADLRLIYLALAHMIKFRGHFLIEGDLNPDNSDVDKLFIQLVQTYNQLFEENPINASGVDAKAILSARLSKSRRLENLIAQLPGEKKNGLFGNLIALSLGLTPNFKSNFDLAEDAKLQLSKDTYDDDLDNLLAQIGDQYADLFLAAKNLSDAILLSDILRVNTEITKAPLSASMIKRYDEHHQDLTLLKALVRQQLPEKYKEIFFDQSKNGYAGYIDGGASQEEFYKFIKPILEKMDGTEELLVKLNREDLLRKQRTFDNGSIPHQIHLGELHAILRRQEDFYPFLKDNREKIEKILTFRIPYYVGPLARGNSRFAWMTRKSEETITPWNFEEVVDKGASAQSFIERMTNFDKNLPNEKVLPKHSLLYEYFTVYNELTKVKYVTEGMRKPAFLSGEQKKAIVDLLFKTNRKVTVKQLKEDYFKKIECFDSVEISGVEDRFNASLGTYHDLLKIIKDKDFLDNEENEDILEDIVLTLTLFEDREMIEERLKTYAHLFDDKVMKQLKRRRYTGWGRLSRKLINGIRDKQSGKTILDFLKSDGFANRNFMQLIHDDSLTFKEDIQKAQVSGQGDSLHEHIANLAGSPAIKKGILQTVKVVDELVKVMGRHKPENIVIEMARENQTTQKGQKNSRERMKRIEEGIKELGSQILKEHPVENTQLQNEKLYLYYLQNGRDMYVDQELDINRLSDYDVDHIVPQSFLKDDSIDNKVLTRSDKARGKSDNVPSEEVVKKMKNYWRQLLNAKLITQRKFDNLTKAERGGLSELDKAGFIKRQLVETRQITKHVAQILDSRMNTKYDENDKLIREVKVITLKSKLVSDFRKDFQFYKVREINNYHHAHDAYLNAVVGTALIKKYPKLESEFVYGDYKVYDVRKMIAKSEQEIGKATAKYFFYSNIMNFFKTEITLANGEIRKRPLIETNGETGEIVWDKGRDFATVRKVLSMPQVNIVKKTEVQTGGFSKESILPKRNSDKLIARKKDWDPKKYGGFDSPTVAYSVLVVAKVEKGKSKKLKSVKELLGITIMERSSFEKNPIDFLEAKGYKEVKKDLIIKLPKYSLFELENGRKRMLASAGELQKGNELALPSKYVNFLYLASHYEKLKGSPEDNEQKQLFVEQHKHYLDEIIEQISEFSKRVILADANLDKVLSAYNKHRDKPIREQAENIIHLFTLTNLGAPAAFKYFDTTIDRKRYTSTKEVLDATLIHQSITGLYETRIDLSQLGGDGGGSSPAPGGSGGVPWLTQQPLQLTILVPLQEYQEKILSKTALPEDQKQQLKTLFVKYDNLWQHWENQVGHRKIRPHNIATGDYPPRPQKQYPINPKAKPSIQIVIDDLLKQGVLTPQNSTMNTPVYPVPKPDGRWRMVLDYREVNKTIPLTAAQNQHSAGILATIVRQKYKTTLDLANGFWAHPITPESYWLTAFTWQGKQYCWTRLPQGFLNSPALFNADVVDLLKEIPNVQVYVDDIYLSHDDPKEHVQQLEKVFQILLQAGYVVSLKKSEIGQKTVEFLGFNITKEGRGLTDTFKTKLLNITPPKDLKQLQSILGLLNFARNFIPNFAELVQPLYNLIAPAKGKYIEWSEENTKQLNMVIEALNTASNLEERLPEQRLVIKVNTSPSAGYVRYYNETGKKPIMYLNYVFSKAELKFSMLEKLLTTMHKALIKAMDLAMGQEILVYSPIVSMTKIQKTPLPERKALPIRWITWMTYLEDPRIQFHYDKTLPELKHIPDVYTSSQSPVKHPSQYEGVFYTDGSAIKSPDPTKSNNAGMGIVHATYKPEYQVLNQWSIPLGNHTAQMAEIAAVEFACKKALKIPGPVLVITDSFYVAESANKELPYWKSNGFVNNKKKPLKHISKWKSIAECLSMKPDITIQHEKGISLQIPVFILKGNALADKLATQGSYVVNAGKRTADGSEFEKRTADGSEFESPKKKAKVE

SEQ ID NO: 1308 - protein, 2086 aa, synthetic construct
MPAAKRVKLDGGDKKYSIGLDIGTNSVGWAVITDEYKVPSKKFKVLGNTDRHSIKKNLIGALLFDSGETAEATRLKRTARRRYTRRKNRICYLQEIFSNEMAKVDDSFFHRLEESFLVEEDKKHERHPIFGNIVDEVAYHEKYPTIYHLRKKLVDSTDKADLRLIYLALAHMIKFRGHFLIEGDLNPDNSDVDKLFIQLVQTYNQLFEENPINASGVDAKAILSARLSKSRRLENLIAQLPGEKKNGLFGNLIALSLGLTPNFKSNFDLAEDAKLQLSKDTYDDDLDNLLAQIGDQYADLFLAAKNLSDAILLSDILRVNTEITKAPLSASMIKRYDEHHQDLTLLKALVRQQLPEKYKEIFFDQSKNGYAGYIDGGASQEEFYKFIKPILEKMDGTEELLVKLNREDLLRKQRTFDNGSIPHQIHLGELHAILRRQEDFYPFLKDNREKIEKILTFRIPYYVGPLARGNSRFAWMTRKSEETITPWNFEEVVDKGASAQSFIERMTNFDKNLPNEKVLPKHSLLYEYFTVYNELTKVKYVTEGMRKPAFLSGEQKKAIVDLLFKTNRKVTVKQLKEDYFKKIECFDSVEISGVEDRFNASLGTYHDLLKIIKDKDFLDNEENEDILEDIVLTLTLFEDREMIEERLKTYAHLFDDKVMKQLKRRRYTGWGRLSRKLINGIRDKQSGKTILDFLKSDGFANRNFMQLIHDDSLTFKEDIQKAQVSGQGDSLHEHIANLAGSPAIKKGILQTVKVVDELVKVMGRHKPENIVIEMARENQTTQKGQKNSRERMKRIEEGIKELGSQILKEHPVENTQLQNEKLYLYYLQNGRDMYVDQELDINRLSDYDVDHIVPQSFLKDDSIDNKVLTRSDKARGKSDNVPSEEVVKKMKNYWRQLLNAKLITQRKFDNLTKAERGGLSELDKAGFIKRQLVETRQITKHVAQILDSRMNTKYDENDKLIREVKVITLKSKLVSDFRKDFQFYKVREINNYHHAHDAYLNAVVGTALIKKYPKLESEFVYGDYKVYDVRKMIAKSEQEIGKATAKYFFYSNIMNFFKTEITLANGEIRKRPLIETNGETGEIVWDKGRDFATVRKVLSMPQVNIVKKTEVQTGGFSKESILPKRNSDKLIARKKDWDPKKYGGFDSPTVAYSVLVVAKVEKGKSKKLKSVKELLGITIMERSSFEKNPIDFLEAKGYKEVKKDLIIKLPKYSLFELENGRKRMLASAGELQKGNELALPSKYVNFLYLASHYEKLKGSPEDNEQKQLFVEQHKHYLDEIIEQISEFSKRVILADANLDKVLSAYNKHRDKPIREQAENIIHLFTLTNLGAPAAFKYFDTTIDRKRYTSTKEVLDATLIHQSITGLYETRIDLSQLGGDGGEAAAKEAAAKGGVPWLTQQPLQLTILVPLQEYQEKILSKTALPEDQKQQLKTLFVKYDNLWQHWENQVGHRKIRPHNIATGDYPPRPQKQYPINPKAKPSIQIVIDDLLKQGVLTPQNSTMNTPVYPVPKPDGRWRMVLDYREVNKTIPLTAAQNQHSAGILATIVRQKYKTTLDLANGFWAHPITPESYWLTAFTWQGKQYCWTRLPQGFLNSPALFNADVVDLLKEIPNVQVYVDDIYLSHDDPKEHVQQLEKVFQILLQAGYVVSLKKSEIGQKTVEFLGFNITKEGRGLTDTFKTKLLNITPPKDLKQLQSILGLLNFARNFIPNFAELVQPLYNLIAPAKGKYIEWSEENTKQLNMVIEALNTASNLEERLPEQRLVIKVNTSPSAGYVRYYNETGKKPIMYLNYVFSKAELKFSMLEKLLTTMHKALIKAMDLAMGQEILVYSPIVSMTKIQKTPLPERKALPIRWITWMTYLEDPRIQFHYDKTLPELKHIPDVYTSSQSPVKHPSQYEGVFYTDGSAIKSPDPTKSNNAGMGIVHATYKPEYQVLNQWSIPLGNHTAQMAEIAAVEFACKKALKIPGPVLVITDSFYVAESANKELPYWKSNGFVNNKKKPLKHISKWKSIAECLSMKPDITIQHEKGISLQIPVFILKGNALADKLATQGSYVVNAGKRTADGSEFEKRTADGSEFESPKKKAKVE

SEQ ID NO: 1309 - protein, 2087 aa, synthetic construct
MPAAKRVKLDGGDKKYSIGLDIGTNSVGWAVITDEYKVPSKKFKVLGNTDRHSIKKNLIGALLFDSGETAEATRLKRTARRRYTRRKNRICYLQEIFSNEMAKVDDSFFHRLEESFLVEEDKKHERHPIFGNIVDEVAYHEKYPTIYHLRKKLVDSTDKADLRLIYLALAHMIKFRGHFLIEGDLNPDNSDVDKLFIQLVQTYNQLFEENPINASGVDAKAILSARLSKSRRLENLIAQLPGEKKNGLFGNLIALSLGLTPNFKSNFDLAEDAKLQLSKDTYDDDLDNLLAQIGDQYADLFLAAKNLSDAILLSDILRVNTEITKAPLSASMIKRYDEHHQDLTLLKALVRQQLPEKYKEIFFDQSKNGYAGYIDGGASQEEFYKFIKPILEKMDGTEELLVKLNREDLLRKQRTFDNGSIPHQIHLGELHAILRRQEDFYPFLKDNREKIEKILTFRIPYYVGPLARGNSRFAWMTRKSEETITPWNFEEVVDKGASAQSFIERMTNFDKNLPNEKVLPKHSLLYEYFTVYNELTKVKYVTEGMRKPAFLSGEQKKAIVDLLFKTNRKVTVKQLKEDYFKKIECFDSVEISGVEDRFNASLGTYHDLLKIIKDKDFLDNEENEDILEDIVLTLTLFEDREMIEERLKTYAHLFDDKVMKQLKRRRYTGWGRLSRKLINGIRDKQSGKTILDFLKSDGFANRNFMQLIHDDSLTFKEDIQKAQVSGQGDSLHEHIANLAGSPAIKKGILQTVKVVDELVKVMGRHKPENIVIEMARENQTTQKGQKNSRERMKRIEEGIKELGSQILKEHPVENTQLQNEKLYLYYLQNGRDMYVDQELDINRLSDYDVDHIVPQSFLKDDSIDNKVLTRSDKARGKSDNVPSEEVVKKMKNYWRQLLNAKLITQRKFDNLTKAERGGLSELDKAGFIKRQLVETRQITKHVAQILDSRMNTKYDENDKLIREVKVITLKSKLVSDFRKDFQFYKVREINNYHHAHDAYLNAVVGTALIKKYPKLESEFVYGDYKVYDVRKMIAKSEQEIGKATAKYFFYSNIMNFFKTEITLANGEIRKRPLIETNGETGEIVWDKGRDFATVRKVLSMPQVNIVKKTEVQTGGFSKESILPKRNSDKLIARKKDWDPKKYGGFDSPTVAYSVLVVAKVEKGKSKKLKSVKELLGITIMERSSFEKNPIDFLEAKGYKEVKKDLIIKLPKYSLFELENGRKRMLASAGELQKGNELALPSKYVNFLYLASHYEKLKGSPEDNEQKQLFVEQHKHYLDEIIEQISEFSKRVILADANLDKVLSAYNKHRDKPIREQAENIIHLFTLTNLGAPAAFKYFDTTIDRKRYTSTKEVLDATLIHQSITGLYETRIDLSQLGGDGGGGGEAAAKPAPGGVPWLTQQPLQLTILVPLQEYQEKILSKTALPEDQKQQLKTLFVKYDNLWQHWENQVGHRKIRPHNIATGDYPPRPQKQYPINPKAKPSIQIVIDDLLKQGVLTPQNSTMNTPVYPVPKPDGRWRMVLDYREVNKTIPLTAAQNQHSAGILATIVRQKYKTTLDLANGFWAHPITPESYWLTAFTWQGKQYCWTRLPQGFLNSPALFNADVVDLLKEIPNVQVYVDDIYLSHDDPKEHVQQLEKVFQILLQAGYVVSLKKSEIGQKTVEFLGFNITKEGRGLTDTFKTKLLNITPPKDLKQLQSILGLLNFARNFIPNFAELVQPLYNLIAPAKGKYIEWSEENTKQLNMVIEALNTASNLEERLPEQRLVIKVNTSPSAGYVRYYNETGKKPIMYLNYVFSKAELKFSMLEKLLTTMHKALIKAMDLAMGQEILVYSPIVSMTKIQKTPLPERKALPIRWITWMTYLEDPRIQFHYDKTLPELKHIPDVYTSSQSPVKHPSQYEGVFYTDGSAIKSPDPTKSNNAGMGIVHATYKPEYQVLNQWSIPLGNHTAQMAEIAAVEFACKKALKIPGPVLVITDSFYVAESANKELPYWKSNGFVNNKKKPLKHISKWKSIAECLSMKPDITIQHEKGISLQIPVFILKGNALADKLATQGSYVVNAGKRTADGSEFEKRTADGSEFESPKKKAKVE

SEQ ID NO: 1310 - protein, 2085 aa, synthetic construct
MPAAKRVKLDGGDKKYSIGLDIGTNSVGWAVITDEYKVPSKKFKVLGNTDRHSIKKNLIGALLFDSGETAEATRLKRTARRRYTRRKNRICYLQEIFSNEMAKVDDSFFHRLEESFLVEEDKKHERHPIFGNIVDEVAYHEKYPTIYHLRKKLVDSTDKADLRLIYLALAHMIKFRGHFLIEGDLNPDNSDVDKLFIQLVQTYNQLFEENPINASGVDAKAILSARLSKSRRLENLIAQLPGEKKNGLFGNLIALSLGLTPNFKSNFDLAEDAKLQLSKDTYDDDLDNLLAQIGDQYADLFLAAKNLSDAILLSDILRVNTEITKAPLSASMIKRYDEHHQDLTLLKALVRQQLPEKYKEIFFDQSKNGYAGYIDGGASQEEFYKFIKPILEKMDGTEELLVKLNREDLLRKQRTFDNGSIPHQIHLGELHAILRRQEDFYPFLKDNREKIEKILTFRIPYYVGPLARGNSRFAWMTRKSEETITPWNFEEVVDKGASAQSFIERMTNFDKNLPNEKVLPKHSLLYEYFTVYNELTKVKYVTEGMRKPAFLSGEQKKAIVDLLFKTNRKVTVKQLKEDYFKKIECFDSVEISGVEDRFNASLGTYHDLLKIIKDKDFLDNEENEDILEDIVLTLTLFEDREMIEERLKTYAHLFDDKVMKQLKRRRYTGWGRLSRKLINGIRDKQSGKTILDFLKSDGFANRNFMQLIHDDSLTFKEDIQKAQVSGQGDSLHEHIANLAGSPAIKKGILQTVKVVDELVKVMGRHKPENIVIEMARENQTTQKGQKNSRERMKRIEEGIKELGSQILKEHPVENTQLQNEKLYLYYLQNGRDMYVDQELDINRLSDYDVDHIVPQSFLKDDSIDNKVLTRSDKARGKSDNVPSEEVVKKMKNYWRQLLNAKLITQRKFDNLTKAERGGLSELDKAGFIKRQLVETRQITKHVAQILDSRMNTKYDENDKLIREVKVITLKSKLVSDFRKDFQFYKVREINNYHHAHDAYLNAVVGTALIKKYPKLESEFVYGDYKVYDVRKMIAKSEQEIGKATAKYFFYSNIMNFFKTEITLANGEIRKRPLIETNGETGEIVWDKGRDFATVRKVLSMPQVNIVKKTEVQTGGFSKESILPKRNSDKLIARKKDWDPKKYGGFDSPTVAYSVLVVAKVEKGKSKKLKSVKELLGITIMERSSFEKNPIDFLEAKGYKEVKKDLIIKLPKYSLFELENGRKRMLASAGELQKGNELALPSKYVNFLYLASHYEKLKGSPEDNEQKQLFVEQHKHYLDEIIEQISEFSKRVILADANLDKVLSAYNKHRDKPIREQAENIIHLFTLTNLGAPAAFKYFDTTIDRKRYTSTKEVLDATLIHQSITGLYETRIDLSQLGGDGGGGSGGGPAPGGVPWLTQQPLQLTILVPLQEYQEKILSKTALPEDQKQQLKTLFVKYDNLWQHWENQVGHRKIRPHNIATGDYPPRPQKQYPINPKAKPSIQIVIDDLLKQGVLTPQNSTMNTPVYPVPKPDGRWRMVLDYREVNKTIPLTAAQNQHSAGILATIVRQKYKTTLDLANGFWAHPITPESYWLTAFTWQGKQYCWTRLPQGFLNSPALFNADVVDLLKEIPNVQVYVDDIYLSHDDPKEHVQQLEKVFQILLQAGYVVSLKKSEIGQKTVEFLGFNITKEGRGLTDTFKTKLLNITPPKDLKQLQSILGLLNFARNFIPNFAELVQPLYNLIAPAKGKYIEWSEENTKQLNMVIEALNTASNLEERLPEQRLVIKVNTSPSAGYVRYYNETGKKPIMYLNYVFSKAELKFSMLEKLLTTMHKALIKAMDLAMGQEILVYSPIVSMTKIQKTPLPERKALPIRWITWMTYLEDPRIQFHYDKTLPELKHIPDVYTSSQSPVKHPSQYEGVFYTDGSAIKSPDPTKSNNAGMGIVHATYKPEYQVLNQWSIPLGNHTAQMAEIAAVEFACKKALKIPGPVLVITDSFYVAESANKELPYWKSNGFVNNKKKPLKHISKWKSIAECLSMKPDITIQHEKGISLQIPVFILKGNALADKLATQGSYVVNAGKRTADGSEFEKRTADGSEFESPKKKAKVE

SEQ ID NO: 1311 - protein, 2122 aa, synthetic construct
MPAAKRVKLDGGDKKYSIGLDIGTNSVGWAVITDEYKVPSKKFKVLGNTDRHSIKKNLIGALLFDSGETAEATRLKRTARRRYTRRKNRICYLQEIFSNEMAKVDDSFFHRLEESFLVEEDKKHERHPIFGNIVDEVAYHEKYPTIYHLRKKLVDSTDKADLRLIYLALAHMIKFRGHFLIEGDLNPDNSDVDKLFIQLVQTYNQLFEENPINASGVDAKAILSARLSKSRRLENLIAQLPGEKKNGLFGNLIALSLGLTPNFKSNFDLAEDAKLQLSKDTYDDDLDNLLAQIGDQYADLFLAAKNLSDAILLSDILRVNTEITKAPLSASMIKRYDEHHQDLTLLKALVRQQLPEKYKEIFFDQSKNGYAGYIDGGASQEEFYKFIKPILEKMDGTEELLVKLNREDLLRKQRTFDNGSIPHQIHLGELHAILRRQEDFYPFLKDNREKIEKILTFRIPYYVGPLARGNSRFAWMTRKSEETITPWNFEEVVDKGASAQSFIERMTNFDKNLPNEKVLPKHSLLYEYFTVYNELTKVKYVTEGMRKPAFLSGEQKKAIVDLLFKTNRKVTVKQLKEDYFKKIECFDSVEISGVEDRFNASLGTYHDLLKIIKDKDFLDNEENEDILEDIVLTLTLFEDREMIEERLKTYAHLFDDKVMKQLKRRRYTGWGRLSRKLINGIRDKQSGKTILDFLKSDGFANRNFMQLIHDDSLTFKEDIQKAQVSGQGDSLHEHIANLAGSPAIKKGILQTVKVVDELVKVMGRHKPENIVIEMARENQTTQKGQKNSRERMKRIEEGIKELGSQILKEHPVENTQLQNEKLYLYYLQNGRDMYVDQELDINRLSDYDVDHIVPQSFLKDDSIDNKVLTRSDKARGKSDNVPSEEVVKKMKNYWRQLLNAKLITQRKFDNLTKAERGGLSELDKAGFIKRQLVETRQITKHVAQILDSRMNTKYDENDKLIREVKVITLKSKLVSDFRKDFQFYKVREINNYHHAHDAYLNAVVGTALIKKYPKLESEFVYGDYKVYDVRKMIAKSEQEIGKATAKYFFYSNIMNFFKTEITLANGEIRKRPLIETNGETGEIVWDKGRDFATVRKVLSMPQVNIVKKTEVQTGGFSKESILPKRNSDKLIARKKDWDPKKYGGFDSPTVAYSVLVVAKVEKGKSKKLKSVKELLGITIMERSSFEKNPIDFLEAKGYKEVKKDLIIKLPKYSLFELENGRKRMLASAGELQKGNELALPSKYVNFLYLASHYEKLKGSPEDNEQKQLFVEQHKHYLDEIIEQISEFSKRVILADANLDKVLSAYNKHRDKPIREQAENIIHLFTLTNLGAPAAFKYFDTTIDRKRYTSTKEVLDATLIHQSITGLYETRIDLSQLGGDGGAEAAAKEAAAKEAAAKEAAAKALEAEAAAKEAAAKEAAAKEAAAKAGGVPWLTQQPLQLTILVPLQEYQEKILSKTALPEDQKQQLKTLFVKYDNLWQHWENQVGHRKIRPHNIATGDYPPRPQKQYPINPKAKPSIQIVIDDLLKQGVLTPQNSTMNTPVYPVPKPDGRWRMVLDYREVNKTIPLTAAQNQHSAGILATIVRQKYKTTLDLANGFWAHPITPESYWLTAFTWQGKQYCWTRLPQGFLNSPALFNADVVDLLKEIPNVQVYVDDIYLSHDDPKEHVQQLEKVFQILLQAGYVVSLKKSEIGQKTVEFLGFNITKEGRGLTDTFKTKLLNITPPKDLKQLQSILGKLNFARNFIPNFAELVQPLYNLIAPAKGKYIEWSEENTKQLNMVIEALNTASNLEERLPEQRLVIKVNTSPSAGYVRYYNETGKKPIMYLNYVFSKAELKFSMLEKLLTTMHKALIKAMDLAMGQEILVYSPIVSMTKIQKTPLPERKALPIRWITWMTYLEDPRIQFHYDKTLPELKHIPDVYTSSQSPVKHPSQYEGVFYTDGSAIKSPDPTKSNNAGMGIVHATYKPEYQVLNQWSIPLGNHTAQMAEIAAVEFACKKALKIPGPVLVITDSFYVAESANKELPYWKSNGFVNNKKKPLKHISKWKSIAECLSMKPDITIQHEKGISLQIPVFILKGNALADKLATQGSYVVNAGKRTADGSEFEKRTADGSEFESPKKKAKVE

SEQ ID NO: 1312 - protein, 2092 aa, synthetic construct
MPAAKRVKLDGGDKKYSIGLDIGTNSVGWAVITDEYKVPSKKFKVLGNTDRHSIKKNLIGALLFDSGETAEATRLKRTARRRYTRRKNRICYLQEIFSNEMAKVDDSFFHRLEESFLVEEDKKHERHPIFGNIVDEVAYHEKYPTIYHLRKKLVDSTDKADLRLIYLALAHMIKFRGHFLIEGDLNPDNSDVDKLFIQLVQTYNQLFEENPINASGVDAKAILSARLSKSRRLENLIAQLPGEKKNGLFGNLIALSLGLTPNFKSNFDLAEDAKLQLSKDTYDDDLDNLLAQIGDQYADLFLAAKNLSDAILLSDILRVNTEITKAPLSASMIKRYDEHHQDLTLLKALVRQQLPEKYKEIFFDQSKNGYAGYIDGGASQEEFYKFIKPILEKMDGTEELLVKLNREDLLRKQRTFDNGSIPHQIHLGELHAILRRQEDFYPFLKDNREKIEKILTFRIPYYVGPLARGNSRFAWMTRKSEETITPWNFEEVVDKGASAQSFIERMTNFDKNLPNEKVLPKHSLLYEYFTVYNELTKVKYVTEGMRKPAFLSGEQKKAIVDLLFKTNRKVTVKQLKEDYFKKIECFDSVEISGVEDRFNASLGTYHDLLKIIKDKDFLDNEENEDILEDIVLTLTLFEDREMIEERLKTYAHLFDDKVMKQLKRRRYTGWGRLSRKLINGIRDKQSGKTILDFLKSDGFANRNFMQLIHDDSLTFKEDIQKAQVSGQGDSLHEHIANLAGSPAIKKGILQTVKVVDELVKVMGRHKPENIVIEMARENQTTQKGQKNSRERMKRIEEGIKELGSQILKEHPVENTQLQNEKLYLYYLQNGRDMYVDQELDINRLSDYDVDHIVPQSFLKDDSIDNKVLTRSDKARGKSDNVPSEEVVKKMKNYWRQLLNAKLITQRKFDNLTKAERGGLSELDKAGFIKRQLVETRQITKHVAQILDSRMNTKYDENDKLIREVKVITLKSKLVSDFRKDFQFYKVREINNYHHAHDAYLNAVVGTALIKKYPKLESEFVYGDYKVYDVRKMIAKSEQEIGKATAKYFFYSNIMNFFKTEITLANGEIRKRPLIETNGETGEIVWDKGRDFATVRKVLSMPQVNIVKKTEVQTGGFSKESILPKRNSDKLIARKKDWDPKKYGGFDSPTVAYSVLVVAKVEKGKSKKLKSVKELLGITIMERSSFEKNPIDFLEAKGYKEVKKDLIIKLPKYSLFELENGRKRMLASAGELQKGNELALPSKYVNFLYLASHYEKLKGSPEDNEQKQLFVEQHKHYLDEIIEQISEFSKRVILADANLDKVLSAYNKHRDKPIREQAENIIHLFTLTNLGAPAAFKYFDTTIDRKRYTSTKEVLDATLIHQSITGLYETRIDLSQLGGDGGSGSETPGTSESATPESGGVPWLTQQPLQLTILVPLQEYQEKILSKTALPEDQKQQLKTLFVKYDNLWQHWENQVGHRKIRPHNIATGDYPPRPQKQYPINPKAKPSIQIVIDDLLKQGVLTPQNSTMNTPVYPVPKPDGRWRMVLDYREVNKTIPLTAAQNQHSAGILATIVRQKYKTTLDLANGFWAHPITPESYWLTAFTWQGKQYCWTRLPQGFLNSPALFNADVVDLLKEIPNVQVYVDDIYLSHDDPKEHVQQLEKVFQILLQAGYVVSLKKSEIGQKTVEFLGFNITKEGRGLTDTFKTKLLNITPPKDLKQLQSILGKLNFARNFIPNFAELVQPLYNLIAPAKGKYIEWSEENTKQLNMVIEALNTASNLEERLPEQRLVIKVNTSPSAGYVRYYNETGKKPIMYLNYVFSKAELKFSMLEKLLTTMHKALIKAMDLAMGQEILVYSPIVSMTKIQKTPLPERKALPIRWITWMTYLEDPRIQFHYDKTLPELKHIPDVYTSSQSPVKHPSQYEGVFYTDGSAIKSPDPTKSNNAGMGIVHATYKPEYQVLNQWSIPLGNHTAQMAEIAAVEFACKKALKIPGPVLVITDSFYVAESANKELPYWKSNGFVNNKKKPLKHISKWKSIAECLSMKPDITIQHEKGISLQIPVFILKGNALADKLATQGSYVVNAGKRTADGSEFEKRTADGSEFESPKKKAKVE

SEQ ID NO: 1313 - protein, 2096 aa, synthetic construct
MPAAKRVKLDGGDKKYSIGLDIGTNSVGWAVITDEYKVPSKKFKVLGNTDRHSIKKNLIGALLFDSGETAEATRLKRTARRRYTRRKNRICYLQEIFSNEMAKVDDSFFHRLEESFLVEEDKKHERHPIFGNIVDEVAYHEKYPTIYHLRKKLVDSTDKADLRLIYLALAHMIKFRGHFLIEGDLNPDNSDVDKLFIQLVQTYNQLFEENPINASGVDAKAILSARLSKSRRLENLIAQLPGEKKNGLFGNLIALSLGLTPNFKSNFDLAEDAKLQLSKDTYDDDLDNLLAQIGDQYADLFLAAKNLSDAILLSDILRVNTEITKAPLSASMIKRYDEHHQDLTLLKALVRQQLPEKYKEIFFDQSKNGYAGYIDGGASQEEFYKFIKPILEKMDGTEELLVKLNREDLLRKQRTFDNGSIPHQIHLGELHAILRRQEDFYPFLKDNREKIEKILTFRIPYYVGPLARGNSRFAWMTRKSEETITPWNFEEVVDKGASAQSFIERMTNFDKNLPNEKVLPKHSLLYEYFTVYNELTKVKYVTEGMRKPAFLSGEQKKAIVDLLFKTNRKVTVKQLKEDYFKKIECFDSVEISGVEDRFNASLGTYHDLLKIIKDKDFLDNEENEDILEDIVLTLTLFEDREMIEERLKTYAHLFDDKVMKQLKRRRYTGWGRLSRKLINGIRDKQSGKTILDFLKSDGFANRNFMQLIHDDSLTFKEDIQKAQVSGQGDSLHEHIANLAGSPAIKKGILQTVKVVDELVKVMGRHKPENIVIEMARENQTTQKGQKNSRERMKRIEEGIKELGSQILKEHPVENTQLQNEKLYLYYLQNGRDMYVDQELDINRLSDYDVDHIVPQSFLKDDSIDNKVLTRSDKARGKSDNVPSEEVVKKMKNYWRQLLNAKLITQRKFDNLTKAERGGLSELDKAGFIKRQLVETRQITKHVAQILDSRMNTKYDENDKLIREVKVITLKSKLVSDFRKDFQFYKVREINNYHHAHDAYLNAVVGTALIKKYPKLESEFVYGDYKVYDVRKMIAKSEQEIGKATAKYFFYSNIMNFFKTEITLANGEIRKRPLIETNGETGEIVWDKGRDFATVRKVLSMPQVNIVKKTEVQTGGFSKESILPKRNSDKLIARKKDWDPKKYGGFDSPTVAYSVLVVAKVEKGKSKKLKSVKELLGITIMERSSFEKNPIDFLEAKGYKEVKKDLIIKLPKYSLFELENGRKRMLASAGELQKGNELALPSKYVNFLYLASHYEKLKGSPEDNEQKQLFVEQHKHYLDEIIEQISEFSKRVILADANLDKVLSAYNKHRDKPIREQAENIIHLFTLTNLGAPAAFKYFDTTIDRKRYTSTKEVLDATLIHQSITGLYETRIDLSQLGGDGGEAAAKEAAAKEAAAKEAAAKGGVPWLTQQPLQLTILVPLQEYQEKILSKTALPEDQKQQLKTLFVKYDNLWQHWENQVGHRKIRPHNIATGDYPPRPQKQYPINPKAKPSIQIVIDDLLKQGVLTPQNSTMNTPVYPVPKPDGRWRMVLDYREVNKTIPLTAAQNQHSAGILATIVRQKYKTTLDLANGFWAHPITPESYWLTAFTWQGKQYCWTRLPQGFLNSPALFNADVVDLLKEIPNVQVYVDDIYLSHDDPKEHVQQLEKVFQILLQAGYVVSLKKSEIGQKTVEFLGFNITKEGRGLTDTFKTKLLNITPPKDLKQLQSILGKLNFARNFIPNFAELVQPLYNLIAPAKGKYIEWSEENTKQLNMVIEALNTASNLEERLPEQRLVIKVNTSPSAGYVRYYNETGKKPIMYLNYVFSKAELKFSMLEKLLTTMHKALIKAMDLAMGQEILVYSPIVSMTKIQKTPLPERKALPIRWITWMTYLEDPRIQFHYDKTLPELKHIPDVYTSSQSPVKHPSQYEGVFYTDGSAIKSPDPTKSNNAGMGIVHATYKPEYQVLNQWSIPLGNHTAQMAEIAAVEFACKKALKIPGPVLVITDSFYVAESANKELPYWKSNGFVNNKKKPLKHISKWKSIAECLSMKPDITIQHEKGISLQIPVFILKGNALADKLATQGSYVVNAGKRTADGSEFEKRTADGSEFESPKKKAKVE

SEQ ID NO: 1314 - protein, 2096 aa, synthetic construct
MPAAKRVKLDGGDKKYSIGLDIGTNSVGWAVITDEYKVPSKKFKVLGNTDRHSIKKNLIGALLFDSGETAEATRLKRTARRRYTRRKNRICYLQEIFSNEMAKVDDSFFHRLEESFLVEEDKKHERHPIFGNIVDEVAYHEKYPTIYHLRKKLVDSTDKADLRLIYLALAHMIKFRGHFLIEGDLNPDNSDVDKLFIQLVQTYNQLFEENPINASGVDAKAILSARLSKSRRLENLIAQLPGEKKNGLFGNLIALSLGLTPNFKSNFDLAEDAKLQLSKDTYDDDLDNLLAQIGDQYADLFLAAKNLSDAILLSDILRVNTEITKAPLSASMIKRYDEHHQDLTLLKALVRQQLPEKYKEIFFDQSKNGYAGYIDGGASQEEFYKFIKPILEKMDGTEELLVKLNREDLLRKQRTFDNGSIPHQIHLGELHAILRRQEDFYPFLKDNREKIEKILTFRIPYYVGPLARGNSRFAWMTRKSEETITPWNFEEVVDKGASAQSFIERMTNFDKNLPNEKVLPKHSLLYEYFTVYNELTKVKYVTEGMRKPAFLSGEQKKAIVDLLFKTNRKVTVKQLKEDYFKKIECFDSVEISGVEDRFNASLGTYHDLLKIIKDKDFLDNEENEDILEDIVLTLTLFEDREMIEERLKTYAHLFDDKVMKQLKRRRYTGWGRLSRKLINGIRDKQSGKTILDFLKSDGFANRNFMQLIHDDSLTFKEDIQKAQVSGQGDSLHEHIANLAGSPAIKKGILQTVKVVDELVKVMGRHKPENIVIEMARENQTTQKGQKNSRERMKRIEEGIKELGSQILKEHPVENTQLQNEKLYLYYLQNGRDMYVDQELDINRLSDYDVDHIVPQSFLKDDSIDNKVLTRSDKARGKSDNVPSEEVVKKMKNYWRQLLNAKLITQRKFDNLTKAERGGLSELDKAGFIKRQLVETRQITKHVAQILDSRMNTKYDENDKLIREVKVITLKSKLVSDFRKDFQFYKVREINNYHHAHDAYLNAVVGTALIKKYPKLESEFVYGDYKVYDVRKMIAKSEQEIGKATAKYFFYSNIMNFFKTEITLANGEIRKRPLIETNGETGEIVWDKGRDFATVRKVLSMPQVNIVKKTEVQTGGFSKESILPKRNSDKLIARKKDWDPKKYGGFDSPTVAYSVLVVAKVEKGKSKKLKSVKELLGITIMERSSFEKNPIDFLEAKGYKEVKKDLIIKLPKYSLFELENGRKRMLASAGELQKGNELALPSKYVNFLYLASHYEKLKGSPEDNEQKQLFVEQHKHYLDEIIEQISEFSKRVILADANLDKVLSAYNKHRDKPIREQAENIIHLFTLTNLGAPAAFKYFDTTIDRKRYTSTKEVLDATLIHQSITGLYETRIDLSQLGGDGGGGGGSGGGGSGGGGSGGGGSGGVPWLTQQPLQLTILVPLQEYQEKILSKTALPEDQKQQLKTLFVKYDNLWQHWENQVGHRKIRPHNIATGDYPPRPQKQYPINPKAKPSIQIVIDDLLKQGVLTPQNSTMNTPVYPVPKPDGRWRMVLDYREVNKTIPLTAAQNQHSAGILATIVRQKYKTTLDLANGFWAHPITPESYWLTAFTWQGKQYCWTRLPQGFLNSPALFNADVVDLLKEIPNVQVYVDDIYLSHDDPKEHVQQLEKVFQILLQAGYVVSLKKSEIGQKTVEFLGFNITKEGRGLTDTFKTKLLNITPPKDLKQLQSILGKLNFARNFIPNFAELVQPLYNLIAPAKGKYIEWSEENTKQLNMVIEALNTASNLEERLPEQRLVIKVNTSPSAGYVRYYNETGKKPIMYLNYVFSKAELKFSMLEKLLTTMHKALIKAMDLAMGQEILVYSPIVSMTKIQKTPLPERKALPIRWITWMTYLEDPRIQFHYDKTLPELKHIPDVYTSSQSPVKHPSQYEGVFYTDGSAIKSPDPTKSNNAGMGIVHATYKPEYQVLNQWSIPLGNHTAQMAEIAAVEFACKKALKIPGPVLVITDSFYVAESANKELPYWKSNGFVNNKKKPLKHISKWKSIAECLSMKPDITIQHEKGISLQIPVFILKGNALADKLATQGSYVVNAGKRTADGSEFEKRTADGSEFESPKKKAKVE

SEQ ID NO: 1315 - protein, 2087 aa, synthetic construct
MPAAKRVKLDGGDKKYSIGLDIGTNSVGWAVITDEYKVPSKKFKVLGNTDRHSIKKNLIGALLFDSGETAEATRLKRTARRRYTRRKNRICYLQEIFSNEMAKVDDSFFHRLEESFLVEEDKKHERHPIFGNIVDEVAYHEKYPTIYHLRKKLVDSTDKADLRLIYLALAHMIKFRGHFLIEGDLNPDNSDVDKLFIQLVQTYNQLFEENPINASGVDAKAILSARLSKSRRLENLIAQLPGEKKNGLFGNLIALSLGLTPNFKSNFDLAEDAKLQLSKDTYDDDLDNLLAQIGDQYADLFLAAKNLSDAILLSDILRVNTEITKAPLSASMIKRYDEHHQDLTLLKALVRQQLPEKYKEIFFDQSKNGYAGYIDGGASQEEFYKFIKPILEKMDGTEELLVKLNREDLLRKQRTFDNGSIPHQIHLGELHAILRRQEDFYPFLKDNREKIEKILTFRIPYYVGPLARGNSRFAWMTRKSEETITPWNFEEVVDKGASAQSFIERMTNFDKNLPNEKVLPKHSLLYEYFTVYNELTKVKYVTEGMRKPAFLSGEQKKAIVDLLFKTNRKVTVKQLKEDYFKKIECFDSVEISGVEDRFNASLGTYHDLLKIIKDKDFLDNEENEDILEDIVLTLTLFEDREMIEERLKTYAHLFDDKVMKQLKRRRYTGWGRLSRKLINGIRDKQSGKTILDFLKSDGFANRNFMQLIHDDSLTFKEDIQKAQVSGQGDSLHEHIANLAGSPAIKKGILQTVKVVDELVKVMGRHKPENIVIEMARENQTTQKGQKNSRERMKRIEEGIKELGSQILKEHPVENTQLQNEKLYLYYLQNGRDMYVDQELDINRLSDYDVDHIVPQSFLKDDSIDNKVLTRSDKARGKSDNVPSEEVVKKMKNYWRQLLNAKLITQRKFDNLTKAERGGLSELDKAGFIKRQLVETRQITKHVAQILDSRMNTKYDENDKLIREVKVITLKSKLVSDFRKDFQFYKVREINNYHHAHDAYLNAVVGTALIKKYPKLESEFVYGDYKVYDVRKMIAKSEQEIGKATAKYFFYSNIMNFFKTEITLANGEIRKRPLIETNGETGEIVWDKGRDFATVRKVLSMPQVNIVKKTEVQTGGFSKESILPKRNSDKLIARKKDWDPKKYGGFDSPTVAYSVLVVAKVEKGKSKKLKSVKELLGITIMERSSFEKNPIDFLEAKGYKEVKKDLIIKLPKYSLFELENGRKRMLASAGELQKGNELALPSKYVNFLYLASHYEKLKGSPEDNEQKQLFVEQHKHYLDEIIEQISEFSKRVILADANLDKVLSAYNKHRDKPIREQAENIIHLFTLTNLGAPAAFKYFDTTIDRKRYTSTKEVLDATLIHQSITGLYETRIDLSQLGGDGGGSSPAPEAAAKGGVPWLTQQPLQLTILVPLQEYQEKILSKTALPEDQKQQLKTLFVKYDNLWQHWENQVGHRKIRPHNIATGDYPPRPQKQYPINPKAKPSIQIVIDDLLKQGVLTPQNSTMNTPVYPVPKPDGRWRMVLDYREVNKTIPLTAAQNQHSAGILATIVRQKYKTTLDLANGFWAHPITPESYWLTAFTWQGKQYCWTRLPQGFLNSPALFNADVVDLLKEIPNVQVYVDDIYLSHDDPKEHVQQLEKVFQILLQAGYVVSLKKSEIGQKTVEFLGFNITKEGRGLTDTFKTKLLNITPPKDLKQLQSILGKLNFARNFIPNFAELVQPLYNLIAPAKGKYIEWSEENTKQLNMVIEALNTASNLEERLPEQRLVIKVNTSPSAGYVRYYNETGKKPIMYLNYVFSKAELKFSMLEKLLTTMHKALIKAMDLAMGQEILVYSPIVSMTKIQKTPLPERKALPIRWITWMTYLEDPRIQFHYDKTLPELKHIPDVYTSSQSPVKHPSQYEGVFYTDGSAIKSPDPTKSNNAGMGIVHATYKPEYQVLNQWSIPLGNHTAQMAEIAAVEFACKKALKIPGPVLVITDSFYVAESANKELPYWKSNGFVNNKKKPLKHISKWKSIAECLSMKPDITIQHEKGISLQIPVFILKGNALADKLATQGSYVVNAGKRTADGSEFEKRTADGSEFESPKKKAKVE

SEQ ID NO: 1316 - protein, 2086 aa, synthetic construct
MPAAKRVKLDGGDKKYSIGLDIGTNSVGWAVITDEYKVPSKKFKVLGNTDRHSIKKNLIGALLFDSGETAEATRLKRTARRRYTRRKNRICYLQEIFSNEMAKVDDSFFHRLEESFLVEEDKKHERHPIFGNIVDEVAYHEKYPTIYHLRKKLVDSTDKADLRLIYLALAHMIKFRGHFLIEGDLNPDNSDVDKLFIQLVQTYNQLFEENPINASGVDAKAILSARLSKSRRLENLIAQLPGEKKNGLFGNLIALSLGLTPNFKSNFDLAEDAKLQLSKDTYDDDLDNLLAQIGDQYADLFLAAKNLSDAILLSDILRVNTEITKAPLSASMIKRYDEHHQDLTLLKALVRQQLPEKYKEIFFDQSKNGYAGYIDGGASQEEFYKFIKPILEKMDGTEELLVKLNREDLLRKQRTFDNGSIPHQIHLGELHAILRRQEDFYPFLKDNREKIEKILTFRIPYYVGPLARGNSRFAWMTRKSEETITPWNFEEVVDKGASAQSFIERMTNFDKNLPNEKVLPKHSLLYEYFTVYNELTKVKYVTEGMRKPAFLSGEQKKAIVDLLFKTNRKVTVKQLKEDYFKKIECFDSVEISGVEDRFNASLGTYHDLLKIIKDKDFLDNEENEDILEDIVLTLTLFEDREMIEERLKTYAHLFDDKVMKQLKRRRYTGWGRLSRKLINGIRDKQSGKTILDFLKSDGFANRNFMQLIHDDSLTFKEDIQKAQVSGQGDSLHEHIANLAGSPAIKKGILQTVKVVDELVKVMGRHKPENIVIEMARENQTTQKGQKNSRERMKRIEEGIKELGSQILKEHPVENTQLQNEKLYLYYLQNGRDMYVDQELDINRLSDYDVDHIVPQSFLKDDSIDNKVLTRSDKARGKSDNVPSEEVVKKMKNYWRQLLNAKLITQRKFDNLTKAERGGLSELDKAGFIKRQLVETRQITKHVAQILDSRMNTKYDENDKLIREVKVITLKSKLVSDFRKDFQFYKVREINNYHHAHDAYLNAVVGTALIKKYPKLESEFVYGDYKVYDVRKMIAKSEQEIGKATAKYFFYSNIMNFFKTEITLANGEIRKRPLIETNGETGEIVWDKGRDFATVRKVLSMPQVNIVKKTEVQTGGFSKESILPKRNSDKLIARKKDWDPKKYGGFDSPTVAYSVLVVAKVEKGKSKKLKSVKELLGITIMERSSFEKNPIDFLEAKGYKEVKKDLIIKLPKYSLFELENGRKRMLASAGELQKGNELALPSKYVNFLYLASHYEKLKGSPEDNEQKQLFVEQHKHYLDEIIEQISEFSKRVILADANLDKVLSAYNKHRDKPIREQAENIIHLFTLTNLGAPAAFKYFDTTIDRKRYTSTKEVLDATLIHQSITGLYETRIDLSQLGGDGGGGGGSGGGGSGGVPWLTQQPLQLTILVPLQEYQEKILSKTALPEDQKQQLKTLFVKYDNLWQHWENQVGHRKIRPHNIATGDYPPRPQKQYPINPKAKPSIQIVIDDLLKQGVLTPQNSTMNTPVYPVPKPDGRWRMVLDYREVNKTIPLTAAQNQHSAGILATIVRQKYKTTLDLANGFWAHPITPESYWLTAFTWQGKQYCWTRLPQGFLNSPALFNADVVDLLKEIPNVQVYVDDIYLSHDDPKEHVQQLEKVFQILLQAGYVVSLKKSEIGQKTVEFLGFNITKEGRGLTDTFKTKLLNITPPKDLKQLQSILGKLNFARNFIPNFAELVQPLYNLIAPAKGKYIEWSEENTKQLNMVIEALNTASNLEERLPEQRLVIKVNTSPSAGYVRYYNETGKKPIMYLNYVFSKAELKFSMLEKLLTTMHKALIKAMDLAMGQEILVYSPIVSMTKIQKTPLPERKALPIRWITWMTYLEDPRIQFHYDKTLPELKHIPDVYTSSQSPVKHPSQYEGVFYTDGSAIKSPDPTKSNNAGMGIVHATYKPEYQVLNQWSIPLGNHTAQMAEIAAVEFACKKALKIPGPVLVITDSFYVAESANKELPYWKSNGFVNNKKKPLKHISKWKSIAECLSMKPDITIQHEKGISLQIPVFILKGNALADKLATQGSYVVNAGKRTADGSEFEKRTADGSEFESPKKKAKVE

SEQ ID NO: 1317 - protein, 2087 aa, synthetic construct
MPAAKRVKLDGGDKKYSIGLDIGTNSVGWAVITDEYKVPSKKFKVLGNTDRHSIKKNLIGALLFDSGETAEATRLKRTARRRYTRRKNRICYLQEIFSNEMAKVDDSFFHRLEESFLVEEDKKHERHPIFGNIVDEVAYHEKYPTIYHLRKKLVDSTDKADLRLIYLALAHMIKFRGHFLIEGDLNPDNSDVDKLFIQLVQTYNQLFEENPINASGVDAKAILSARLSKSRRLENLIAQLPGEKKNGLFGNLIALSLGLTPNFKSNFDLAEDAKLQLSKDTYDDDLDNLLAQIGDQYADLFLAAKNLSDAILLSDILRVNTEITKAPLSASMIKRYDEHHQDLTLLKALVRQQLPEKYKEIFFDQSKNGYAGYIDGGASQEEFYKFIKPILEKMDGTEELLVKLNREDLLRKQRTFDNGSIPHQIHLGELHAILRRQEDFYPFLKDNREKIEKILTFRIPYYVGPLARGNSRFAWMTRKSEETITPWNFEEVVDKGASAQSFIERMTNFDKNLPNEKVLPKHSLLYEYFTVYNELTKVKYVTEGMRKPAFLSGEQKKAIVDLLFKTNRKVTVKQLKEDYFKKIECFDSVEISGVEDRFNASLGTYHDLLKIIKDKDFLDNEENEDILEDIVLTLTLFEDREMIEERLKTYAHLFDDKVMKQLKRRRYTGWGRLSRKLINGIRDKQSGKTILDFLKSDGFANRNFMQLIHDDSLTFKEDIQKAQVSGQGDSLHEHIANLAGSPAIKKGILQTVKVVDELVKVMGRHKPENIVIEMARENQTTQKGQKNSRERMKRIEEGIKELGSQILKEHPVENTQLQNEKLYLYYLQNGRDMYVDQELDINRLSDYDVDHIVPQSFLKDDSIDNKVLTRSDKARGKSDNVPSEEVVKKMKNYWRQLLNAKLITQRKFDNLTKAERGGLSELDKAGFIKRQLVETRQITKHVAQILDSRMNTKYDENDKLIREVKVITLKSKLVSDFRKDFQFYKVREINNYHHAHDAYLNAVVGTALIKKYPKLESEFVYGDYKVYDVRKMIAKSEQEIGKATAKYFFYSNIMNFFKTEITLANGEIRKRPLIETNGETGEIVWDKGRDFATVRKVLSMPQVNIVKKTEVQTGGFSKESILPKRNSDKLIARKKDWDPKKYGGFDSPTVAYSVLVVAKVEKGKSKKLKSVKELLGITIMERSSFEKNPIDFLEAKGYKEVKKDLIIKLPKYSLFELENGRKRMLASAGELQKGNELALPSKYVNFLYLASHYEKLKGSPEDNEQKQLFVEQHKHYLDEIIEQISEFSKRVILADANLDKVLSAYNKHRDKPIREQAENIIHLFTLTNLGAPAAFKYFDTTIDRKRYTSTKEVLDATLIHQSITGLYETRIDLSQLGGDGGPAPGSSEAAAKGGVPWLTQQPLQLTILVPLQEYQEKILSKTALPEDQKQQLKTLFVKYDNLWQHWENQVGHRKIRPHNIATGDYPPRPQKQYPINPKAKPSIQIVIDDLLKQGVLTPQNSTMNTPVYPVPKPDGRWRMVLDYREVNKTIPLTAAQNQHSAGILATIVRQKYKTTLDLANGFWAHPITPESYWLTAFTWQGKQYCWTRLPQGFLNSPALFNADVVDLLKEIPNVQVYVDDIYLSHDDPKEHVQQLEKVFQILLQAGYVVSLKKSEIGQKTVEFLGFNITKEGRGLTDTFKTKLLNITPPKDLKQLQSILGKLNFARNFIPNFAELVQPLYNLIAPAKGKYIEWSEENTKQLNMVIEALNTASNLEERLPEQRLVIKVNTSPSAGYVRYYNETGKKPIMYLNYVFSKAELKFSMLEKLLTTMHKALIKAMDLAMGQEILVYSPIVSMTKIQKTPLPERKALPIRWITWMTYLEDPRIQFHYDKTLPELKHIPDVYTSSQSPVKHPSQYEGVFYTDGSAIKSPDPTKSNNAGMGIVHATYKPEYQVLNQWSIPLGNHTAQMAEIAAVEFACKKALKIPGPVLVITDSFYVAESANKELPYWKSNGFVNNKKKPLKHISKWKSIAECLSMKPDITIQHEKGISLQIPVFILKGNALADKLATQGSYVVNAGKRTADGSEFEKRTADGSEFESPKKKAKVE

SEQ ID NO: 1318 - protein, 2087 aa, synthetic construct
MPAAKRVKLDGGDKKYSIGLDIGTNSVGWAVITDEYKVPSKKFKVLGNTDRHSIKKNLIGALLFDSGETAEATRLKRTARRRYTRRKNRICYLQEIFSNEMAKVDDSFFHRLEESFLVEEDKKHERHPIFGNIVDEVAYHEKYPTIYHLRKKLVDSTDKADLRLIYLALAHMIKFRGHFLIEGDLNPDNSDVDKLFIQLVQTYNQLFEENPINASGVDAKAILSARLSKSRRLENLIAQLPGEKKNGLFGNLIALSLGLTPNFKSNFDLAEDAKLQLSKDTYDDDLDNLLAQIGDQYADLFLAAKNLSDAILLSDILRVNTEITKAPLSASMIKRYDEHHQDLTLLKALVRQQLPEKYKEIFFDQSKNGYAGYIDGGASQEEFYKFIKPILEKMDGTEELLVKLNREDLLRKQRTFDNGSIPHQIHLGELHAILRRQEDFYPFLKDNREKIEKILTFRIPYYVGPLARGNSRFAWMTRKSEETITPWNFEEVVDKGASAQSFIERMTNFDKNLPNEKVLPKHSLLYEYFTVYNELTKVKYVTEGMRKPAFLSGEQKKAIVDLLFKTNRKVTVKQLKEDYFKKIECFDSVEISGVEDRFNASLGTYHDLLKIIKDKDFLDNEENEDILEDIVLTLTLFEDREMIEERLKTYAHLFDDKVMKQLKRRRYTGWGRLSRKLINGIRDKQSGKTILDFLKSDGFANRNFMQLIHDDSLTFKEDIQKAQVSGQGDSLHEHIANLAGSPAIKKGILQTVKVVDELVKVMGRHKPENIVIEMARENQTTQKGQKNSRERMKRIEEGIKELGSQILKEHPVENTQLQNEKLYLYYLQNGRDMYVDQELDINRLSDYDVDHIVPQSFLKDDSIDNKVLTRSDKARGKSDNVPSEEVVKKMKNYWRQLLNAKLITQRKFDNLTKAERGGLSELDKAGFIKRQLVETRQITKHVAQILDSRMNTKYDENDKLIREVKVITLKSKLVSDFRKDFQFYKVREINNYHHAHDAYLNAVVGTALIKKYPKLESEFVYGDYKVYDVRKMIAKSEQEIGKATAKYFFYSNIMNFFKTEITLANGEIRKRPLIETNGETGEIVWDKGRDFATVRKVLSMPQVNIVKKTEVQTGGFSKESILPKRNSDKLIARKKDWDPKKYGGFDSPTVAYSVLVVAKVEKGKSKKLKSVKELLGITIMERSSFEKNPIDFLEAKGYKEVKKDLIIKLPKYSLFELENGRKRMLASAGELQKGNELALPSKYVNFLYLASHYEKLKGSPEDNEQKQLFVEQHKHYLDEIIEQISEFSKRVILADANLDKVLSAYNKHRDKPIREQAENIIHLFTLTNLGAPAAFKYFDTTIDRKRYTSTKEVLDATLIHQSITGLYETRIDLSQLGGDGGPAPAPAPAPAPGGVPWLTQQPLQLTILVPLQEYQEKILSKTALPEDQKQQLKTLFVKYDNLWQHWENQVGHRKIRPHNIATGDYPPRPQKQYPINPKAKPSIQIVIDDLLKQGVLTPQNSTMNTPVYPVPKPDGRWRMVLDYREVNKTIPLTAAQNQHSAGILATIVRQKYKTTLDLANGFWAHPITPESYWLTAFTWQGKQYCWTRLPQGFLNSPALFNADVVDLLKEIPNVQVYVDDIYLSHDDPKEHVQQLEKVFQILLQAGYVVSLKKSEIGQKTVEFLGFNITKEGRGLTDTFKTKLLNITPPKDLKQLQSILGKLNFARNFIPNFAELVQPLYNLIAPAKGKYIEWSEENTKQLNMVIEALNTASNLEERLPEQRLVIKVNTSPSAGYVRYYNETGKKPIMYLNYVFSKAELKFSMLEKLLTTMHKALIKAMDLAMGQEILVYSPIVSMTKIQKTPLPERKALPIRWITWMTYLEDPRIQFHYDKTLPELKHIPDVYTSSQSPVKHPSQYEGVFYTDGSAIKSPDPTKSNNAGMGIVHATYKPEYQVLNQWSIPLGNHTAQMAEIAAVEFACKKALKIPGPVLVITDSFYVAESANKELPYWKSNGFVNNKKKPLKHISKWKSIAECLSMKPDITIQHEKGISLQIPVFILKGNALADKLATQGSYVVNAGKRTADGSEFEKRTADGSEFESPKKKAKVE

SEQ ID NO: 1319 - protein, 2085 aa, synthetic construct
MPAAKRVKLDGGDKKYSIGLDIGTNSVGWAVITDEYKVPSKKFKVLGNTDRHSIKKNLIGALLFDSGETAEATRLKRTARRRYTRRKNRICYLQEIFSNEMAKVDDSFFHRLEESFLVEEDKKHERHPIFGNIVDEVAYHEKYPTIYHLRKKLVDSTDKADLRLIYLALAHMIKFRGHFLIEGDLNPDNSDVDKLFIQLVQTYNQLFEENPINASGVDAKAILSARLSKSRRLENLIAQLPGEKKNGLFGNLIALSLGLTPNFKSNFDLAEDAKLQLSKDTYDDDLDNLLAQIGDQYADLFLAAKNLSDAILLSDILRVNTEITKAPLSASMIKRYDEHHQDLTLLKALVRQQLPEKYKEIFFDQSKNGYAGYIDGGASQEEFYKFIKPILEKMDGTEELLVKLNREDLLRKQRTFDNGSIPHQIHLGELHAILRRQEDFYPFLKDNREKIEKILTFRIPYYVGPLARGNSRFAWMTRKSEETITPWNFEEVVDKGASAQSFIERMTNFDKNLPNEKVLPKHSLLYEYFTVYNELTKVKYVTEGMRKPAFLSGEQKKAIVDLLFKTNRKVTVKQLKEDYFKKIECFDSVEISGVEDRFNASLGTYHDLLKIIKDKDFLDNEENEDILEDIVLTLTLFEDREMIEERLKTYAHLFDDKVMKQLKRRRYTGWGRLSRKLINGIRDKQSGKTILDFLKSDGFANRNFMQLIHDDSLTFKEDIQKAQVSGQGDSLHEHIANLAGSPAIKKGILQTVKVVDELVKVMGRHKPENIVIEMARENQTTQKGQKNSRERMKRIEEGIKELGSQILKEHPVENTQLQNEKLYLYYLQNGRDMYVDQELDINRLSDYDVDHIVPQSFLKDDSIDNKVLTRSDKARGKSDNVPSEEVVKKMKNYWRQLLNAKLITQRKFDNLTKAERGGLSELDKAGFIKRQLVETRQITKHVAQILDSRMNTKYDENDKLIREVKVITLKSKLVSDFRKDFQFYKVREINNYHHAHDAYLNAVVGTALIKKYPKLESEFVYGDYKVYDVRKMIAKSEQEIGKATAKYFFYSNIMNFFKTEITLANGEIRKRPLIETNGETGEIVWDKGRDFATVRKVLSMPQVNIVKKTEVQTGGFSKESILPKRNSDKLIARKKDWDPKKYGGFDSPTVAYSVLVVAKVEKGKSKKLKSVKELLGITIMERSSFEKNPIDFLEAKGYKEVKKDLIIKLPKYSLFELENGRKRMLASAGELQKGNELALPSKYVNFLYLASHYEKLKGSPEDNEQKQLFVEQHKHYLDEIIEQISEFSKRVILADANLDKVLSAYNKHRDKPIREQAENIIHLFTLTNLGAPAAFKYFDTTIDRKRYTSTKEVLDATLIHQSITGLYETRIDLSQLGGDGGPAPGSSGGGGGVPWLTQQPLQLTILVPLQEYQEKILSKTALPEDQKQQLKTLFVKYDNLWQHWENQVGHRKIRPHNIATGDYPPRPQKQYPINPKAKPSIQIVIDDLLKQGVLTPQNSTMNTPVYPVPKPDGRWRMVLDYREVNKTIPLTAAQNQHSAGILATIVRQKYKTTLDLANGFWAHPITPESYWLTAFTWQGKQYCWTRLPQGFLNSPALFNADVVDLLKEIPNVQVYVDDIYLSHDDPKEHVQQLEKVFQILLQAGYVVSLKKSEIGQKTVEFLGFNITKEGRGLTDTFKTKLLNITPPKDLKQLQSILGKLNFARNFIPNFAELVQPLYNLIAPAKGKYIEWSEENTKQLNMVIEALNTASNLEERLPEQRLVIKVNTSPSAGYVRYYNETGKKPIMYLNYVFSKAELKFSMLEKLLTTMHKALIKAMDLAMGQEILVYSPIVSMTKIQKTPLPERKALPIRWITWMTYLEDPRIQFHYDKTLPELKHIPDVYTSSQSPVKHPSQYEGVFYTDGSAIKSPDPTKSNNAGMGIVHATYKPEYQVLNQWSIPLGNHTAQMAEIAAVEFACKKALKIPGPVLVITDSFYVAESANKELPYWKSNGFVNNKKKPLKHISKWKSIAECLSMKPDITIQHEKGISLQIPVFILKGNALADKLATQGSYVVNAGKRTADGSEFEKRTADGSEFESPKKKAKVE

SEQ ID NO: 1320 - protein, 2176 aa, synthetic construct
MPAAKRVKLDGGDKKYSIGLDIGTNSVGWAVITDEYKVPSKKFKVLGNTDRHSIKKNLIGALLFDSGETAEATRLKRTARRRYTRRKNRICYLQEIFSNEMAKVDDSFFHRLEESFLVEEDKKHERHPIFGNIVDEVAYHEKYPTIYHLRKKLVDSTDKADLRLIYLALAHMIKFRGHFLIEGDLNPDNSDVDKLFIQLVQTYNQLFEENPINASGVDAKAILSARLSKSRRLENLIAQLPGEKKNGLFGNLIALSLGLTPNFKSNFDLAEDAKLQLSKDTYDDDLDNLLAQIGDQYADLFLAAKNLSDAILLSDILRVNTEITKAPLSASMIKRYDEHHQDLTLLKALVRQQLPEKYKEIFFDQSKNGYAGYIDGGASQEEFYKFIKPILEKMDGTEELLVKLNREDLLRKQRTFDNGSIPHQIHLGELHAILRRQEDFYPFLKDNREKIEKILTFRIPYYVGPLARGNSRFAWMTRKSEETITPWNFEEVVDKGASAQSFIERMTNFDKNLPNEKVLPKHSLLYEYFTVYNELTKVKYVTEGMRKPAFLSGEQKKAIVDLLFKTNRKVTVKQLKEDYFKKIECFDSVEISGVEDRFNASLGTYHDLLKIIKDKDFLDNEENEDILEDIVLTLTLFEDREMIEERLKTYAHLFDDKVMKQLKRRRYTGWGRLSRKLINGIRDKQSGKTILDFLKSDGFANRNFMQLIHDDSLTFKEDIQKAQVSGQGDSLHEHIANLAGSPAIKKGILQTVKVVDELVKVMGRHKPENIVIEMARENQTTQKGQKNSRERMKRIEEGIKELGSQILKEHPVENTQLQNEKLYLYYLQNGRDMYVDQELDINRLSDYDVDHIVPQSFLKDDSIDNKVLTRSDKARGKSDNVPSEEVVKKMKNYWRQLLNAKLITQRKFDNLTKAERGGLSELDKAGFIKRQLVETRQITKHVAQILDSRMNTKYDENDKLIREVKVITLKSKLVSDFRKDFQFYKVREINNYHHAHDAYLNAVVGTALIKKYPKLESEFVYGDYKVYDVRKMIAKSEQEIGKATAKYFFYSNIMNFFKTEITLANGEIRKRPLIETNGETGEIVWDKGRDFATVRKVLSMPQVNIVKKTEVQTGGFSKESILPKRNSDKLIARKKDWDPKKYGGFDSPTVAYSVLVVAKVEKGKSKKLKSVKELLGITIMERSSFEKNPIDFLEAKGYKEVKKDLIIKLPKYSLFELENGRKRMLASAGELQKGNELALPSKYVNFLYLASHYEKLKGSPEDNEQKQLFVEQHKHYLDEIIEQISEFSKRVILADANLDKVLSAYNKHRDKPIREQAENIIHLFTLTNLGAPAAFKYFDTTIDRKRYTSTKEVLDATLIHQSITGLYETRIDLSQLGGDGGEAAAKPAPGSSGGMNPLQLLQPLPAEIKGTKLLAHWNSGATITCIPESFLEDEQPIKKTLIKTIHGEKQQNVYYVTFKVKGRKVEAEVIASPYEYILLSPTDVPWLTQQPLQLTILVPLQEYQEKILSKTALPEDQKQQLKTLFVKYDNLWQHWENQVGHRKIRPHNIATGDYPPRPQKQYPINPKAKPSIQIVIDDLLKQGVLTPQNSTMNTPVYPVPKPDGRWRMVLDYREVNKTIPLTAAQNQHSAGILATIVRQKYKTTLDLANGFWAHPITPESYWLTAFTWQGKQYCWTRLPQGFLNSPALFNADVVDLLKEIPNVQVYVDDIYLSHDDPKEHVQQLEKVFQILLQAGYVVSLKKSEIGQKTVEFLGFNITKEGRGLTDTFKTKLLNITPPKDLKQLQSILGLLNFARNFIPNFAELVQPLYNLIAPAKGKYIEWSEENTKQLNMVIEALNTASNLEERLPEQRLVIKVNTSPSAGYVRYYNETGKKPIMYLNYVFSKAELKFSMLEKLLTTMHKALIKAMDLAMGQEILVYSPIVSMTKIQKTPLPERKALPIRWITWMTYLEDPRIQFHYDKTLPELKHIPDVYTSSQSPVKHPSQYEGVFYTDGSAIKSPDPTKSNNAGMGIVHATYKPEYQVLNQWSIPLGNHTAQMAEIAAVEFACKKALKIPGPVLVITDSFYVAESANKELPYWKSNGFVNNKKKPLKHISKWKSIAECLSMKPDITIQHEKGISLQIPVFILKGNALADKLATQGSYVVNAGKRTADGSEFEKRTADGSEFESPKKKAKVE

SEQ ID NO: 1321 - protein, 2178 aa, synthetic construct
MPAAKRVKLDGGDKKYSIGLDIGTNSVGWAVITDEYKVPSKKFKVLGNTDRHSIKKNLIGALLFDSGETAEATRLKRTARRRYTRRKNRICYLQEIFSNEMAKVDDSFFHRLEESFLVEEDKKHERHPIFGNIVDEVAYHEKYPTIYHLRKKLVDSTDKADLRLIYLALAHMIKFRGHFLIEGDLNPDNSDVDKLFIQLVQTYNQLFEENPINASGVDAKAILSARLSKSRRLENLIAQLPGEKKNGLFGNLIALSLGLTPNFKSNFDLAEDAKLQLSKDTYDDDLDNLLAQIGDQYADLFLAAKNLSDAILLSDILRVNTEITKAPLSASMIKRYDEHHQDLTLLKALVRQQLPEKYKEIFFDQSKNGYAGYIDGGASQEEFYKFIKPILEKMDGTEELLVKLNREDLLRKQRTFDNGSIPHQIHLGELHAILRRQEDFYPFLKDNREKIEKILTFRIPYYVGPLARGNSRFAWMTRKSEETITPWNFEEVVDKGASAQSFIERMTNFDKNLPNEKVLPKHSLLYEYFTVYNELTKVKYVTEGMRKPAFLSGEQKKAIVDLLFKTNRKVTVKQLKEDYFKKIECFDSVEISGVEDRFNASLGTYHDLLKIIKDKDFLDNEENEDILEDIVLTLTLFEDREMIEERLKTYAHLFDDKVMKQLKRRRYTGWGRLSRKLINGIRDKQSGKTILDFLKSDGFANRNFMQLIHDDSLTFKEDIQKAQVSGQGDSLHEHIANLAGSPAIKKGILQTVKVVDELVKVMGRHKPENIVIEMARENQTTQKGQKNSRERMKRIEEGIKELGSQILKEHPVENTQLQNEKLYLYYLQNGRDMYVDQELDINRLSDYDVDHIVPQSFLKDDSIDNKVLTRSDKARGKSDNVPSEEVVKKMKNYWRQLLNAKLITQRKFDNLTKAERGGLSELDKAGFIKRQLVETRQITKHVAQILDSRMNTKYDENDKLIREVKVITLKSKLVSDFRKDFQFYKVREINNYHHAHDAYLNAVVGTALIKKYPKLESEFVYGDYKVYDVRKMIAKSEQEIGKATAKYFFYSNIMNFFKTEITLANGEIRKRPLIETNGETGEIVWDKGRDFATVRKVLSMPQVNIVKKTEVQTGGFSKESILPKRNSDKLIARKKDWDPKKYGGFDSPTVAYSVLVVAKVEKGKSKKLKSVKELLGITIMERSSFEKNPIDFLEAKGYKEVKKDLIIKLPKYSLFELENGRKRMLASAGELQKGNELALPSKYVNFLYLASHYEKLKGSPEDNEQKQLFVEQHKHYLDEIIEQISEFSKRVILADANLDKVLSAYNKHRDKPIREQAENIIHLFTLTNLGAPAAFKYFDTTIDRKRYTSTKEVLDATLIHQSITGLYETRIDLSQLGGDGGPAPAPAPAPAPAPGGMNPLQLLQPLPAEIKGTKLLAHWNSGATITCIPESFLEDEQPIKKTLIKTIHGEKQQNVYYVTFKVKGRKVEAEVIASPYEYILLSPTDVPWLTQQPLQLTILVPLQEYQEKILSKTALPEDQKQQLKTLFVKYDNLWQHWENQVGHRKIRPHNIATGDYPPRPQKQYPINPKAKPSIQIVIDDLLKQGVLTPQNSTMNTPVYPVPKPDGRWRMVLDYREVNKTIPLTAAQNQHSAGILATIVRQKYKTTLDLANGFWAHPITPESYWLTAFTWQGKQYCWTRLPQGFLNSPALFNADVVDLLKEIPNVQVYVDDIYLSHDDPKEHVQQLEKVFQILLQAGYVVSLKKSEIGQKTVEFLGFNITKEGRGLTDTFKTKLLNITPPKDLKQLQSILGLLNFARNFIPNFAELVQPLYNLIAPAKGKYIEWSEENTKQLNMVIEALNTASNLEERLPEQRLVIKVNTSPSAGYVRYYNETGKKPIMYLNYVFSKAELKFSMLEKLLTTMHKALIKAMDLAMGQEILVYSPIVSMTKIQKTPLPERKALPIRWITWMTYLEDPRIQFHYDKTLPELKHIPDVYTSSQSPVKHPSQYEGVFYTDGSAIKSPDPTKSNNAGMGIVHATYKPEYQVLNQWSIPLGNHTAQMAEIAAVEFACKKALKIPGPVLVITDSFYVAESANKELPYWKSNGFVNNKKKPLKHISKWKSIAECLSMKPDITIQHEKGISLQIPVFILKGNALADKLATQGSYVVNAGKRTADGSEFEKRTADGSEFESPKKKAKVE

SEQ ID NO: 1322 - protein, 2174 aa, synthetic construct
MPAAKRVKLDGGDKKYSIGLDIGTNSVGWAVITDEYKVPSKKFKVLGNTDRHSIKKNLIGALLFDSGETAEATRLKRTARRRYTRRKNRICYLQEIFSNEMAKVDDSFFHRLEESFLVEEDKKHERHPIFGNIVDEVAYHEKYPTIYHLRKKLVDSTDKADLRLIYLALAHMIKFRGHFLIEGDLNPDNSDVDKLFIQLVQTYNQLFEENPINASGVDAKAILSARLSKSRRLENLIAQLPGEKKNGLFGNLIALSLGLTPNFKSNFDLAEDAKLQLSKDTYDDDLDNLLAQIGDQYADLFLAAKNLSDAILLSDILRVNTEITKAPLSASMIKRYDEHHQDLTLLKALVRQQLPEKYKEIFFDQSKNGYAGYIDGGASQEEFYKFIKPILEKMDGTEELLVKLNREDLLRKQRTFDNGSIPHQIHLGELHAILRRQEDFYPFLKDNREKIEKILTFRIPYYVGPLARGNSRFAWMTRKSEETITPWNFEEVVDKGASAQSFIERMTNFDKNLPNEKVLPKHSLLYEYFTVYNELTKVKYVTEGMRKPAFLSGEQKKAIVDLLFKTNRKVTVKQLKEDYFKKIECFDSVEISGVEDRFNASLGTYHDLLKIIKDKDFLDNEENEDILEDIVLTLTLFEDREMIEERLKTYAHLFDDKVMKQLKRRRYTGWGRLSRKLINGIRDKQSGKTILDFLKSDGFANRNFMQLIHDDSLTFKEDIQKAQVSGQGDSLHEHIANLAGSPAIKKGILQTVKVVDELVKVMGRHKPENIVIEMARENQTTQKGQKNSRERMKRIEEGIKELGSQILKEHPVENTQLQNEKLYLYYLQNGRDMYVDQELDINRLSDYDVDHIVPQSFLKDDSIDNKVLTRSDKARGKSDNVPSEEVVKKMKNYWRQLLNAKLITQRKFDNLTKAERGGLSELDKAGFIKRQLVETRQITKHVAQILDSRMNTKYDENDKLIREVKVITLKSKLVSDFRKDFQFYKVREINNYHHAHDAYLNAVVGTALIKKYPKLESEFVYGDYKVYDVRKMIAKSEQEIGKATAKYFFYSNIMNFFKTEITLANGEIRKRPLIETNGETGEIVWDKGRDFATVRKVLSMPQVNIVKKTEVQTGGFSKESILPKRNSDKLIARKKDWDPKKYGGFDSPTVAYSVLVVAKVEKGKSKKLKSVKELLGITIMERSSFEKNPIDFLEAKGYKEVKKDLIIKLPKYSLFELENGRKRMLASAGELQKGNELALPSKYVNFLYLASHYEKLKGSPEDNEQKQLFVEQHKHYLDEIIEQISEFSKRVILADANLDKVLSAYNKHRDKPIREQAENIIHLFTLTNLGAPAAFKYFDTTIDRKRYTSTKEVLDATLIHQSITGLYETRIDLSQLGGDGGGGSGGGPAPGGMNPLQLLQPLPAEIKGTKLLAHWNSGATITCIPESFLEDEQPIKKTLIKTIHGEKQQNVYYVTFKVKGRKVEAEVIASPYEYILLSPTDVPWLTQQPLQLTILVPLQEYQEKILSKTALPEDQKQQLKTLFVKYDNLWQHWENQVGHRKIRPHNIATGDYPPRPQKQYPINPKAKPSIQIVIDDLLKQGVLTPQNSTMNTPVYPVPKPDGRWRMVLDYREVNKTIPLTAAQNQHSAGILATIVRQKYKTTLDLANGFWAHPITPESYWLTAFTWQGKQYCWTRLPQGFLNSPALFNADVVDLLKEIPNVQVYVDDIYLSHDDPKEHVQQLEKVFQILLQAGYVVSLKKSEIGQKTVEFLGFNITKEGRGLTDTFKTKLLNITPPKDLKQLQSILGLLNFARNFIPNFAELVQPLYNLIAPAKGKYIEWSEENTKQLNMVIEALNTASNLEERLPEQRLVIKVNTSPSAGYVRYYNETGKKPIMYLNYVFSKAELKFSMLEKLLTTMHKALIKAMDLAMGQEILVYSPIVSMTKIQKTPLPERKALPIRWITWMTYLEDPRIQFHYDKTLPELKHIPDVYTSSQSPVKHPSQYEGVFYTDGSAIKSPDPTKSNNAGMGIVHATYKPEYQVLNQWSIPLGNHTAQMAEIAAVEFACKKALKIPGPVLVITDSFYVAESANKELPYWKSNGFVNNKKKPLKHISKWKSIAECLSMKPDITIQHEKGISLQIPVFILKGNALADKLATQGSYVVNAGKRTADGSEFEKRTADGSEFESPKKKAKVE

SEQ ID NO: 1323 - protein, 2176 aa, synthetic construct
MPAAKRVKLDGGDKKYSIGLDIGTNSVGWAVITDEYKVPSKKFKVLGNTDRHSIKKNLIGALLFDSGETAEATRLKRTARRRYTRRKNRICYLQEIFSNEMAKVDDSFFHRLEESFLVEEDKKHERHPIFGNIVDEVAYHEKYPTIYHLRKKLVDSTDKADLRLIYLALAHMIKFRGHFLIEGDLNPDNSDVDKLFIQLVQTYNQLFEENPINASGVDAKAILSARLSKSRRLENLIAQLPGEKKNGLFGNLIALSLGLTPNFKSNFDLAEDAKLQLSKDTYDDDLDNLLAQIGDQYADLFLAAKNLSDAILLSDILRVNTEITKAPLSASMIKRYDEHHQDLTLLKALVRQQLPEKYKEIFFDQSKNGYAGYIDGGASQEEFYKFIKPILEKMDGTEELLVKLNREDLLRKQRTFDNGSIPHQIHLGELHAILRRQEDFYPFLKDNREKIEKILTFRIPYYVGPLARGNSRFAWMTRKSEETITPWNFEEVVDKGASAQSFIERMTNFDKNLPNEKVLPKHSLLYEYFTVYNELTKVKYVTEGMRKPAFLSGEQKKAIVDLLFKTNRKVTVKQLKEDYFKKIECFDSVEISGVEDRFNASLGTYHDLLKIIKDKDFLDNEENEDILEDIVLTLTLFEDREMIEERLKTYAHLFDDKVMKQLKRRRYTGWGRLSRKLINGIRDKQSGKTILDFLKSDGFANRNFMQLIHDDSLTFKEDIQKAQVSGQGDSLHEHIANLAGSPAIKKGILQTVKVVDELVKVMGRHKPENIVIEMARENQTTQKGQKNSRERMKRIEEGIKELGSQILKEHPVENTQLQNEKLYLYYLQNGRDMYVDQELDINRLSDYDVDHIVPQSFLKDDSIDNKVLTRSDKARGKSDNVPSEEVVKKMKNYWRQLLNAKLITQRKFDNLTKAERGGLSELDKAGFIKRQLVETRQITKHVAQILDSRMNTKYDENDKLIREVKVITLKSKLVSDFRKDFQFYKVREINNYHHAHDAYLNAVVGTALIKKYPKLESEFVYGDYKVYDVRKMIAKSEQEIGKATAKYFFYSNIMNFFKTEITLANGEIRKRPLIETNGETGEIVWDKGRDFATVRKVLSMPQVNIVKKTEVQTGGFSKESILPKRNSDKLIARKKDWDPKKYGGFDSPTVAYSVLVVAKVEKGKSKKLKSVKELLGITIMERSSFEKNPIDFLEAKGYKEVKKDLIIKLPKYSLFELENGRKRMLASAGELQKGNELALPSKYVNFLYLASHYEKLKGSPEDNEQKQLFVEQHKHYLDEIIEQISEFSKRVILADANLDKVLSAYNKHRDKPIREQAENIIHLFTLTNLGAPAAFKYFDTTIDRKRYTSTKEVLDATLIHQSITGLYETRIDLSQLGGDGGGGSEAAAKGGGGGMNPLQLLQPLPAEIKGTKLLAHWNSGATITCIPESFLEDEQPIKKTLIKTIHGEKQQNVYYVTFKVKGRKVEAEVIASPYEYILLSPTDVPWLTQQPLQLTILVPLQEYQEKILSKTALPEDQKQQLKTLFVKYDNLWQHWENQVGHRKIRPHNIATGDYPPRPQKQYPINPKAKPSIQIVIDDLLKQGVLTPQNSTMNTPVYPVPKPDGRWRMVLDYREVNKTIPLTAAQNQHSAGILATIVRQKYKTTLDLANGFWAHPITPESYWLTAFTWQGKQYCWTRLPQGFLNSPALFNADVVDLLKEIPNVQVYVDDIYLSHDDPKEHVQQLEKVFQILLQAGYVVSLKKSEIGQKTVEFLGFNITKEGRGLTDTFKTKLLNITPPKDLKQLQSILGLLNFARNFIPNFAELVQPLYNLIAPAKGKYIEWSEENTKQLNMVIEALNTASNLEERLPEQRLVIKVNTSPSAGYVRYYNETGKKPIMYLNYVFSKAELKFSMLEKLLTTMHKALIKAMDLAMGQEILVYSPIVSMTKIQKTPLPERKALPIRWITWMTYLEDPRIQFHYDKTLPELKHIPDVYTSSQSPVKHPSQYEGVFYTDGSAIKSPDPTKSNNAGMGIVHATYKPEYQVLNQWSIPLGNHTAQMAEIAAVEFACKKALKIPGPVLVITDSFYVAESANKELPYWKSNGFVNNKKKPLKHISKWKSIAECLSMKPDITIQHEKGISLQIPVFILKGNALADKLATQGSYVVNAGKRTADGSEFEKRTADGSEFESPKKKAKVE

SEQ ID NO: 1324 - protein, 2176 aa, synthetic construct
MPAAKRVKLDGGDKKYSIGLDIGTNSVGWAVITDEYKVPSKKFKVLGNTDRHSIKKNLIGALLFDSGETAEATRLKRTARRRYTRRKNRICYLQEIFSNEMAKVDDSFFHRLEESFLVEEDKKHERHPIFGNIVDEVAYHEKYPTIYHLRKKLVDSTDKADLRLIYLALAHMIKFRGHFLIEGDLNPDNSDVDKLFIQLVQTYNQLFEENPINASGVDAKAILSARLSKSRRLENLIAQLPGEKKNGLFGNLIALSLGLTPNFKSNFDLAEDAKLQLSKDTYDDDLDNLLAQIGDQYADLFLAAKNLSDAILLSDILRVNTEITKAPLSASMIKRYDEHHQDLTLLKALVRQQLPEKYKEIFFDQSKNGYAGYIDGGASQEEFYKFIKPILEKMDGTEELLVKLNREDLLRKQRTFDNGSIPHQIHLGELHAILRRQEDFYPFLKDNREKIEKILTFRIPYYVGPLARGNSRFAWMTRKSEETITPWNFEEVVDKGASAQSFIERMTNFDKNLPNEKVLPKHSLLYEYFTVYNELTKVKYVTEGMRKPAFLSGEQKKAIVDLLFKTNRKVTVKQLKEDYFKKIECFDSVEISGVEDRFNASLGTYHDLLKIIKDKDFLDNEENEDILEDIVLTLTLFEDREMIEERLKTYAHLFDDKVMKQLKRRRYTGWGRLSRKLINGIRDKQSGKTILDFLKSDGFANRNFMQLIHDDSLTFKEDIQKAQVSGQGDSLHEHIANLAGSPAIKKGILQTVKVVDELVKVMGRHKPENIVIEMARENQTTQKGQKNSRERMKRIEEGIKELGSQILKEHPVENTQLQNEKLYLYYLQNGRDMYVDQELDINRLSDYDVDHIVPQSFLKDDSIDNKVLTRSDKARGKSDNVPSEEVVKKMKNYWRQLLNAKLITQRKFDNLTKAERGGLSELDKAGFIKRQLVETRQITKHVAQILDSRMNTKYDENDKLIREVKVITLKSKLVSDFRKDFQFYKVREINNYHHAHDAYLNAVVGTALIKKYPKLESEFVYGDYKVYDVRKMIAKSEQEIGKATAKYFFYSNIMNFFKTEITLANGEIRKRPLIETNGETGEIVWDKGRDFATVRKVLSMPQVNIVKKTEVQTGGFSKESILPKRNSDKLIARKKDWDPKKYGGFDSPTVAYSVLVVAKVEKGKSKKLKSVKELLGITIMERSSFEKNPIDFLEAKGYKEVKKDLIIKLPKYSLFELENGRKRMLASAGELQKGNELALPSKYVNFLYLASHYEKLKGSPEDNEQKQLFVEQHKHYLDEIIEQISEFSKRVILADANLDKVLSAYNKHRDKPIREQAENIIHLFTLTNLGAPAAFKYFDTTIDRKRYTSTKEVLDATLIHQSITGLYETRIDLSQLGGDGGPAPEAAAKGGSGGMNPLQLLQPLPAEIKGTKLLAHWNSGATITCIPESFLEDEQPIKKTLIKTIHGEKQQNVYYVTFKVKGRKVEAEVIASPYEYILLSPTDVPWLTQQPLQLTILVPLQEYQEKILSKTALPEDQKQQLKTLFVKYDNLWQHWENQVGHRKIRPHNIATGDYPPRPQKQYPINPKAKPSIQIVIDDLLKQGVLTPQNSTMNTPVYPVPKPDGRWRMVLDYREVNKTIPLTAAQNQHSAGILATIVRQKYKTTLDLANGFWAHPITPESYWLTAFTWQGKQYCWTRLPQGFLNSPALFNADVVDLLKEIPNVQVYVDDIYLSHDDPKEHVQQLEKVFQILLQAGYVVSLKKSEIGQKTVEFLGFNITKEGRGLTDTFKTKLLNITPPKDLKQLQSILGLLNFARNFIPNFAELVQPLYNLIAPAKGKYIEWSEENTKQLNMVIEALNTASNLEERLPEQRLVIKVNTSPSAGYVRYYNETGKKPIMYLNYVFSKAELKFSMLEKLLTTMHKALIKAMDLAMGQEILVYSPIVSMTKIQKTPLPERKALPIRWITWMTYLEDPRIQFHYDKTLPELKHIPDVYTSSQSPVKHPSQYEGVFYTDGSAIKSPDPTKSNNAGMGIVHATYKPEYQVLNQWSIPLGNHTAQMAEIAAVEFACKKALKIPGPVLVITDSFYVAESANKELPYWKSNGFVNNKKKPLKHISKWKSIAECLSMKPDITIQHEKGISLQIPVFILKGNALADKLATQGSYVVNAGKRTADGSEFEKRTADGSEFESPKKKAKVE

SEQ ID NO: 1325 - protein, 2176 aa, synthetic construct
MPAAKRVKLDGGDKKYSIGLDIGTNSVGWAVITDEYKVPSKKFKVLGNTDRHSIKKNLIGALLFDSGETAEATRLKRTARRRYTRRKNRICYLQEIFSNEMAKVDDSFFHRLEESFLVEEDKKHERHPIFGNIVDEVAYHEKYPTIYHLRKKLVDSTDKADLRLIYLALAHMIKFRGHFLIEGDLNPDNSDVDKLFIQLVQTYNQLFEENPINASGVDAKAILSARLSKSRRLENLIAQLPGEKKNGLFGNLIALSLGLTPNFKSNFDLAEDAKLQLSKDTYDDDLDNLLAQIGDQYADLFLAAKNLSDAILLSDILRVNTEITKAPLSASMIKRYDEHHQDLTLLKALVRQQLPEKYKEIFFDQSKNGYAGYIDGGASQEEFYKFIKPILEKMDGTEELLVKLNREDLLRKQRTFDNGSIPHQIHLGELHAILRRQEDFYPFLKDNREKIEKILTFRIPYYVGPLARGNSRFAWMTRKSEETITPWNFEEVVDKGASAQSFIERMTNFDKNLPNEKVLPKHSLLYEYFTVYNELTKVKYVTEGMRKPAFLSGEQKKAIVDLLFKTNRKVTVKQLKEDYFKKIECFDSVEISGVEDRFNASLGTYHDLLKIIKDKDFLDNEENEDILEDIVLTLTLFEDREMIEERLKTYAHLFDDKVMKQLKRRRYTGWGRLSRKLINGIRDKQSGKTILDFLKSDGFANRNFMQLIHDDSLTFKEDIQKAQVSGQGDSLHEHIANLAGSPAIKKGILQTVKVVDELVKVMGRHKPENIVIEMARENQTTQKGQKNSRERMKRIEEGIKELGSQILKEHPVENTQLQNEKLYLYYLQNGRDMYVDQELDINRLSDYDVDHIVPQSFLKDDSIDNKVLTRSDKARGKSDNVPSEEVVKKMKNYWRQLLNAKLITQRKFDNLTKAERGGLSELDKAGFIKRQLVETRQITKHVAQILDSRMNTKYDENDKLIREVKVITLKSKLVSDFRKDFQFYKVREINNYHHAHDAYLNAVVGTALIKKYPKLESEFVYGDYKVYDVRKMIAKSEQEIGKATAKYFFYSNIMNFFKTEITLANGEIRKRPLIETNGETGEIVWDKGRDFATVRKVLSMPQVNIVKKTEVQTGGFSKESILPKRNSDKLIARKKDWDPKKYGGFDSPTVAYSVLVVAKVEKGKSKKLKSVKELLGITIMERSSFEKNPIDFLEAKGYKEVKKDLIIKLPKYSLFELENGRKRMLASAGELQKGNELALPSKYVNFLYLASHYEKLKGSPEDNEQKQLFVEQHKHYLDEIIEQISEFSKRVILADANLDKVLSAYNKHRDKPIREQAENIIHLFTLTNLGAPAAFKYFDTTIDRKRYTSTKEVLDATLIHQSITGLYETRIDLSQLGGDGGEAAAKGGSPAPGGMNPLQLLQPLPAEIKGTKLLAHWNSGATITCIPESFLEDEQPIKKTLIKTIHGEKQQNVYYVTFKVKGRKVEAEVIASPYEYILLSPTDVPWLTQQPLQLTILVPLQEYQEKILSKTALPEDQKQQLKTLFVKYDNLWQHWENQVGHRKIRPHNIATGDYPPRPQKQYPINPKAKPSIQIVIDDLLKQGVLTPQNSTMNTPVYPVPKPDGRWRMVLDYREVNKTIPLTAAQNQHSAGILATIVRQKYKTTLDLANGFWAHPITPESYWLTAFTWQGKQYCWTRLPQGFLNSPALFNADVVDLLKEIPNVQVYVDDIYLSHDDPKEHVQQLEKVFQILLQAGYVVSLKKSEIGQKTVEFLGFNITKEGRGLTDTFKTKLLNITPPKDLKQLQSILGLLNFARNFIPNFAELVQPLYNLIAPAKGKYIEWSEENTKQLNMVIEALNTASNLEERLPEQRLVIKVNTSPSAGYVRYYNETGKKPIMYLNYVFSKAELKFSMLEKLLTTMHKALIKAMDLAMGQEILVYSPIVSMTKIQKTPLPERKALPIRWITWMTYLEDPRIQFHYDKTLPELKHIPDVYTSSQSPVKHPSQYEGVFYTDGSAIKSPDPTKSNNAGMGIVHATYKPEYQVLNQWSIPLGNHTAQMAEIAAVEFACKKALKIPGPVLVITDSFYVAESANKELPYWKSNGFVNNKKKPLKHISKWKSIAECLSMKPDITIQHEKGISLQIPVFILKGNALADKLATQGSYVVNAGKRTADGSEFEKRTADGSEFESPKKKAKVE

SEQ ID NO: 1326 - protein, 2176 aa, synthetic construct
MPAAKRVKLDGGDKKYSIGLDIGTNSVGWAVITDEYKVPSKKFKVLGNTDRHSIKKNLIGALLFDSGETAEATRLKRTARRRYTRRKNRICYLQEIFSNEMAKVDDSFFHRLEESFLVEEDKKHERHPIFGNIVDEVAYHEKYPTIYHLRKKLVDSTDKADLRLIYLALAHMIKFRGHFLIEGDLNPDNSDVDKLFIQLVQTYNQLFEENPINASGVDAKAILSARLSKSRRLENLIAQLPGEKKNGLFGNLIALSLGLTPNFKSNFDLAEDAKLQLSKDTYDDDLDNLLAQIGDQYADLFLAAKNLSDAILLSDILRVNTEITKAPLSASMIKRYDEHHQDLTLLKALVRQQLPEKYKEIFFDQSKNGYAGYIDGGASQEEFYKFIKPILEKMDGTEELLVKLNREDLLRKQRTFDNGSIPHQIHLGELHAILRRQEDFYPFLKDNREKIEKILTFRIPYYVGPLARGNSRFAWMTRKSEETITPWNFEEVVDKGASAQSFIERMTNFDKNLPNEKVLPKHSLLYEYFTVYNELTKVKYVTEGMRKPAFLSGEQKKAIVDLLFKTNRKVTVKQLKEDYFKKIECFDSVEISGVEDRFNASLGTYHDLLKIIKDKDFLDNEENEDILEDIVLTLTLFEDREMIEERLKTYAHLFDDKVMKQLKRRRYTGWGRLSRKLINGIRDKQSGKTILDFLKSDGFANRNFMQLIHDDSLTFKEDIQKAQVSGQGDSLHEHIANLAGSPAIKKGILQTVKVVDELVKVMGRHKPENIVIEMARENQTTQKGQKNSRERMKRIEEGIKELGSQILKEHPVENTQLQNEKLYLYYLQNGRDMYVDQELDINRLSDYDVDHIVPQSFLKDDSIDNKVLTRSDKARGKSDNVPSEEVVKKMKNYWRQLLNAKLITQRKFDNLTKAERGGLSELDKAGFIKRQLVETRQITKHVAQILDSRMNTKYDENDKLIREVKVITLKSKLVSDFRKDFQFYKVREINNYHHAHDAYLNAVVGTALIKKYPKLESEFVYGDYKVYDVRKMIAKSEQEIGKATAKYFFYSNIMNFFKTEITLANGEIRKRPLIETNGETGEIVWDKGRDFATVRKVLSMPQVNIVKKTEVQTGGFSKESILPKRNSDKLIARKKDWDPKKYGGFDSPTVAYSVLVVAKVEKGKSKKLKSVKELLGITIMERSSFEKNPIDFLEAKGYKEVKKDLIIKLPKYSLFELENGRKRMLASAGELQKGNELALPSKYVNFLYLASHYEKLKGSPEDNEQKQLFVEQHKHYLDEIIEQISEFSKRVILADANLDKVLSAYNKHRDKPIREQAENIIHLFTLTNLGAPAAFKYFDTTIDRKRYTSTKEVLDATLIHQSITGLYETRIDLSQLGGDGGGGGGGSEAAAKGGMNPLQLLQPLPAEIKGTKLLAHWNSGATITCIPESFLEDEQPIKKTLIKTIHGEKQQNVYYVTFKVKGRKVEAEVIASPYEYILLSPTDVPWLTQQPLQLTILVPLQEYQEKILSKTALPEDQKQQLKTLFVKYDNLWQHWENQVGHRKIRPHNIATGDYPPRPQKQYPINPKAKPSIQIVIDDLLKQGVLTPQNSTMNTPVYPVPKPDGRWRMVLDYREVNKTIPLTAAQNQHSAGILATIVRQKYKTTLDLANGFWAHPITPESYWLTAFTWQGKQYCWTRLPQGFLNSPALFNADVVDLLKEIPNVQVYVDDIYLSHDDPKEHVQQLEKVFQILLQAGYVVSLKKSEIGQKTVEFLGFNITKEGRGLTDTFKTKLLNITPPKDLKQLQSILGLLNFARNFIPNFAELVQPLYNLIAPAKGKYIEWSEENTKQLNMVIEALNTASNLEERLPEQRLVIKVNTSPSAGYVRYYNETGKKPIMYLNYVFSKAELKFSMLEKLLTTMHKALIKAMDLAMGQEILVYSPIVSMTKIQKTPLPERKALPIRWITWMTYLEDPRIQFHYDKTLPELKHIPDVYTSSQSPVKHPSQYEGVFYTDGSAIKSPDPTKSNNAGMGIVHATYKPEYQVLNQWSIPLGNHTAQMAEIAAVEFACKKALKIPGPVLVITDSFYVAESANKELPYWKSNGFVNNKKKPLKHISKWKSIAECLSMKPDITIQHEKGISLQIPVFILKGNALADKLATQGSYVVNAGKRTADGSEFEKRTADGSEFESPKKKAKVE

SEQ ID NO: 1327 - protein, 2176 aa, synthetic construct
MPAAKRVKLDGGDKKYSIGLDIGTNSVGWAVITDEYKVPSKKFKVLGNTDRHSIKKNLIGALLFDSGETAEATRLKRTARRRYTRRKNRICYLQEIFSNEMAKVDDSFFHRLEESFLVEEDKKHERHPIFGNIVDEVAYHEKYPTIYHLRKKLVDSTDKADLRLIYLALAHMIKFRGHFLIEGDLNPDNSDVDKLFIQLVQTYNQLFEENPINASGVDAKAILSARLSKSRRLENLIAQLPGEKKNGLFGNLIALSLGLTPNFKSNFDLAEDAKLQLSKDTYDDDLDNLLAQIGDQYADLFLAAKNLSDAILLSDILRVNTEITKAPLSASMIKRYDEHHQDLTLLKALVRQQLPEKYKEIFFDQSKNGYAGYIDGGASQEEFYKFIKPILEKMDGTEELLVKLNREDLLRKQRTFDNGSIPHQIHLGELHAILRRQEDFYPFLKDNREKIEKILTFRIPYYVGPLARGNSRFAWMTRKSEETITPWNFEEVVDKGASAQSFIERMTNFDKNLPNEKVLPKHSLLYEYFTVYNELTKVKYVTEGMRKPAFLSGEQKKAIVDLLFKTNRKVTVKQLKEDYFKKIECFDSVEISGVEDRFNASLGTYHDLLKIIKDKDFLDNEENEDILEDIVLTLTLFEDREMIEERLKTYAHLFDDKVMKQLKRRRYTGWGRLSRKLINGIRDKQSGKTILDFLKSDGFANRNFMQLIHDDSLTFKEDIQKAQVSGQGDSLHEHIANLAGSPAIKKGILQTVKVVDELVKVMGRHKPENIVIEMARENQTTQKGQKNSRERMKRIEEGIKELGSQILKEHPVENTQLQNEKLYLYYLQNGRDMYVDQELDINRLSDYDVDHIVPQSFLKDDSIDNKVLTRSDKARGKSDNVPSEEVVKKMKNYWRQLLNAKLITQRKFDNLTKAERGGLSELDKAGFIKRQLVETRQITKHVAQILDSRMNTKYDENDKLIREVKVITLKSKLVSDFRKDFQFYKVREINNYHHAHDAYLNAVVGTALIKKYPKLESEFVYGDYKVYDVRKMIAKSEQEIGKATAKYFFYSNIMNFFKTEITLANGEIRKRPLIETNGETGEIVWDKGRDFATVRKVLSMPQVNIVKKTEVQTGGFSKESILPKRNSDKLIARKKDWDPKKYGGFDSPTVAYSVLVVAKVEKGKSKKLKSVKELLGITIMERSSFEKNPIDFLEAKGYKEVKKDLIIKLPKYSLFELENGRKRMLASAGELQKGNELALPSKYVNFLYLASHYEKLKGSPEDNEQKQLFVEQHKHYLDEIIEQISEFSKRVILADANLDKVLSAYNKHRDKPIREQAENIIHLFTLTNLGAPAAFKYFDTTIDRKRYTSTKEVLDATLIHQSITGLYETRIDLSQLGGDGGEAAAKGSSPAPGGMNPLQLLQPLPAEIKGTKLLAHWNSGATITCIPESFLEDEQPIKKTLIKTIHGEKQQNVYYVTFKVKGRKVEAEVIASPYEYILLSPTDVPWLTQQPLQLTILVPLQEYQEKILSKTALPEDQKQQLKTLFVKYDNLWQHWENQVGHRKIRPHNIATGDYPPRPQKQYPINPKAKPSIQIVIDDLLKQGVLTPQNSTMNTPVYPVPKPDGRWRMVLDYREVNKTIPLTAAQNQHSAGILATIVRQKYKTTLDLANGFWAHPITPESYWLTAFTWQGKQYCWTRLPQGFLNSPALFNADVVDLLKEIPNVQVYVDDIYLSHDDPKEHVQQLEKVFQILLQAGYVVSLKKSEIGQKTVEFLGFNITKEGRGLTDTFKTKLLNITPPKDLKQLQSILGLLNFARNFIPNFAELVQPLYNLIAPAKGKYIEWSEENTKQLNMVIEALNTASNLEERLPEQRLVIKVNTSPSAGYVRYYNETGKKPIMYLNYVFSKAELKFSMLEKLLTTMHKALIKAMDLAMGQEILVYSPIVSMTKIQKTPLPERKALPIRWITWMTYLEDPRIQFHYDKTLPELKHIPDVYTSSQSPVKHPSQYEGVFYTDGSAIKSPDPTKSNNAGMGIVHATYKPEYQVLNQWSIPLGNHTAQMAEIAAVEFACKKALKIPGPVLVITDSFYVAESANKELPYWKSNGFVNNKKKPLKHISKWKSIAECLSMKPDITIQHEKGISLQIPVFILKGNALADKLATQGSYVVNAGKRTADGSEFEKRTADGSEFESPKKKAKVE

SEQ ID NO: 1328 - protein, 2176 aa, synthetic construct
MPAAKRVKLDGGDKKYSIGLDIGTNSVGWAVITDEYKVPSKKFKVLGNTDRHSIKKNLIGALLFDSGETAEATRLKRTARRRYTRRKNRICYLQEIFSNEMAKVDDSFFHRLEESFLVEEDKKHERHPIFGNIVDEVAYHEKYPTIYHLRKKLVDSTDKADLRLIYLALAHMIKFRGHFLIEGDLNPDNSDVDKLFIQLVQTYNQLFEENPINASGVDAKAILSARLSKSRRLENLIAQLPGEKKNGLFGNLIALSLGLTPNFKSNFDLAEDAKLQLSKDTYDDDLDNLLAQIGDQYADLFLAAKNLSDAILLSDILRVNTEITKAPLSASMIKRYDEHHQDLTLLKALVRQQLPEKYKEIFFDQSKNGYAGYIDGGASQEEFYKFIKPILEKMDGTEELLVKLNREDLLRKQRTFDNGSIPHQIHLGELHAILRRQEDFYPFLKDNREKIEKILTFRIPYYVGPLARGNSRFAWMTRKSEETITPWNFEEVVDKGASAQSFIERMTNFDKNLPNEKVLPKHSLLYEYFTVYNELTKVKYVTEGMRKPAFLSGEQKKAIVDLLFKTNRKVTVKQLKEDYFKKIECFDSVEISGVEDRFNASLGTYHDLLKIIKDKDFLDNEENEDILEDIVLTLTLFEDREMIEERLKTYAHLFDDKVMKQLKRRRYTGWGRLSRKLINGIRDKQSGKTILDFLKSDGFANRNFMQLIHDDSLTFKEDIQKAQVSGQGDSLHEHIANLAGSPAIKKGILQTVKVVDELVKVMGRHKPENIVIEMARENQTTQKGQKNSRERMKRIEEGIKELGSQILKEHPVENTQLQNEKLYLYYLQNGRDMYVDQELDINRLSDYDVDHIVPQSFLKDDSIDNKVLTRSDKARGKSDNVPSEEVVKKMKNYWRQLLNAKLITQRKFDNLTKAERGGLSELDKAGFIKRQLVETRQITKHVAQILDSRMNTKYDENDKLIREVKVITLKSKLVSDFRKDFQFYKVREINNYHHAHDAYLNAVVGTALIKKYPKLESEFVYGDYKVYDVRKMIAKSEQEIGKATAKYFFYSNIMNFFKTEITLANGEIRKRPLIETNGETGEIVWDKGRDFATVRKVLSMPQVNIVKKTEVQTGGFSKESILPKRNSDKLIARKKDWDPKKYGGFDSPTVAYSVLVVAKVEKGKSKKLKSVKELLGITIMERSSFEKNPIDFLEAKGYKEVKKDLIIKLPKYSLFELENGRKRMLASAGELQKGNELALPSKYVNFLYLASHYEKLKGSPEDNEQKQLFVEQHKHYLDEIIEQISEFSKRVILADANLDKVLSAYNKHRDKPIREQAENIIHLFTLTNLGAPAAFKYFDTTIDRKRYTSTKEVLDATLIHQSITGLYETRIDLSQLGGDGGGGSPAPEAAAKGGMNPLQLLQPLPAEIKGTKLLAHWNSGATITCIPESFLEDEQPIKKTLIKTIHGEKQQNVYYVTFKVKGRKVEAEVIASPYEYILLSPTDVPWLTQQPLQLTILVPLQEYQEKILSKTALPEDQKQQLKTLFVKYDNLWQHWENQVGHRKIRPHNIATGDYPPRPQKQYPINPKAKPSIQIVIDDLLKQGVLTPQNSTMNTPVYPVPKPDGRWRMVLDYREVNKTIPLTAAQNQHSAGILATIVRQKYKTTLDLANGFWAHPITPESYWLTAFTWQGKQYCWTRLPQGFLNSPALFNADVVDLLKEIPNVQVYVDDIYLSHDDPKEHVQQLEKVFQILLQAGYVVSLKKSEIGQKTVEFLGFNITKEGRGLTDTFKTKLLNITPPKDLKQLQSILGLLNFARNFIPNFAELVQPLYNLIAPAKGKYIEWSEENTKQLNMVIEALNTASNLEERLPEQRLVIKVNTSPSAGYVRYYNETGKKPIMYLNYVFSKAELKFSMLEKLLTTMHKALIKAMDLAMGQEILVYSPIVSMTKIQKTPLPERKALPIRWITWMTYLEDPRIQFHYDKTLPELKHIPDVYTSSQSPVKHPSQYEGVFYTDGSAIKSPDPTKSNNAGMGIVHATYKPEYQVLNQWSIPLGNHTAQMAEIAAVEFACKKALKIPGPVLVITDSFYVAESANKELPYWKSNGFVNNKKKPLKHISKWKSIAECLSMKPDITIQHEKGISLQIPVFILKGNALADKLATQGSYVVNAGKRTADGSEFEKRTADGSEFESPKKKAKVE

SEQ ID NO: 1329 - protein, 2176 aa, synthetic construct
MPAAKRVKLDGGDKKYSIGLDIGTNSVGWAVITDEYKVPSKKFKVLGNTDRHSIKKNLIGALLFDSGETAEATRLKRTARRRYTRRKNRICYLQEIFSNEMAKVDDSFFHRLEESFLVEEDKKHERHPIFGNIVDEVAYHEKYPTIYHLRKKLVDSTDKADLRLIYLALAHMIKFRGHFLIEGDLNPDNSDVDKLFIQLVQTYNQLFEENPINASGVDAKAILSARLSKSRRLENLIAQLPGEKKNGLFGNLIALSLGLTPNFKSNFDLAEDAKLQLSKDTYDDDLDNLLAQIGDQYADLFLAAKNLSDAILLSDILRVNTEITKAPLSASMIKRYDEHHQDLTLLKALVRQQLPEKYKEIFFDQSKNGYAGYIDGGASQEEFYKFIKPILEKMDGTEELLVKLNREDLLRKQRTFDNGSIPHQIHLGELHAILRRQEDFYPFLKDNREKIEKILTFRIPYYVGPLARGNSRFAWMTRKSEETITPWNFEEVVDKGASAQSFIERMTNFDKNLPNEKVLPKHSLLYEYFTVYNELTKVKYVTEGMRKPAFLSGEQKKAIVDLLFKTNRKVTVKQLKEDYFKKIECFDSVEISGVEDRFNASLGTYHDLLKIIKDKDFLDNEENEDILEDIVLTLTLFEDREMIEERLKTYAHLFDDKVMKQLKRRRYTGWGRLSRKLINGIRDKQSGKTILDFLKSDGFANRNFMQLIHDDSLTFKEDIQKAQVSGQGDSLHEHIANLAGSPAIKKGILQTVKVVDELVKVMGRHKPENIVIEMARENQTTQKGQKNSRERMKRIEEGIKELGSQILKEHPVENTQLQNEKLYLYYLQNGRDMYVDQELDINRLSDYDVDHIVPQSFLKDDSIDNKVLTRSDKARGKSDNVPSEEVVKKMKNYWRQLLNAKLITQRKFDNLTKAERGGLSELDKAGFIKRQLVETRQITKHVAQILDSRMNTKYDENDKLIREVKVITLKSKLVSDFRKDFQFYKVREINNYHHAHDAYLNAVVGTALIKKYPKLESEFVYGDYKVYDVRKMIAKSEQEIGKATAKYFFYSNIMNFFKTEITLANGEIRKRPLIETNGETGEIVWDKGRDFATVRKVLSMPQVNIVKKTEVQTGGFSKESILPKRNSDKLIARKKDWDPKKYGGFDSPTVAYSVLVVAKVEKGKSKKLKSVKELLGITIMERSSFEKNPIDFLEAKGYKEVKKDLIIKLPKYSLFELENGRKRMLASAGELQKGNELALPSKYVNFLYLASHYEKLKGSPEDNEQKQLFVEQHKHYLDEIIEQISEFSKRVILADANLDKVLSAYNKHRDKPIREQAENIIHLFTLTNLGAPAAFKYFDTTIDRKRYTSTKEVLDATLIHQSITGLYETRIDLSQLGGDGGEAAAKGGSGGGGGMNPLQLLQPLPAEIKGTKLLAHWNSGATITCIPESFLEDEQPIKKTLIKTIHGEKQQNVYYVTFKVKGRKVEAEVIASPYEYILLSPTDVPWLTQQPLQLTILVPLQEYQEKILSKTALPEDQKQQLKTLFVKYDNLWQHWENQVGHRKIRPHNIATGDYPPRPQKQYPINPKAKPSIQIVIDDLLKQGVLTPQNSTMNTPVYPVPKPDGRWRMVLDYREVNKTIPLTAAQNQHSAGILATIVRQKYKTTLDLANGFWAHPITPESYWLTAFTWQGKQYCWTRLPQGFLNSPALFNADVVDLLKEIPNVQVYVDDIYLSHDDPKEHVQQLEKVFQILLQAGYVVSLKKSEIGQKTVEFLGFNITKEGRGLTDTFKTKLLNITPPKDLKQLQSILGLLNFARNFIPNFAELVQPLYNLIAPAKGKYIEWSEENTKQLNMVIEALNTASNLEERLPEQRLVIKVNTSPSAGYVRYYNETGKKPIMYLNYVFSKAELKFSMLEKLLTTMHKALIKAMDLAMGQEILVYSPIVSMTKIQKTPLPERKALPIRWITWMTYLEDPRIQFHYDKTLPELKHIPDVYTSSQSPVKHPSQYEGVFYTDGSAIKSPDPTKSNNAGMGIVHATYKPEYQVLNQWSIPLGNHTAQMAEIAAVEFACKKALKIPGPVLVITDSFYVAESANKELPYWKSNGFVNNKKKPLKHISKWKSIAECLSMKPDITIQHEKGISLQIPVFILKGNALADKLATQGSYVVNAGKRTADGSEFEKRTADGSEFESPKKKAKVE

SEQ ID NO: 1330 - protein, 2180 aa, synthetic construct
MPAAKRVKLDGGDKKYSIGLDIGTNSVGWAVITDEYKVPSKKFKVLGNTDRHSIKKNLIGALLFDSGETAEATRLKRTARRRYTRRKNRICYLQEIFSNEMAKVDDSFFHRLEESFLVEEDKKHERHPIFGNIVDEVAYHEKYPTIYHLRKKLVDSTDKADLRLIYLALAHMIKFRGHFLIEGDLNPDNSDVDKLFIQLVQTYNQLFEENPINASGVDAKAILSARLSKSRRLENLIAQLPGEKKNGLFGNLIALSLGLTPNFKSNFDLAEDAKLQLSKDTYDDDLDNLLAQIGDQYADLFLAAKNLSDAILLSDILRVNTEITKAPLSASMIKRYDEHHQDLTLLKALVRQQLPEKYKEIFFDQSKNGYAGYIDGGASQEEFYKFIKPILEKMDGTEELLVKLNREDLLRKQRTFDNGSIPHQIHLGELHAILRRQEDFYPFLKDNREKIEKILTFRIPYYVGPLARGNSRFAWMTRKSEETITPWNFEEVVDKGASAQSFIERMTNFDKNLPNEKVLPKHSLLYEYFTVYNELTKVKYVTEGMRKPAFLSGEQKKAIVDLLFKTNRKVTVKQLKEDYFKKIECFDSVEISGVEDRFNASLGTYHDLLKIIKDKDFLDNEENEDILEDIVLTLTLFEDREMIEERLKTYAHLFDDKVMKQLKRRRYTGWGRLSRKLINGIRDKQSGKTILDFLKSDGFANRNFMQLIHDDSLTFKEDIQKAQVSGQGDSLHEHIANLAGSPAIKKGILQTVKVVDELVKVMGRHKPENIVIEMARENQTTQKGQKNSRERMKRIEEGIKELGSQILKEHPVENTQLQNEKLYLYYLQNGRDMYVDQELDINRLSDYDVDHIVPQSFLKDDSIDNKVLTRSDKARGKSDNVPSEEVVKKMKNYWRQLLNAKLITQRKFDNLTKAERGGLSELDKAGFIKRQLVETRQITKHVAQILDSRMNTKYDENDKLIREVKVITLKSKLVSDFRKDFQFYKVREINNYHHAHDAYLNAVVGTALIKKYPKLESEFVYGDYKVYDVRKMIAKSEQEIGKATAKYFFYSNIMNFFKTEITLANGEIRKRPLIETNGETGEIVWDKGRDFATVRKVLSMPQVNIVKKTEVQTGGFSKESILPKRNSDKLIARKKDWDPKKYGGFDSPTVAYSVLVVAKVEKGKSKKLKSVKELLGITIMERSSFEKNPIDFLEAKGYKEVKKDLIIKLPKYSLFELENGRKRMLASAGELQKGNELALPSKYVNFLYLASHYEKLKGSPEDNEQKQLFVEQHKHYLDEIIEQISEFSKRVILADANLDKVLSAYNKHRDKPIREQAENIIHLFTLTNLGAPAAFKYFDTTIDRKRYTSTKEVLDATLIHQSITGLYETRIDLSQLGGDGGGGGGSEAAAKGGGGSGGMNPLQLLQPLPAEIKGTKLLAHWNSGATITCIPESFLEDEQPIKKTLIKTIHGEKQQNVYYVTFKVKGRKVEAEVIASPYEYILLSPTDVPWLTQQPLQLTILVPLQEYQEKILSKTALPEDQKQQLKTLFVKYDNLWQHWENQVGHRKIRPHNIATGDYPPRPQKQYPINPKAKPSIQIVIDDLLKQGVLTPQNSTMNTPVYPVPKPDGRWRMVLDYREVNKTIPLTAAQNQHSAGILATIVRQKYKTTLDLANGFWAHPITPESYWLTAFTWQGKQYCWTRLPQGFLNSPALFNADVVDLLKEIPNVQVYVDDIYLSHDDPKEHVQQLEKVFQILLQAGYVVSLKKSEIGQKTVEFLGFNITKEGRGLTDTFKTKLLNITPPKDLKQLQSILGLLNFARNFIPNFAELVQPLYNLIAPAKGKYIEWSEENTKQLNMVIEALNTASNLEERLPEQRLVIKVNTSPSAGYVRYYNETGKKPIMYLNYVFSKAELKFSMLEKLLTTMHKALIKAMDLAMGQEILVYSPIVSMTKIQKTPLPERKALPIRWITWMTYLEDPRIQFHYDKTLPELKHIPDVYTSSQSPVKHPSQYEGVFYTDGSAIKSPDPTKSNNAGMGIVHATYKPEYQVLNQWSIPLGNHTAQMAEIAAVEFACKKALKIPGPVLVITDSFYVAESANKELPYWKSNGFVNNKKKPLKHISKWKSIAECLSMKPDITIQHEKGISLQIPVFILKGNALADKLATQGSYVVNAGKRTADGSEFEKRTADGSEFESPKKKAKVE

SEQ ID NO: 1331 - protein, 2174 aa, synthetic construct
MPAAKRVKLDGGDKKYSIGLDIGTNSVGWAVITDEYKVPSKKFKVLGNTDRHSIKKNLIGALLFDSGETAEATRLKRTARRRYTRRKNRICYLQEIFSNEMAKVDDSFFHRLEESFLVEEDKKHERHPIFGNIVDEVAYHEKYPTIYHLRKKLVDSTDKADLRLIYLALAHMIKFRGHFLIEGDLNPDNSDVDKLFIQLVQTYNQLFEENPINASGVDAKAILSARLSKSRRLENLIAQLPGEKKNGLFGNLIALSLGLTPNFKSNFDLAEDAKLQLSKDTYDDDLDNLLAQIGDQYADLFLAAKNLSDAILLSDILRVNTEITKAPLSASMIKRYDEHHQDLTLLKALVRQQLPEKYKEIFFDQSKNGYAGYIDGGASQEEFYKFIKPILEKMDGTEELLVKLNREDLLRKQRTFDNGSIPHQIHLGELHAILRRQEDFYPFLKDNREKIEKILTFRIPYYVGPLARGNSRFAWMTRKSEETITPWNFEEVVDKGASAQSFIERMTNFDKNLPNEKVLPKHSLLYEYFTVYNELTKVKYVTEGMRKPAFLSGEQKKAIVDLLFKTNRKVTVKQLKEDYFKKIECFDSVEISGVEDRFNASLGTYHDLLKIIKDKDFLDNEENEDILEDIVLTLTLFEDREMIEERLKTYAHLFDDKVMKQLKRRRYTGWGRLSRKLINGIRDKQSGKTILDFLKSDGFANRNFMQLIHDDSLTFKEDIQKAQVSGQGDSLHEHIANLAGSPAIKKGILQTVKVVDELVKVMGRHKPENIVIEMARENQTTQKGQKNSRERMKRIEEGIKELGSQILKEHPVENTQLQNEKLYLYYLQNGRDMYVDQELDINRLSDYDVDHIVPQSFLKDDSIDNKVLTRSDKARGKSDNVPSEEVVKKMKNYWRQLLNAKLITQRKFDNLTKAERGGLSELDKAGFIKRQLVETRQITKHVAQILDSRMNTKYDENDKLIREVKVITLKSKLVSDFRKDFQFYKVREINNYHHAHDAYLNAVVGTALIKKYPKLESEFVYGDYKVYDVRKMIAKSEQEIGKATAKYFFYSNIMNFFKTEITLANGEIRKRPLIETNGETGEIVWDKGRDFATVRKVLSMPQVNIVKKTEVQTGGFSKESILPKRNSDKLIARKKDWDPKKYGGFDSPTVAYSVLVVAKVEKGKSKKLKSVKELLGITIMERSSFEKNPIDFLEAKGYKEVKKDLIIKLPKYSLFELENGRKRMLASAGELQKGNELALPSKYVNFLYLASHYEKLKGSPEDNEQKQLFVEQHKHYLDEIIEQISEFSKRVILADANLDKVLSAYNKHRDKPIREQAENIIHLFTLTNLGAPAAFKYFDTTIDRKRYTSTKEVLDATLIHQSITGLYETRIDLSQLGGDGGGGSPAPGSSGGMNPLQLLQPLPAEIKGTKLLAHWNSGATITCIPESFLEDEQPIKKTLIKTIHGEKQQNVYYVTFKVKGRKVEAEVIASPYEYILLSPTDVPWLTQQPLQLTILVPLQEYQEKILSKTALPEDQKQQLKTLFVKYDNLWQHWENQVGHRKIRPHNIATGDYPPRPQKQYPINPKAKPSIQIVIDDLLKQGVLTPQNSTMNTPVYPVPKPDGRWRMVLDYREVNKTIPLTAAQNQHSAGILATIVRQKYKTTLDLANGFWAHPITPESYWLTAFTWQGKQYCWTRLPQGFLNSPALFNADVVDLLKEIPNVQVYVDDIYLSHDDPKEHVQQLEKVFQILLQAGYVVSLKKSEIGQKTVEFLGFNITKEGRGLTDTFKTKLLNITPPKDLKQLQSILGLLNFARNFIPNFAELVQPLYNLIAPAKGKYIEWSEENTKQLNMVIEALNTASNLEERLPEQRLVIKVNTSPSAGYVRYYNETGKKPIMYLNYVFSKAELKFSMLEKLLTTMHKALIKAMDLAMGQEILVYSPIVSMTKIQKTPLPERKALPIRWITWMTYLEDPRIQFHYDKTLPELKHIPDVYTSSQSPVKHPSQYEGVFYTDGSAIKSPDPTKSNNAGMGIVHATYKPEYQVLNQWSIPLGNHTAQMAEIAAVEFACKKALKIPGPVLVITDSFYVAESANKELPYWKSNGFVNNKKKPLKHISKWKSIAECLSMKPDITIQHEKGISLQIPVFILKGNALADKLATQGSYVVNAGKRTADGSEFEKRTADGSEFESPKKKAKVE

SEQ ID NO: 1332 - protein, 2177 aa, synthetic construct
MPAAKRVKLDGGDKKYSIGLDIGTNSVGWAVITDEYKVPSKKFKVLGNTDRHSIKKNLIGALLFDSGETAEATRLKRTARRRYTRRKNRICYLQEIFSNEMAKVDDSFFHRLEESFLVEEDKKHERHPIFGNIVDEVAYHEKYPTIYHLRKKLVDSTDKADLRLIYLALAHMIKFRGHFLIEGDLNPDNSDVDKLFIQLVQTYNQLFEENPINASGVDAKAILSARLSKSRRLENLIAQLPGEKKNGLFGNLIALSLGLTPNFKSNFDLAEDAKLQLSKDTYDDDLDNLLAQIGDQYADLFLAAKNLSDAILLSDILRVNTEITKAPLSASMIKRYDEHHQDLTLLKALVRQQLPEKYKEIFFDQSKNGYAGYIDGGASQEEFYKFIKPILEKMDGTEELLVKLNREDLLRKQRTFDNGSIPHQIHLGELHAILRRQEDFYPFLKDNREKIEKILTFRIPYYVGPLARGNSRFAWMTRKSEETITPWNFEEVVDKGASAQSFIERMTNFDKNLPNEKVLPKHSLLYEYFTVYNELTKVKYVTEGMRKPAFLSGEQKKAIVDLLFKTNRKVTVKQLKEDYFKKIECFDSVEISGVEDRFNASLGTYHDLLKIIKDKDFLDNEENEDILEDIVLTLTLFEDREMIEERLKTYAHLFDDKVMKQLKRRRYTGWGRLSRKLINGIRDKQSGKTILDFLKSDGFANRNFMQLIHDDSLTFKEDIQKAQVSGQGDSLHEHIANLAGSPAIKKGILQTVKVVDELVKVMGRHKPENIVIEMARENQTTQKGQKNSRERMKRIEEGIKELGSQILKEHPVENTQLQNEKLYLYYLQNGRDMYVDQELDINRLSDYDVDHIVPQSFLKDDSIDNKVLTRSDKARGKSDNVPSEEVVKKMKNYWRQLLNAKLITQRKFDNLTKAERGGLSELDKAGFIKRQLVETRQITKHVAQILDSRMNTKYDENDKLIREVKVITLKSKLVSDFRKDFQFYKVREINNYHHAHDAYLNAVVGTALIKKYPKLESEFVYGDYKVYDVRKMIAKSEQEIGKATAKYFFYSNIMNFFKTEITLANGEIRKRPLIETNGETGEIVWDKGRDFATVRKVLSMPQVNIVKKTEVQTGGFSKESILPKRNSDKLIARKKDWDPKKYGGFDSPTVAYSVLVVAKVEKGKSKKLKSVKELLGITIMERSSFEKNPIDFLEAKGYKEVKKDLIIKLPKYSLFELENGRKRMLASAGELQKGNELALPSKYVNFLYLASHYEKLKGSPEDNEQKQLFVEQHKHYLDEIIEQISEFSKRVILADANLDKVLSAYNKHRDKPIREQAENIIHLFTLTNLGAPAAFKYFDTTIDRKRYTSTKEVLDATLIHQSITGLYETRIDLSQLGGDGGGSSGSSGSSGSSGGMNPLQLLQPLPAEIKGTKLLAHWNSGATITCIPESFLEDEQPIKKTLIKTIHGEKQQNVYYVTFKVKGRKVEAEVIASPYEYILLSPTDVPWLTQQPLQLTILVPLQEYQEKILSKTALPEDQKQQLKTLFVKYDNLWQHWENQVGHRKIRPHNIATGDYPPRPQKQYPINPKAKPSIQIVIDDLLKQGVLTPQNSTMNTPVYPVPKPDGRWRMVLDYREVNKTIPLTAAQNQHSAGILATIVRQKYKTTLDLANGFWAHPITPESYWLTAFTWQGKQYCWTRLPQGFLNSPALFNADVVDLLKEIPNVQVYVDDIYLSHDDPKEHVQQLEKVFQILLQAGYVVSLKKSEIGQKTVEFLGFNITKEGRGLTDTFKTKLLNITPPKDLKQLQSILGLLNFARNFIPNFAELVQPLYNLIAPAKGKYIEWSEENTKQLNMVIEALNTASNLEERLPEQRLVIKVNTSPSAGYVRYYNETGKKPIMYLNYVFSKAELKFSMLEKLLTTMHKALIKAMDLAMGQEILVYSPIVSMTKIQKTPLPERKALPIRWITWMTYLEDPRIQFHYDKTLPELKHIPDVYTSSQSPVKHPSQYEGVFYTDGSAIKSPDPTKSNNAGMGIVHATYKPEYQVLNQWSIPLGNHTAQMAEIAAVEFACKKALKIPGPVLVITDSFYVAESANKELPYWKSNGFVNNKKKPLKHISKWKSIAECLSMKPDITIQHEKGISLQIPVFILKGNALADKLATQGSYVVNAGKRTADGSEFEKRTADGSEFESPKKKAKVE

SEQ ID NO: 1333 - protein, 2174 aa, synthetic construct
MPAAKRVKLDGGDKKYSIGLDIGTNSVGWAVITDEYKVPSKKFKVLGNTDRHSIKKNLIGALLFDSGETAEATRLKRTARRRYTRRKNRICYLQEIFSNEMAKVDDSFFHRLEESFLVEEDKKHERHPIFGNIVDEVAYHEKYPTIYHLRKKLVDSTDKADLRLIYLALAHMIKFRGHFLIEGDLNPDNSDVDKLFIQLVQTYNQLFEENPINASGVDAKAILSARLSKSRRLENLIAQLPGEKKNGLFGNLIALSLGLTPNFKSNFDLAEDAKLQLSKDTYDDDLDNLLAQIGDQYADLFLAAKNLSDAILLSDILRVNTEITKAPLSASMIKRYDEHHQDLTLLKALVRQQLPEKYKEIFFDQSKNGYAGYIDGGASQEEFYKFIKPILEKMDGTEELLVKLNREDLLRKQRTFDNGSIPHQIHLGELHAILRRQEDFYPFLKDNREKIEKILTFRIPYYVGPLARGNSRFAWMTRKSEETITPWNFEEVVDKGASAQSFIERMTNFDKNLPNEKVLPKHSLLYEYFTVYNELTKVKYVTEGMRKPAFLSGEQKKAIVDLLFKTNRKVTVKQLKEDYFKKIECFDSVEISGVEDRFNASLGTYHDLLKIIKDKDFLDNEENEDILEDIVLTLTLFEDREMIEERLKTYAHLFDDKVMKQLKRRRYTGWGRLSRKLINGIRDKQSGKTILDFLKSDGFANRNFMQLIHDDSLTFKEDIQKAQVSGQGDSLHEHIANLAGSPAIKKGILQTVKVVDELVKVMGRHKPENIVIEMARENQTTQKGQKNSRERMKRIEEGIKELGSQILKEHPVENTQLQNEKLYLYYLQNGRDMYVDQELDINRLSDYDVDHIVPQSFLKDDSIDNKVLTRSDKARGKSDNVPSEEVVKKMKNYWRQLLNAKLITQRKFDNLTKAERGGLSELDKAGFIKRQLVETRQITKHVAQILDSRMNTKYDENDKLIREVKVITLKSKLVSDFRKDFQFYKVREINNYHHAHDAYLNAVVGTALIKKYPKLESEFVYGDYKVYDVRKMIAKSEQEIGKATAKYFFYSNIMNFFKTEITLANGEIRKRPLIETNGETGEIVWDKGRDFATVRKVLSMPQVNIVKKTEVQTGGFSKESILPKRNSDKLIARKKDWDPKKYGGFDSPTVAYSVLVVAKVEKGKSKKLKSVKELLGITIMERSSFEKNPIDFLEAKGYKEVKKDLIIKLPKYSLFELENGRKRMLASAGELQKGNELALPSKYVNFLYLASHYEKLKGSPEDNEQKQLFVEQHKHYLDEIIEQISEFSKRVILADANLDKVLSAYNKHRDKPIREQAENIIHLFTLTNLGAPAAFKYFDTTIDRKRYTSTKEVLDATLIHQSITGLYETRIDLSQLGGDGGPAPGSSGGSGGMNPLQLLQPLPAEIKGTKLLAHWNSGATITCIPESFLEDEQPIKKTLIKTIHGEKQQNVYYVTFKVKGRKVEAEVIASPYEYILLSPTDVPWLTQQPLQLTILVPLQEYQEKILSKTALPEDQKQQLKTLFVKYDNLWQHWENQVGHRKIRPHNIATGDYPPRPQKQYPINPKAKPSIQIVIDDLLKQGVLTPQNSTMNTPVYPVPKPDGRWRMVLDYREVNKTIPLTAAQNQHSAGILATIVRQKYKTTLDLANGFWAHPITPESYWLTAFTWQGKQYCWTRLPQGFLNSPALFNADVVDLLKEIPNVQVYVDDIYLSHDDPKEHVQQLEKVFQILLQAGYVVSLKKSEIGQKTVEFLGFNITKEGRGLTDTFKTKLLNITPPKDLKQLQSILGLLNFARNFIPNFAELVQPLYNLIAPAKGKYIEWSEENTKQLNMVIEALNTASNLEERLPEQRLVIKVNTSPSAGYVRYYNETGKKPIMYLNYVFSKAELKFSMLEKLLTTMHKALIKAMDLAMGQEILVYSPIVSMTKIQKTPLPERKALPIRWITWMTYLEDPRIQFHYDKTLPELKHIPDVYTSSQSPVKHPSQYEGVFYTDGSAIKSPDPTKSNNAGMGIVHATYKPEYQVLNQWSIPLGNHTAQMAEIAAVEFACKKALKIPGPVLVITDSFYVAESANKELPYWKSNGFVNNKKKPLKHISKWKSIAECLSMKPDITIQHEKGISLQIPVFILKGNALADKLATQGSYVVNAGKRTADGSEFEKRTADGSEFESPKKKAKVE

SEQ ID NO: 1334 - protein, 2176 aa, synthetic construct
MPAAKRVKLDGGDKKYSIGLDIGTNSVGWAVITDEYKVPSKKFKVLGNTDRHSIKKNLIGALLFDSGETAEATRLKRTARRRYTRRKNRICYLQEIFSNEMAKVDDSFFHRLEESFLVEEDKKHERHPIFGNIVDEVAYHEKYPTIYHLRKKLVDSTDKADLRLIYLALAHMIKFRGHFLIEGDLNPDNSDVDKLFIQLVQTYNQLFEENPINASGVDAKAILSARLSKSRRLENLIAQLPGEKKNGLFGNLIALSLGLTPNFKSNFDLAEDAKLQLSKDTYDDDLDNLLAQIGDQYADLFLAAKNLSDAILLSDILRVNTEITKAPLSASMIKRYDEHHQDLTLLKALVRQQLPEKYKEIFFDQSKNGYAGYIDGGASQEEFYKFIKPILEKMDGTEELLVKLNREDLLRKQRTFDNGSIPHQIHLGELHAILRRQEDFYPFLKDNREKIEKILTFRIPYYVGPLARGNSRFAWMTRKSEETITPWNFEEVVDKGASAQSFIERMTNFDKNLPNEKVLPKHSLLYEYFTVYNELTKVKYVTEGMRKPAFLSGEQKKAIVDLLFKTNRKVTVKQLKEDYFKKIECFDSVEISGVEDRFNASLGTYHDLLKIIKDKDFLDNEENEDILEDIVLTLTLFEDREMIEERLKTYAHLFDDKVMKQLKRRRYTGWGRLSRKLINGIRDKQSGKTILDFLKSDGFANRNFMQLIHDDSLTFKEDIQKAQVSGQGDSLHEHIANLAGSPAIKKGILQTVKVVDELVKVMGRHKPENIVIEMARENQTTQKGQKNSRERMKRIEEGIKELGSQILKEHPVENTQLQNEKLYLYYLQNGRDMYVDQELDINRLSDYDVDHIVPQSFLKDDSIDNKVLTRSDKARGKSDNVPSEEVVKKMKNYWRQLLNAKLITQRKFDNLTKAERGGLSELDKAGFIKRQLVETRQITKHVAQILDSRMNTKYDENDKLIREVKVITLKSKLVSDFRKDFQFYKVREINNYHHAHDAYLNAVVGTALIKKYPKLESEFVYGDYKVYDVRKMIAKSEQEIGKATAKYFFYSNIMNFFKTEITLANGEIRKRPLIETNGETGEIVWDKGRDFATVRKVLSMPQVNIVKKTEVQTGGFSKESILPKRNSDKLIARKKDWDPKKYGGFDSPTVAYSVLVVAKVEKGKSKKLKSVKELLGITIMERSSFEKNPIDFLEAKGYKEVKKDLIIKLPKYSLFELENGRKRMLASAGELQKGNELALPSKYVNFLYLASHYEKLKGSPEDNEQKQLFVEQHKHYLDEIIEQISEFSKRVILADANLDKVLSAYNKHRDKPIREQAENIIHLFTLTNLGAPAAFKYFDTTIDRKRYTSTKEVLDATLIHQSITGLYETRIDLSQLGGDGGEAAAKGGGGGSGGMNPLQLLQPLPAEIKGTKLLAHWNSGATITCIPESFLEDEQPIKKTLIKTIHGEKQQNVYYVTFKVKGRKVEAEVIASPYEYILLSPTDVPWLTQQPLQLTILVPLQEYQEKILSKTALPEDQKQQLKTLFVKYDNLWQHWENQVGHRKIRPHNIATGDYPPRPQKQYPINPKAKPSIQIVIDDLLKQGVLTPQNSTMNTPVYPVPKPDGRWRMVLDYREVNKTIPLTAAQNQHSAGILATIVRQKYKTTLDLANGFWAHPITPESYWLTAFTWQGKQYCWTRLPQGFLNSPALFNADVVDLLKEIPNVQVYVDDIYLSHDDPKEHVQQLEKVFQILLQAGYVVSLKKSEIGQKTVEFLGFNITKEGRGLTDTFKTKLLNITPPKDLKQLQSILGLLNFARNFIPNFAELVQPLYNLIAPAKGKYIEWSEENTKQLNMVIEALNTASNLEERLPEQRLVIKVNTSPSAGYVRYYNETGKKPIMYLNYVFSKAELKFSMLEKLLTTMHKALIKAMDLAMGQEILVYSPIVSMTKIQKTPLPERKALPIRWITWMTYLEDPRIQFHYDKTLPELKHIPDVYTSSQSPVKHPSQYEGVFYTDGSAIKSPDPTKSNNAGMGIVHATYKPEYQVLNQWSIPLGNHTAQMAEIAAVEFACKKALKIPGPVLVITDSFYVAESANKELPYWKSNGFVNNKKKPLKHISKWKSIAECLSMKPDITIQHEKGISLQIPVFILKGNALADKLATQGSYVVNAGKRTADGSEFEKRTADGSEFESPKKKAKVE

SEQ ID NO: 1335 - protein, 2176 aa, synthetic construct
MPAAKRVKLDGGDKKYSIGLDIGTNSVGWAVITDEYKVPSKKFKVLGNTDRHSIKKNLIGALLFDSGETAEATRLKRTARRRYTRRKNRICYLQEIFSNEMAKVDDSFFHRLEESFLVEEDKKHERHPIFGNIVDEVAYHEKYPTIYHLRKKLVDSTDKADLRLIYLALAHMIKFRGHFLIEGDLNPDNSDVDKLFIQLVQTYNQLFEENPINASGVDAKAILSARLSKSRRLENLIAQLPGEKKNGLFGNLIALSLGLTPNFKSNFDLAEDAKLQLSKDTYDDDLDNLLAQIGDQYADLFLAAKNLSDAILLSDILRVNTEITKAPLSASMIKRYDEHHQDLTLLKALVRQQLPEKYKEIFFDQSKNGYAGYIDGGASQEEFYKFIKPILEKMDGTEELLVKLNREDLLRKQRTFDNGSIPHQIHLGELHAILRRQEDFYPFLKDNREKIEKILTFRIPYYVGPLARGNSRFAWMTRKSEETITPWNFEEVVDKGASAQSFIERMTNFDKNLPNEKVLPKHSLLYEYFTVYNELTKVKYVTEGMRKPAFLSGEQKKAIVDLLFKTNRKVTVKQLKEDYFKKIECFDSVEISGVEDRFNASLGTYHDLLKIIKDKDFLDNEENEDILEDIVLTLTLFEDREMIEERLKTYAHLFDDKVMKQLKRRRYTGWGRLSRKLINGIRDKQSGKTILDFLKSDGFANRNFMQLIHDDSLTFKEDIQKAQVSGQGDSLHEHIANLAGSPAIKKGILQTVKVVDELVKVMGRHKPENIVIEMARENQTTQKGQKNSRERMKRIEEGIKELGSQILKEHPVENTQLQNEKLYLYYLQNGRDMYVDQELDINRLSDYDVDHIVPQSFLKDDSIDNKVLTRSDKARGKSDNVPSEEVVKKMKNYWRQLLNAKLITQRKFDNLTKAERGGLSELDKAGFIKRQLVETRQITKHVAQILDSRMNTKYDENDKLIREVKVITLKSKLVSDFRKDFQFYKVREINNYHHAHDAYLNAVVGTALIKKYPKLESEFVYGDYKVYDVRKMIAKSEQEIGKATAKYFFYSNIMNFFKTEITLANGEIRKRPLIETNGETGEIVWDKGRDFATVRKVLSMPQVNIVKKTEVQTGGFSKESILPKRNSDKLIARKKDWDPKKYGGFDSPTVAYSVLVVAKVEKGKSKKLKSVKELLGITIMERSSFEKNPIDFLEAKGYKEVKKDLIIKLPKYSLFELENGRKRMLASAGELQKGNELALPSKYVNFLYLASHYEKLKGSPEDNEQKQLFVEQHKHYLDEIIEQISEFSKRVILADANLDKVLSAYNKHRDKPIREQAENIIHLFTLTNLGAPAAFKYFDTTIDRKRYTSTKEVLDATLIHQSITGLYETRIDLSQLGGDGGEAAAKGGGGSSGGMNPLQLLQPLPAEIKGTKLLAHWNSGATITCIPESFLEDEQPIKKTLIKTIHGEKQQNVYYVTFKVKGRKVEAEVIASPYEYILLSPTDVPWLTQQPLQLTILVPLQEYQEKILSKTALPEDQKQQLKTLFVKYDNLWQHWENQVGHRKIRPHNIATGDYPPRPQKQYPINPKAKPSIQIVIDDLLKQGVLTPQNSTMNTPVYPVPKPDGRWRMVLDYREVNKTIPLTAAQNQHSAGILATIVRQKYKTTLDLANGFWAHPITPESYWLTAFTWQGKQYCWTRLPQGFLNSPALFNADVVDLLKEIPNVQVYVDDIYLSHDDPKEHVQQLEKVFQILLQAGYVVSLKKSEIGQKTVEFLGFNITKEGRGLTDTFKTKLLNITPPKDLKQLQSILGLLNFARNFIPNFAELVQPLYNLIAPAKGKYIEWSEENTKQLNMVIEALNTASNLEERLPEQRLVIKVNTSPSAGYVRYYNETGKKPIMYLNYVFSKAELKFSMLEKLLTTMHKALIKAMDLAMGQEILVYSPIVSMTKIQKTPLPERKALPIRWITWMTYLEDPRIQFHYDKTLPELKHIPDVYTSSQSPVKHPSQYEGVFYTDGSAIKSPDPTKSNNAGMGIVHATYKPEYQVLNQWSIPLGNHTAQMAEIAAVEFACKKALKIPGPVLVITDSFYVAESANKELPYWKSNGFVNNKKKPLKHISKWKSIAECLSMKPDITIQHEKGISLQIPVFILKGNALADKLATQGSYVVNAGKRTADGSEFEKRTADGSEFESPKKKAKVE

SEQ ID NO: 1336 - protein, 2174 aa, synthetic construct
MPAAKRVKLDGGDKKYSIGLDIGTNSVGWAVITDEYKVPSKKFKVLGNTDRHSIKKNLIGALLFDSGETAEATRLKRTARRRYTRRKNRICYLQEIFSNEMAKVDDSFFHRLEESFLVEEDKKHERHPIFGNIVDEVAYHEKYPTIYHLRKKLVDSTDKADLRLIYLALAHMIKFRGHFLIEGDLNPDNSDVDKLFIQLVQTYNQLFEENPINASGVDAKAILSARLSKSRRLENLIAQLPGEKKNGLFGNLIALSLGLTPNFKSNFDLAEDAKLQLSKDTYDDDLDNLLAQIGDQYADLFLAAKNLSDAILLSDILRVNTEITKAPLSASMIKRYDEHHQDLTLLKALVRQQLPEKYKEIFFDQSKNGYAGYIDGGASQEEFYKFIKPILEKMDGTEELLVKLNREDLLRKQRTFDNGSIPHQIHLGELHAILRRQEDFYPFLKDNREKIEKILTFRIPYYVGPLARGNSRFAWMTRKSEETITPWNFEEVVDKGASAQSFIERMTNFDKNLPNEKVLPKHSLLYEYFTVYNELTKVKYVTEGMRKPAFLSGEQKKAIVDLLFKTNRKVTVKQLKEDYFKKIECFDSVEISGVEDRFNASLGTYHDLLKIIKDKDFLDNEENEDILEDIVLTLTLFEDREMIEERLKTYAHLFDDKVMKQLKRRRYTGWGRLSRKLINGIRDKQSGKTILDFLKSDGFANRNFMQLIHDDSLTFKEDIQKAQVSGQGDSLHEHIANLAGSPAIKKGILQTVKVVDELVKVMGRHKPENIVIEMARENQTTQKGQKNSRERMKRIEEGIKELGSQILKEHPVENTQLQNEKLYLYYLQNGRDMYVDQELDINRLSDYDVDHIVPQSFLKDDSIDNKVLTRSDKARGKSDNVPSEEVVKKMKNYWRQLLNAKLITQRKFDNLTKAERGGLSELDKAGFIKRQLVETRQITKHVAQILDSRMNTKYDENDKLIREVKVITLKSKLVSDFRKDFQFYKVREINNYHHAHDAYLNAVVGTALIKKYPKLESEFVYGDYKVYDVRKMIAKSEQEIGKATAKYFFYSNIMNFFKTEITLANGEIRKRPLIETNGETGEIVWDKGRDFATVRKVLSMPQVNIVKKTEVQTGGFSKESILPKRNSDKLIARKKDWDPKKYGGFDSPTVAYSVLVVAKVEKGKSKKLKSVKELLGITIMERSSFEKNPIDFLEAKGYKEVKKDLIIKLPKYSLFELENGRKRMLASAGELQKGNELALPSKYVNFLYLASHYEKLKGSPEDNEQKQLFVEQHKHYLDEIIEQISEFSKRVILADANLDKVLSAYNKHRDKPIREQAENIIHLFTLTNLGAPAAFKYFDTTIDRKRYTSTKEVLDATLIHQSITGLYETRIDLSQLGGDGGGGGGSSPAPGGMNPLQLLQPLPAEIKGTKLLAHWNSGATITCIPESFLEDEQPIKKTLIKTIHGEKQQNVYYVTFKVKGRKVEAEVIASPYEYILLSPTDVPWLTQQPLQLTILVPLQEYQEKILSKTALPEDQKQQLKTLFVKYDNLWQHWENQVGHRKIRPHNIATGDYPPRPQKQYPINPKAKPSIQIVIDDLLKQGVLTPQNSTMNTPVYPVPKPDGRWRMVLDYREVNKTIPLTAAQNQHSAGILATIVRQKYKTTLDLANGFWAHPITPESYWLTAFTWQGKQYCWTRLPQGFLNSPALFNADVVDLLKEIPNVQVYVDDIYLSHDDPKEHVQQLEKVFQILLQAGYVVSLKKSEIGQKTVEFLGFNITKEGRGLTDTFKTKLLNITPPKDLKQLQSILGLLNFARNFIPNFAELVQPLYNLIAPAKGKYIEWSEENTKQLNMVIEALNTASNLEERLPEQRLVIKVNTSPSAGYVRYYNETGKKPIMYLNYVFSKAELKFSMLEKLLTTMHKALIKAMDLAMGQEILVYSPIVSMTKIQKTPLPERKALPIRWITWMTYLEDPRIQFHYDKTLPELKHIPDVYTSSQSPVKHPSQYEGVFYTDGSAIKSPDPTKSNNAGMGIVHATYKPEYQVLNQWSIPLGNHTAQMAEIAAVEFACKKALKIPGPVLVITDSFYVAESANKELPYWKSNGFVNNKKKPLKHISKWKSIAECLSMKPDITIQHEKGISLQIPVFILKGNALADKLATQGSYVVNAGKRTADGSEFEKRTADGSEFESPKKKAKVE

SEQ ID NO: 1337 - protein, 2176 aa, synthetic construct
MPAAKRVKLDGGDKKYSIGLDIGTNSVGWAVITDEYKVPSKKFKVLGNTDRHSIKKNLIGALLFDSGETAEATRLKRTARRRYTRRKNRICYLQEIFSNEMAKVDDSFFHRLEESFLVEEDKKHERHPIFGNIVDEVAYHEKYPTIYHLRKKLVDSTDKADLRLIYLALAHMIKFRGHFLIEGDLNPDNSDVDKLFIQLVQTYNQLFEENPINASGVDAKAILSARLSKSRRLENLIAQLPGEKKNGLFGNLIALSLGLTPNFKSNFDLAEDAKLQLSKDTYDDDLDNLLAQIGDQYADLFLAAKNLSDAILLSDILRVNTEITKAPLSASMIKRYDEHHQDLTLLKALVRQQLPEKYKEIFFDQSKNGYAGYIDGGASQEEFYKFIKPILEKMDGTEELLVKLNREDLLRKQRTFDNGSIPHQIHLGELHAILRRQEDFYPFLKDNREKIEKILTFRIPYYVGPLARGNSRFAWMTRKSEETITPWNFEEVVDKGASAQSFIERMTNFDKNLPNEKVLPKHSLLYEYFTVYNELTKVKYVTEGMRKPAFLSGEQKKAIVDLLFKTNRKVTVKQLKEDYFKKIECFDSVEISGVEDRFNASLGTYHDLLKIIKDKDFLDNEENEDILEDIVLTLTLFEDREMIEERLKTYAHLFDDKVMKQLKRRRYTGWGRLSRKLINGIRDKQSGKTILDFLKSDGFANRNFMQLIHDDSLTFKEDIQKAQVSGQGDSLHEHIANLAGSPAIKKGILQTVKVVDELVKVMGRHKPENIVIEMARENQTTQKGQKNSRERMKRIEEGIKELGSQILKEHPVENTQLQNEKLYLYYLQNGRDMYVDQELDINRLSDYDVDHIVPQSFLKDDSIDNKVLTRSDKARGKSDNVPSEEVVKKMKNYWRQLLNAKLITQRKFDNLTKAERGGLSELDKAGFIKRQLVETRQITKHVAQILDSRMNTKYDENDKLIREVKVITLKSKLVSDFRKDFQFYKVREINNYHHAHDAYLNAVVGTALIKKYPKLESEFVYGDYKVYDVRKMIAKSEQEIGKATAKYFFYSNIMNFFKTEITLANGEIRKRPLIETNGETGEIVWDKGRDFATVRKVLSMPQVNIVKKTEVQTGGFSKESILPKRNSDKLIARKKDWDPKKYGGFDSPTVAYSVLVVAKVEKGKSKKLKSVKELLGITIMERSSFEKNPIDFLEAKGYKEVKKDLIIKLPKYSLFELENGRKRMLASAGELQKGNELALPSKYVNFLYLASHYEKLKGSPEDNEQKQLFVEQHKHYLDEIIEQISEFSKRVILADANLDKVLSAYNKHRDKPIREQAENIIHLFTLTNLGAPAAFKYFDTTIDRKRYTSTKEVLDATLIHQSITGLYETRIDLSQLGGDGGGGGGSSEAAAKGGMNPLQLLQPLPAEIKGTKLLAHWNSGATITCIPESFLEDEQPIKKTLIKTIHGEKQQNVYYVTFKVKGRKVEAEVIASPYEYILLSPTDVPWLTQQPLQLTILVPLQEYQEKILSKTALPEDQKQQLKTLFVKYDNLWQHWENQVGHRKIRPHNIATGDYPPRPQKQYPINPKAKPSIQIVIDDLLKQGVLTPQNSTMNTPVYPVPKPDGRWRMVLDYREVNKTIPLTAAQNQHSAGILATIVRQKYKTTLDLANGFWAHPITPESYWLTAFTWQGKQYCWTRLPQGFLNSPALFNADVVDLLKEIPNVQVYVDDIYLSHDDPKEHVQQLEKVFQILLQAGYVVSLKKSEIGQKTVEFLGFNITKEGRGLTDTFKTKLLNITPPKDLKQLQSILGLLNFARNFIPNFAELVQPLYNLIAPAKGKYIEWSEENTKQLNMVIEALNTASNLEERLPEQRLVIKVNTSPSAGYVRYYNETGKKPIMYLNYVFSKAELKFSMLEKLLTTMHKALIKAMDLAMGQEILVYSPIVSMTKIQKTPLPERKALPIRWITWMTYLEDPRIQFHYDKTLPELKHIPDVYTSSQSPVKHPSQYEGVFYTDGSAIKSPDPTKSNNAGMGIVHATYKPEYQVLNQWSIPLGNHTAQMAEIAAVEFACKKALKIPGPVLVITDSFYVAESANKELPYWKSNGFVNNKKKPLKHISKWKSIAECLSMKPDITIQHEKGISLQIPVFILKGNALADKLATQGSYVVNAGKRTADGSEFEKRTADGSEFESPKKKAKVE

SEQ ID NO: 1338 - protein, 2174 aa, synthetic construct
MPAAKRVKLDGGDKKYSIGLDIGTNSVGWAVITDEYKVPSKKFKVLGNTDRHSIKKNLIGALLFDSGETAEATRLKRTARRRYTRRKNRICYLQEIFSNEMAKVDDSFFHRLEESFLVEEDKKHERHPIFGNIVDEVAYHEKYPTIYHLRKKLVDSTDKADLRLIYLALAHMIKFRGHFLIEGDLNPDNSDVDKLFIQLVQTYNQLFEENPINASGVDAKAILSARLSKSRRLENLIAQLPGEKKNGLFGNLIALSLGLTPNFKSNFDLAEDAKLQLSKDTYDDDLDNLLAQIGDQYADLFLAAKNLSDAILLSDILRVNTEITKAPLSASMIKRYDEHHQDLTLLKALVRQQLPEKYKEIFFDQSKNGYAGYIDGGASQEEFYKFIKPILEKMDGTEELLVKLNREDLLRKQRTFDNGSIPHQIHLGELHAILRRQEDFYPFLKDNREKIEKILTFRIPYYVGPLARGNSRFAWMTRKSEETITPWNFEEVVDKGASAQSFIERMTNFDKNLPNEKVLPKHSLLYEYFTVYNELTKVKYVTEGMRKPAFLSGEQKKAIVDLLFKTNRKVTVKQLKEDYFKKIECFDSVEISGVEDRFNASLGTYHDLLKIIKDKDFLDNEENEDILEDIVLTLTLFEDREMIEERLKTYAHLFDDKVMKQLKRRRYTGWGRLSRKLINGIRDKQSGKTILDFLKSDGFANRNFMQLIHDDSLTFKEDIQKAQVSGQGDSLHEHIANLAGSPAIKKGILQTVKVVDELVKVMGRHKPENIVIEMARENQTTQKGQKNSRERMKRIEEGIKELGSQILKEHPVENTQLQNEKLYLYYLQNGRDMYVDQELDINRLSDYDVDHIVPQSFLKDDSIDNKVLTRSDKARGKSDNVPSEEVVKKMKNYWRQLLNAKLITQRKFDNLTKAERGGLSELDKAGFIKRQLVETRQITKHVAQILDSRMNTKYDENDKLIREVKVITLKSKLVSDFRKDFQFYKVREINNYHHAHDAYLNAVVGTALIKKYPKLESEFVYGDYKVYDVRKMIAKSEQEIGKATAKYFFYSNIMNFFKTEITLANGEIRKRPLIETNGETGEIVWDKGRDFATVRKVLSMPQVNIVKKTEVQTGGFSKESILPKRNSDKLIARKKDWDPKKYGGFDSPTVAYSVLVVAKVEKGKSKKLKSVKELLGITIMERSSFEKNPIDFLEAKGYKEVKKDLIIKLPKYSLFELENGRKRMLASAGELQKGNELALPSKYVNFLYLASHYEKLKGSPEDNEQKQLFVEQHKHYLDEIIEQISEFSKRVILADANLDKVLSAYNKHRDKPIREQAENIIHLFTLTNLGAPAAFKYFDTTIDRKRYTSTKEVLDATLIHQSITGLYETRIDLSQLGGDGGGGGGGSGSSGGMNPLQLLQPLPAEIKGTKLLAHWNSGATITCIPESFLEDEQPIKKTLIKTIHGEKQQNVYYVTFKVKGRKVEAEVIASPYEYILLSPTDVPWLTQQPLQLTILVPLQEYQEKILSKTALPEDQKQQLKTLFVKYDNLWQHWENQVGHRKIRPHNIATGDYPPRPQKQYPINPKAKPSIQIVIDDLLKQGVLTPQNSTMNTPVYPVPKPDGRWRMVLDYREVNKTIPLTAAQNQHSAGILATIVRQKYKTTLDLANGFWAHPITPESYWLTAFTWQGKQYCWTRLPQGFLNSPALFNADVVDLLKEIPNVQVYVDDIYLSHDDPKEHVQQLEKVFQILLQAGYVVSLKKSEIGQKTVEFLGFNITKEGRGLTDTFKTKLLNITPPKDLKQLQSILGLLNFARNFIPNFAELVQPLYNLIAPAKGKYIEWSEENTKQLNMVIEALNTASNLEERLPEQRLVIKVNTSPSAGYVRYYNETGKKPIMYLNYVFSKAELKFSMLEKLLTTMHKALIKAMDLAMGQEILVYSPIVSMTKIQKTPLPERKALPIRWITWMTYLEDPRIQFHYDKTLPELKHIPDVYTSSQSPVKHPSQYEGVFYTDGSAIKSPDPTKSNNAGMGIVHATYKPEYQVLNQWSIPLGNHTAQMAEIAAVEFACKKALKIPGPVLVITDSFYVAESANKELPYWKSNGFVNNKKKPLKHISKWKSIAECLSMKPDITIQHEKGISLQIPVFILKGNALADKLATQGSYVVNAGKRTADGSEFEKRTADGSEFESPKKKAKVE

SEQ ID NO: 1339 - protein, 2176 aa, synthetic construct
MPAAKRVKLDGGDKKYSIGLDIGTNSVGWAVITDEYKVPSKKFKVLGNTDRHSIKKNLIGALLFDSGETAEATRLKRTARRRYTRRKNRICYLQEIFSNEMAKVDDSFFHRLEESFLVEEDKKHERHPIFGNIVDEVAYHEKYPTIYHLRKKLVDSTDKADLRLIYLALAHMIKFRGHFLIEGDLNPDNSDVDKLFIQLVQTYNQLFEENPINASGVDAKAILSARLSKSRRLENLIAQLPGEKKNGLFGNLIALSLGLTPNFKSNFDLAEDAKLQLSKDTYDDDLDNLLAQIGDQYADLFLAAKNLSDAILLSDILRVNTEITKAPLSASMIKRYDEHHQDLTLLKALVRQQLPEKYKEIFFDQSKNGYAGYIDGGASQEEFYKFIKPILEKMDGTEELLVKLNREDLLRKQRTFDNGSIPHQIHLGELHAILRRQEDFYPFLKDNREKIEKILTFRIPYYVGPLARGNSRFAWMTRKSEETITPWNFEEVVDKGASAQSFIERMTNFDKNLPNEKVLPKHSLLYEYFTVYNELTKVKYVTEGMRKPAFLSGEQKKAIVDLLFKTNRKVTVKQLKEDYFKKIECFDSVEISGVEDRFNASLGTYHDLLKIIKDKDFLDNEENEDILEDIVLTLTLFEDREMIEERLKTYAHLFDDKVMKQLKRRRYTGWGRLSRKLINGIRDKQSGKTILDFLKSDGFANRNFMQLIHDDSLTFKEDIQKAQVSGQGDSLHEHIANLAGSPAIKKGILQTVKVVDELVKVMGRHKPENIVIEMARENQTTQKGQKNSRERMKRIEEGIKELGSQILKEHPVENTQLQNEKLYLYYLQNGRDMYVDQELDINRLSDYDVDHIVPQSFLKDDSIDNKVLTRSDKARGKSDNVPSEEVVKKMKNYWRQLLNAKLITQRKFDNLTKAERGGLSELDKAGFIKRQLVETRQITKHVAQILDSRMNTKYDENDKLIREVKVITLKSKLVSDFRKDFQFYKVREINNYHHAHDAYLNAVVGTALIKKYPKLESEFVYGDYKVYDVRKMIAKSEQEIGKATAKYFFYSNIMNFFKTEITLANGEIRKRPLIETNGETGEIVWDKGRDFATVRKVLSMPQVNIVKKTEVQTGGFSKESILPKRNSDKLIARKKDWDPKKYGGFDSPTVAYSVLVVAKVEKGKSKKLKSVKELLGITIMERSSFEKNPIDFLEAKGYKEVKKDLIIKLPKYSLFELENGRKRMLASAGELQKGNELALPSKYVNFLYLASHYEKLKGSPEDNEQKQLFVEQHKHYLDEIIEQISEFSKRVILADANLDKVLSAYNKHRDKPIREQAENIIHLFTLTNLGAPAAFKYFDTTIDRKRYTSTKEVLDATLIHQSITGLYETRIDLSQLGGDGGGGGEAAAKGSSGGMNPLQLLQPLPAEIKGTKLLAHWNSGATITCIPESFLEDEQPIKKTLIKTIHGEKQQNVYYVTFKVKGRKVEAEVIASPYEYILLSPTDVPWLTQQPLQLTILVPLQEYQEKILSKTALPEDQKQQLKTLFVKYDNLWQHWENQVGHRKIRPHNIATGDYPPRPQKQYPINPKAKPSIQIVIDDLLKQGVLTPQNSTMNTPVYPVPKPDGRWRMVLDYREVNKTIPLTAAQNQHSAGILATIVRQKYKTTLDLANGFWAHPITPESYWLTAFTWQGKQYCWTRLPQGFLNSPALFNADVVDLLKEIPNVQVYVDDIYLSHDDPKEHVQQLEKVFQILLQAGYVVSLKKSEIGQKTVEFLGFNITKEGRGLTDTFKTKLLNITPPKDLKQLQSILGLLNFARNFIPNFAELVQPLYNLIAPAKGKYIEWSEENTKQLNMVIEALNTASNLEERLPEQRLVIKVNTSPSAGYVRYYNETGKKPIMYLNYVFSKAELKFSMLEKLLTTMHKALIKAMDLAMGQEILVYSPIVSMTKIQKTPLPERKALPIRWITWMTYLEDPRIQFHYDKTLPELKHIPDVYTSSQSPVKHPSQYEGVFYTDGSAIKSPDPTKSNNAGMGIVHATYKPEYQVLNQWSIPLGNHTAQMAEIAAVEFACKKALKIPGPVLVITDSFYVAESANKELPYWKSNGFVNNKKKPLKHISKWKSIAECLSMKPDITIQHEKGISLQIPVFILKGNALADKLATQGSYVVNAGKRTADGSEFEKRTADGSEFESPKKKAKVE

SEQ ID NO: 1340 - protein, 2171 aa, synthetic construct
MPAAKRVKLDGGDKKYSIGLDIGTNSVGWAVITDEYKVPSKKFKVLGNTDRHSIKKNLIGALLFDSGETAEATRLKRTARRRYTRRKNRICYLQEIFSNEMAKVDDSFFHRLEESFLVEEDKKHERHPIFGNIVDEVAYHEKYPTIYHLRKKLVDSTDKADLRLIYLALAHMIKFRGHFLIEGDLNPDNSDVDKLFIQLVQTYNQLFEENPINASGVDAKAILSARLSKSRRLENLIAQLPGEKKNGLFGNLIALSLGLTPNFKSNFDLAEDAKLQLSKDTYDDDLDNLLAQIGDQYADLFLAAKNLSDAILLSDILRVNTEITKAPLSASMIKRYDEHHQDLTLLKALVRQQLPEKYKEIFFDQSKNGYAGYIDGGASQEEFYKFIKPILEKMDGTEELLVKLNREDLLRKQRTFDNGSIPHQIHLGELHAILRRQEDFYPFLKDNREKIEKILTFRIPYYVGPLARGNSRFAWMTRKSEETITPWNFEEVVDKGASAQSFIERMTNFDKNLPNEKVLPKHSLLYEYFTVYNELTKVKYVTEGMRKPAFLSGEQKKAIVDLLFKTNRKVTVKQLKEDYFKKIECFDSVEISGVEDRFNASLGTYHDLLKIIKDKDFLDNEENEDILEDIVLTLTLFEDREMIEERLKTYAHLFDDKVMKQLKRRRYTGWGRLSRKLINGIRDKQSGKTILDFLKSDGFANRNFMQLIHDDSLTFKEDIQKAQVSGQGDSLHEHIANLAGSPAIKKGILQTVKVVDELVKVMGRHKPENIVIEMARENQTTQKGQKNSRERMKRIEEGIKELGSQILKEHPVENTQLQNEKLYLYYLQNGRDMYVDQELDINRLSDYDVDHIVPQSFLKDDSIDNKVLTRSDKARGKSDNVPSEEVVKKMKNYWRQLLNAKLITQRKFDNLTKAERGGLSELDKAGFIKRQLVETRQITKHVAQILDSRMNTKYDENDKLIREVKVITLKSKLVSDFRKDFQFYKVREINNYHHAHDAYLNAVVGTALIKKYPKLESEFVYGDYKVYDVRKMIAKSEQEIGKATAKYFFYSNIMNFFKTEITLANGEIRKRPLIETNGETGEIVWDKGRDFATVRKVLSMPQVNIVKKTEVQTGGFSKESILPKRNSDKLIARKKDWDPKKYGGFDSPTVAYSVLVVAKVEKGKSKKLKSVKELLGITIMERSSFEKNPIDFLEAKGYKEVKKDLIIKLPKYSLFELENGRKRMLASAGELQKGNELALPSKYVNFLYLASHYEKLKGSPEDNEQKQLFVEQHKHYLDEIIEQISEFSKRVILADANLDKVLSAYNKHRDKPIREQAENIIHLFTLTNLGAPAAFKYFDTTIDRKRYTSTKEVLDATLIHQSITGLYETRIDLSQLGGDGGGSSGGGGGMNPLQLLQPLPAEIKGTKLLAHWNSGATITCIPESFLEDEQPIKKTLIKTIHGEKQQNVYYVTFKVKGRKVEAEVIASPYEYILLSPTDVPWLTQQPLQLTILVPLQEYQEKILSKTALPEDQKQQLKTLFVKYDNLWQHWENQVGHRKIRPHNIATGDYPPRPQKQYPINPKAKPSIQIVIDDLLKQGVLTPQNSTMNTPVYPVPKPDGRWRMVLDYREVNKTIPLTAAQNQHSAGILATIVRQKYKTTLDLANGFWAHPITPESYWLTAFTWQGKQYCWTRLPQGFLNSPALFNADVVDLLKEIPNVQVYVDDIYLSHDDPKEHVQQLEKVFQILLQAGYVVSLKKSEIGQKTVEFLGFNITKEGRGLTDTFKTKLLNITPPKDLKQLQSILGLLNFARNFIPNFAELVQPLYNLIAPAKGKYIEWSEENTKQLNMVIEALNTASNLEERLPEQRLVIKVNTSPSAGYVRYYNETGKKPIMYLNYVFSKAELKFSMLEKLLTTMHKALIKAMDLAMGQEILVYSPIVSMTKIQKTPLPERKALPIRWITWMTYLEDPRIQFHYDKTLPELKHIPDVYTSSQSPVKHPSQYEGVFYTDGSAIKSPDPTKSNNAGMGIVHATYKPEYQVLNQWSIPLGNHTAQMAEIAAVEFACKKALKIPGPVLVITDSFYVAESANKELPYWKSNGFVNNKKKPLKHISKWKSIAECLSMKPDITIQHEKGISLQIPVFILKGNALADKLATQGSYVVNAGKRTADGSEFEKRTADGSEFESPKKKAKVE

SEQ ID NO: 1341 - protein, 2171 aa, synthetic construct
MPAAKRVKLDGGDKKYSIGLDIGTNSVGWAVITDEYKVPSKKFKVLGNTDRHSIKKNLIGALLFDSGETAEATRLKRTARRRYTRRKNRICYLQEIFSNEMAKVDDSFFHRLEESFLVEEDKKHERHPIFGNIVDEVAYHEKYPTIYHLRKKLVDSTDKADLRLIYLALAHMIKFRGHFLIEGDLNPDNSDVDKLFIQLVQTYNQLFEENPINASGVDAKAILSARLSKSRRLENLIAQLPGEKKNGLFGNLIALSLGLTPNFKSNFDLAEDAKLQLSKDTYDDDLDNLLAQIGDQYADLFLAAKNLSDAILLSDILRVNTEITKAPLSASMIKRYDEHHQDLTLLKALVRQQLPEKYKEIFFDQSKNGYAGYIDGGASQEEFYKFIKPILEKMDGTEELLVKLNREDLLRKQRTFDNGSIPHQIHLGELHAILRRQEDFYPFLKDNREKIEKILTFRIPYYVGPLARGNSRFAWMTRKSEETITPWNFEEVVDKGASAQSFIERMTNFDKNLPNEKVLPKHSLLYEYFTVYNELTKVKYVTEGMRKPAFLSGEQKKAIVDLLFKTNRKVTVKQLKEDYFKKIECFDSVEISGVEDRFNASLGTYHDLLKIIKDKDFLDNEENEDILEDIVLTLTLFEDREMIEERLKTYAHLFDDKVMKQLKRRRYTGWGRLSRKLINGIRDKQSGKTILDFLKSDGFANRNFMQLIHDDSLTFKEDIQKAQVSGQGDSLHEHIANLAGSPAIKKGILQTVKVVDELVKVMGRHKPENIVIEMARENQTTQKGQKNSRERMKRIEEGIKELGSQILKEHPVENTQLQNEKLYLYYLQNGRDMYVDQELDINRLSDYDVDHIVPQSFLKDDSIDNKVLTRSDKARGKSDNVPSEEVVKKMKNYWRQLLNAKLITQRKFDNLTKAERGGLSELDKAGFIKRQLVETRQITKHVAQILDSRMNTKYDENDKLIREVKVITLKSKLVSDFRKDFQFYKVREINNYHHAHDAYLNAVVGTALIKKYPKLESEFVYGDYKVYDVRKMIAKSEQEIGKATAKYFFYSNIMNFFKTEITLANGEIRKRPLIETNGETGEIVWDKGRDFATVRKVLSMPQVNIVKKTEVQTGGFSKESILPKRNSDKLIARKKDWDPKKYGGFDSPTVAYSVLVVAKVEKGKSKKLKSVKELLGITIMERSSFEKNPIDFLEAKGYKEVKKDLIIKLPKYSLFELENGRKRMLASAGELQKGNELALPSKYVNFLYLASHYEKLKGSPEDNEQKQLFVEQHKHYLDEIIEQISEFSKRVILADANLDKVLSAYNKHRDKPIREQAENIIHLFTLTNLGAPAAFKYFDTTIDRKRYTSTKEVLDATLIHQSITGLYETRIDLSQLGGDGGGGGGGSGGMNPLQLLQPLPAEIKGTKLLAHWNSGATITCIPESFLEDEQPIKKTLIKTIHGEKQQNVYYVTFKVKGRKVEAEVIASPYEYILLSPTDVPWLTQQPLQLTILVPLQEYQEKILSKTALPEDQKQQLKTLFVKYDNLWQHWENQVGHRKIRPHNIATGDYPPRPQKQYPINPKAKPSIQIVIDDLLKQGVLTPQNSTMNTPVYPVPKPDGRWRMVLDYREVNKTIPLTAAQNQHSAGILATIVRQKYKTTLDLANGFWAHPITPESYWLTAFTWQGKQYCWTRLPQGFLNSPALFNADVVDLLKEIPNVQVYVDDIYLSHDDPKEHVQQLEKVFQILLQAGYVVSLKKSEIGQKTVEFLGFNITKEGRGLTDTFKTKLLNITPPKDLKQLQSILGLLNFARNFIPNFAELVQPLYNLIAPAKGKYIEWSEENTKQLNMVIEALNTASNLEERLPEQRLVIKVNTSPSAGYVRYYNETGKKPIMYLNYVFSKAELKFSMLEKLLTTMHKALIKAMDLAMGQEILVYSPIVSMTKIQKTPLPERKALPIRWITWMTYLEDPRIQFHYDKTLPELKHIPDVYTSSQSPVKHPSQYEGVFYTDGSAIKSPDPTKSNNAGMGIVHATYKPEYQVLNQWSIPLGNHTAQMAEIAAVEFACKKALKIPGPVLVITDSFYVAESANKELPYWKSNGFVNNKKKPLKHISKWKSIAECLSMKPDITIQHEKGISLQIPVFILKGNALADKLATQGSYVVNAGKRTADGSEFEKRTADGSEFESPKKKAKVE

SEQ ID NO: 1342 - protein, 2176 aa, synthetic construct
MPAAKRVKLDGGDKKYSIGLDIGTNSVGWAVITDEYKVPSKKFKVLGNTDRHSIKKNLIGALLFDSGETAEATRLKRTARRRYTRRKNRICYLQEIFSNEMAKVDDSFFHRLEESFLVEEDKKHERHPIFGNIVDEVAYHEKYPTIYHLRKKLVDSTDKADLRLIYLALAHMIKFRGHFLIEGDLNPDNSDVDKLFIQLVQTYNQLFEENPINASGVDAKAILSARLSKSRRLENLIAQLPGEKKNGLFGNLIALSLGLTPNFKSNFDLAEDAKLQLSKDTYDDDLDNLLAQIGDQYADLFLAAKNLSDAILLSDILRVNTEITKAPLSASMIKRYDEHHQDLTLLKALVRQQLPEKYKEIFFDQSKNGYAGYIDGGASQEEFYKFIKPILEKMDGTEELLVKLNREDLLRKQRTFDNGSIPHQIHLGELHAILRRQEDFYPFLKDNREKIEKILTFRIPYYVGPLARGNSRFAWMTRKSEETITPWNFEEVVDKGASAQSFIERMTNFDKNLPNEKVLPKHSLLYEYFTVYNELTKVKYVTEGMRKPAFLSGEQKKAIVDLLFKTNRKVTVKQLKEDYFKKIECFDSVEISGVEDRFNASLGTYHDLLKIIKDKDFLDNEENEDILEDIVLTLTLFEDREMIEERLKTYAHLFDDKVMKQLKRRRYTGWGRLSRKLINGIRDKQSGKTILDFLKSDGFANRNFMQLIHDDSLTFKEDIQKAQVSGQGDSLHEHIANLAGSPAIKKGILQTVKVVDELVKVMGRHKPENIVIEMARENQTTQKGQKNSRERMKRIEEGIKELGSQILKEHPVENTQLQNEKLYLYYLQNGRDMYVDQELDINRLSDYDVDHIVPQSFLKDDSIDNKVLTRSDKARGKSDNVPSEEVVKKMKNYWRQLLNAKLITQRKFDNLTKAERGGLSELDKAGFIKRQLVETRQITKHVAQILDSRMNTKYDENDKLIREVKVITLKSKLVSDFRKDFQFYKVREINNYHHAHDAYLNAVVGTALIKKYPKLESEFVYGDYKVYDVRKMIAKSEQEIGKATAKYFFYSNIMNFFKTEITLANGEIRKRPLIETNGETGEIVWDKGRDFATVRKVLSMPQVNIVKKTEVQTGGFSKESILPKRNSDKLIARKKDWDPKKYGGFDSPTVAYSVLVVAKVEKGKSKKLKSVKELLGITIMERSSFEKNPIDFLEAKGYKEVKKDLIIKLPKYSLFELENGRKRMLASAGELQKGNELALPSKYVNFLYLASHYEKLKGSPEDNEQKQLFVEQHKHYLDEIIEQISEFSKRVILADANLDKVLSAYNKHRDKPIREQAENIIHLFTLTNLGAPAAFKYFDTTIDRKRYTSTKEVLDATLIHQSITGLYETRIDLSQLGGDGGEAAAKGGGPAPGGMNPLQLLQPLPAEIKGTKLLAHWNSGATITCIPESFLEDEQPIKKTLIKTIHGEKQQNVYYVTFKVKGRKVEAEVIASPYEYILLSPTDVPWLTQQPLQLTILVPLQEYQEKILSKTALPEDQKQQLKTLFVKYDNLWQHWENQVGHRKIRPHNIATGDYPPRPQKQYPINPKAKPSIQIVIDDLLKQGVLTPQNSTMNTPVYPVPKPDGRWRMVLDYREVNKTIPLTAAQNQHSAGILATIVRQKYKTTLDLANGFWAHPITPESYWLTAFTWQGKQYCWTRLPQGFLNSPALFNADVVDLLKEIPNVQVYVDDIYLSHDDPKEHVQQLEKVFQILLQAGYVVSLKKSEIGQKTVEFLGFNITKEGRGLTDTFKTKLLNITPPKDLKQLQSILGLLNFARNFIPNFAELVQPLYNLIAPAKGKYIEWSEENTKQLNMVIEALNTASNLEERLPEQRLVIKVNTSPSAGYVRYYNETGKKPIMYLNYVFSKAELKFSMLEKLLTTMHKALIKAMDLAMGQEILVYSPIVSMTKIQKTPLPERKALPIRWITWMTYLEDPRIQFHYDKTLPELKHIPDVYTSSQSPVKHPSQYEGVFYTDGSAIKSPDPTKSNNAGMGIVHATYKPEYQVLNQWSIPLGNHTAQMAEIAAVEFACKKALKIPGPVLVITDSFYVAESANKELPYWKSNGFVNNKKKPLKHISKWKSIAECLSMKPDITIQHEKGISLQIPVFILKGNALADKLATQGSYVVNAGKRTADGSEFEKRTADGSEFESPKKKAKVE

SEQ ID NO: 1343 - protein, 2171 aa, synthetic construct
MPAAKRVKLDGGDKKYSIGLDIGTNSVGWAVITDEYKVPSKKFKVLGNTDRHSIKKNLIGALLFDSGETAEATRLKRTARRRYTRRKNRICYLQEIFSNEMAKVDDSFFHRLEESFLVEEDKKHERHPIFGNIVDEVAYHEKYPTIYHLRKKLVDSTDKADLRLIYLALAHMIKFRGHFLIEGDLNPDNSDVDKLFIQLVQTYNQLFEENPINASGVDAKAILSARLSKSRRLENLIAQLPGEKKNGLFGNLIALSLGLTPNFKSNFDLAEDAKLQLSKDTYDDDLDNLLAQIGDQYADLFLAAKNLSDAILLSDILRVNTEITKAPLSASMIKRYDEHHQDLTLLKALVRQQLPEKYKEIFFDQSKNGYAGYIDGGASQEEFYKFIKPILEKMDGTEELLVKLNREDLLRKQRTFDNGSIPHQIHLGELHAILRRQEDFYPFLKDNREKIEKILTFRIPYYVGPLARGNSRFAWMTRKSEETITPWNFEEVVDKGASAQSFIERMTNFDKNLPNEKVLPKHSLLYEYFTVYNELTKVKYVTEGMRKPAFLSGEQKKAIVDLLFKTNRKVTVKQLKEDYFKKIECFDSVEISGVEDRFNASLGTYHDLLKIIKDKDFLDNEENEDILEDIVLTLTLFEDREMIEERLKTYAHLFDDKVMKQLKRRRYTGWGRLSRKLINGIRDKQSGKTILDFLKSDGFANRNFMQLIHDDSLTFKEDIQKAQVSGQGDSLHEHIANLAGSPAIKKGILQTVKVVDELVKVMGRHKPENIVIEMARENQTTQKGQKNSRERMKRIEEGIKELGSQILKEHPVENTQLQNEKLYLYYLQNGRDMYVDQELDINRLSDYDVDHIVPQSFLKDDSIDNKVLTRSDKARGKSDNVPSEEVVKKMKNYWRQLLNAKLITQRKFDNLTKAERGGLSELDKAGFIKRQLVETRQITKHVAQILDSRMNTKYDENDKLIREVKVITLKSKLVSDFRKDFQFYKVREINNYHHAHDAYLNAVVGTALIKKYPKLESEFVYGDYKVYDVRKMIAKSEQEIGKATAKYFFYSNIMNFFKTEITLANGEIRKRPLIETNGETGEIVWDKGRDFATVRKVLSMPQVNIVKKTEVQTGGFSKESILPKRNSDKLIARKKDWDPKKYGGFDSPTVAYSVLVVAKVEKGKSKKLKSVKELLGITIMERSSFEKNPIDFLEAKGYKEVKKDLIIKLPKYSLFELENGRKRMLASAGELQKGNELALPSKYVNFLYLASHYEKLKGSPEDNEQKQLFVEQHKHYLDEIIEQISEFSKRVILADANLDKVLSAYNKHRDKPIREQAENIIHLFTLTNLGAPAAFKYFDTTIDRKRYTSTKEVLDATLIHQSITGLYETRIDLSQLGGDGGGGGGSSGGMNPLQLLQPLPAEIKGTKLLAHWNSGATITCIPESFLEDEQPIKKTLIKTIHGEKQQNVYYVTFKVKGRKVEAEVIASPYEYILLSPTDVPWLTQQPLQLTILVPLQEYQEKILSKTALPEDQKQQLKTLFVKYDNLWQHWENQVGHRKIRPHNIATGDYPPRPQKQYPINPKAKPSIQIVIDDLLKQGVLTPQNSTMNTPVYPVPKPDGRWRMVLDYREVNKTIPLTAAQNQHSAGILATIVRQKYKTTLDLANGFWAHPITPESYWLTAFTWQGKQYCWTRLPQGFLNSPALFNADVVDLLKEIPNVQVYVDDIYLSHDDPKEHVQQLEKVFQILLQAGYVVSLKKSEIGQKTVEFLGFNITKEGRGLTDTFKTKLLNITPPKDLKQLQSILGLLNFARNFIPNFAELVQPLYNLIAPAKGKYIEWSEENTKQLNMVIEALNTASNLEERLPEQRLVIKVNTSPSAGYVRYYNETGKKPIMYLNYVFSKAELKFSMLEKLLTTMHKALIKAMDLAMGQEILVYSPIVSMTKIQKTPLPERKALPIRWITWMTYLEDPRIQFHYDKTLPELKHIPDVYTSSQSPVKHPSQYEGVFYTDGSAIKSPDPTKSNNAGMGIVHATYKPEYQVLNQWSIPLGNHTAQMAEIAAVEFACKKALKIPGPVLVITDSFYVAESANKELPYWKSNGFVNNKKKPLKHISKWKSIAECLSMKPDITIQHEKGISLQIPVFILKGNALADKLATQGSYVVNAGKRTADGSEFEKRTADGSEFESPKKKAKVE

SEQ ID NO: 1344 - protein, 2174 aa, synthetic construct
MPAAKRVKLDGGDKKYSIGLDIGTNSVGWAVITDEYKVPSKKFKVLGNTDRHSIKKNLIGALLFDSGETAEATRLKRTARRRYTRRKNRICYLQEIFSNEMAKVDDSFFHRLEESFLVEEDKKHERHPIFGNIVDEVAYHEKYPTIYHLRKKLVDSTDKADLRLIYLALAHMIKFRGHFLIEGDLNPDNSDVDKLFIQLVQTYNQLFEENPINASGVDAKAILSARLSKSRRLENLIAQLPGEKKNGLFGNLIALSLGLTPNFKSNFDLAEDAKLQLSKDTYDDDLDNLLAQIGDQYADLFLAAKNLSDAILLSDILRVNTEITKAPLSASMIKRYDEHHQDLTLLKALVRQQLPEKYKEIFFDQSKNGYAGYIDGGASQEEFYKFIKPILEKMDGTEELLVKLNREDLLRKQRTFDNGSIPHQIHLGELHAILRRQEDFYPFLKDNREKIEKILTFRIPYYVGPLARGNSRFAWMTRKSEETITPWNFEEVVDKGASAQSFIERMTNFDKNLPNEKVLPKHSLLYEYFTVYNELTKVKYVTEGMRKPAFLSGEQKKAIVDLLFKTNRKVTVKQLKEDYFKKIECFDSVEISGVEDRFNASLGTYHDLLKIIKDKDFLDNEENEDILEDIVLTLTLFEDREMIEERLKTYAHLFDDKVMKQLKRRRYTGWGRLSRKLINGIRDKQSGKTILDFLKSDGFANRNFMQLIHDDSLTFKEDIQKAQVSGQGDSLHEHIANLAGSPAIKKGILQTVKVVDELVKVMGRHKPENIVIEMARENQTTQKGQKNSRERMKRIEEGIKELGSQILKEHPVENTQLQNEKLYLYYLQNGRDMYVDQELDINRLSDYDVDHIVPQSFLKDDSIDNKVLTRSDKARGKSDNVPSEEVVKKMKNYWRQLLNAKLITQRKFDNLTKAERGGLSELDKAGFIKRQLVETRQITKHVAQILDSRMNTKYDENDKLIREVKVITLKSKLVSDFRKDFQFYKVREINNYHHAHDAYLNAVVGTALIKKYPKLESEFVYGDYKVYDVRKMIAKSEQEIGKATAKYFFYSNIMNFFKTEITLANGEIRKRPLIETNGETGEIVWDKGRDFATVRKVLSMPQVNIVKKTEVQTGGFSKESILPKRNSDKLIARKKDWDPKKYGGFDSPTVAYSVLVVAKVEKGKSKKLKSVKELLGITIMERSSFEKNPIDFLEAKGYKEVKKDLIIKLPKYSLFELENGRKRMLASAGELQKGNELALPSKYVNFLYLASHYEKLKGSPEDNEQKQLFVEQHKHYLDEIIEQISEFSKRVILADANLDKVLSAYNKHRDKPIREQAENIIHLFTLTNLGAPAAFKYFDTTIDRKRYTSTKEVLDATLIHQSITGLYETRIDLSQLGGDGGGSSGSSGSSGGMNPLQLLQPLPAEIKGTKLLAHWNSGATITCIPESFLEDEQPIKKTLIKTIHGEKQQNVYYVTFKVKGRKVEAEVIASPYEYILLSPTDVPWLTQQPLQLTILVPLQEYQEKILSKTALPEDQKQQLKTLFVKYDNLWQHWENQVGHRKIRPHNIATGDYPPRPQKQYPINPKAKPSIQIVIDDLLKQGVLTPQNSTMNTPVYPVPKPDGRWRMVLDYREVNKTIPLTAAQNQHSAGILATIVRQKYKTTLDLANGFWAHPITPESYWLTAFTWQGKQYCWTRLPQGFLNSPALFNADVVDLLKEIPNVQVYVDDIYLSHDDPKEHVQQLEKVFQILLQAGYVVSLKKSEIGQKTVEFLGFNITKEGRGLTDTFKTKLLNITPPKDLKQLQSILGLLNFARNFIPNFAELVQPLYNLIAPAKGKYIEWSEENTKQLNMVIEALNTASNLEERLPEQRLVIKVNTSPSAGYVRYYNETGKKPIMYLNYVFSKAELKFSMLEKLLTTMHKALIKAMDLAMGQEILVYSPIVSMTKIQKTPLPERKALPIRWITWMTYLEDPRIQFHYDKTLPELKHIPDVYTSSQSPVKHPSQYEGVFYTDGSAIKSPDPTKSNNAGMGIVHATYKPEYQVLNQWSIPLGNHTAQMAEIAAVEFACKKALKIPGPVLVITDSFYVAESANKELPYWKSNGFVNNKKKPLKHISKWKSIAECLSMKPDITIQHEKGISLQIPVFILKGNALADKLATQGSYVVNAGKRTADGSEFEKRTADGSEFESPKKKAKVE

SEQ ID NO: 1345 - protein, 2171 aa, synthetic construct
MPAAKRVKLDGGDKKYSIGLDIGTNSVGWAVITDEYKVPSKKFKVLGNTDRHSIKKNLIGALLFDSGETAEATRLKRTARRRYTRRKNRICYLQEIFSNEMAKVDDSFFHRLEESFLVEEDKKHERHPIFGNIVDEVAYHEKYPTIYHLRKKLVDSTDKADLRLIYLALAHMIKFRGHFLIEGDLNPDNSDVDKLFIQLVQTYNQLFEENPINASGVDAKAILSARLSKSRRLENLIAQLPGEKKNGLFGNLIALSLGLTPNFKSNFDLAEDAKLQLSKDTYDDDLDNLLAQIGDQYADLFLAAKNLSDAILLSDILRVNTEITKAPLSASMIKRYDEHHQDLTLLKALVRQQLPEKYKEIFFDQSKNGYAGYIDGGASQEEFYKFIKPILEKMDGTEELLVKLNREDLLRKQRTFDNGSIPHQIHLGELHAILRRQEDFYPFLKDNREKIEKILTFRIPYYVGPLARGNSRFAWMTRKSEETITPWNFEEVVDKGASAQSFIERMTNFDKNLPNEKVLPKHSLLYEYFTVYNELTKVKYVTEGMRKPAFLSGEQKKAIVDLLFKTNRKVTVKQLKEDYFKKIECFDSVEISGVEDRFNASLGTYHDLLKIIKDKDFLDNEENEDILEDIVLTLTLFEDREMIEERLKTYAHLFDDKVMKQLKRRRYTGWGRLSRKLINGIRDKQSGKTILDFLKSDGFANRNFMQLIHDDSLTFKEDIQKAQVSGQGDSLHEHIANLAGSPAIKKGILQTVKVVDELVKVMGRHKPENIVIEMARENQTTQKGQKNSRERMKRIEEGIKELGSQILKEHPVENTQLQNEKLYLYYLQNGRDMYVDQELDINRLSDYDVDHIVPQSFLKDDSIDNKVLTRSDKARGKSDNVPSEEVVKKMKNYWRQLLNAKLITQRKFDNLTKAERGGLSELDKAGFIKRQLVETRQITKHVAQILDSRMNTKYDENDKLIREVKVITLKSKLVSDFRKDFQFYKVREINNYHHAHDAYLNAVVGTALIKKYPKLESEFVYGDYKVYDVRKMIAKSEQEIGKATAKYFFYSNIMNFFKTEITLANGEIRKRPLIETNGETGEIVWDKGRDFATVRKVLSMPQVNIVKKTEVQTGGFSKESILPKRNSDKLIARKKDWDPKKYGGFDSPTVAYSVLVVAKVEKGKSKKLKSVKELLGITIMERSSFEKNPIDFLEAKGYKEVKKDLIIKLPKYSLFELENGRKRMLASAGELQKGNELALPSKYVNFLYLASHYEKLKGSPEDNEQKQLFVEQHKHYLDEIIEQISEFSKRVILADANLDKVLSAYNKHRDKPIREQAENIIHLFTLTNLGAPAAFKYFDTTIDRKRYTSTKEVLDATLIHQSITGLYETRIDLSQLGGDGGPAPGGGGGMNPLQLLQPLPAEIKGTKLLAHWNSGATITCIPESFLEDEQPIKKTLIKTIHGEKQQNVYYVTFKVKGRKVEAEVIASPYEYILLSPTDVPWLTQQPLQLTILVPLQEYQEKILSKTALPEDQKQQLKTLFVKYDNLWQHWENQVGHRKIRPHNIATGDYPPRPQKQYPINPKAKPSIQIVIDDLLKQGVLTPQNSTMNTPVYPVPKPDGRWRMVLDYREVNKTIPLTAAQNQHSAGILATIVRQKYKTTLDLANGFWAHPITPESYWLTAFTWQGKQYCWTRLPQGFLNSPALFNADVVDLLKEIPNVQVYVDDIYLSHDDPKEHVQQLEKVFQILLQAGYVVSLKKSEIGQKTVEFLGFNITKEGRGLTDTFKTKLLNITPPKDLKQLQSILGLLNFARNFIPNFAELVQPLYNLIAPAKGKYIEWSEENTKQLNMVIEALNTASNLEERLPEQRLVIKVNTSPSAGYVRYYNETGKKPIMYLNYVFSKAELKFSMLEKLLTTMHKALIKAMDLAMGQEILVYSPIVSMTKIQKTPLPERKALPIRWITWMTYLEDPRIQFHYDKTLPELKHIPDVYTSSQSPVKHPSQYEGVFYTDGSAIKSPDPTKSNNAGMGIVHATYKPEYQVLNQWSIPLGNHTAQMAEIAAVEFACKKALKIPGPVLVITDSFYVAESANKELPYWKSNGFVNNKKKPLKHISKWKSIAECLSMKPDITIQHEKGISLQIPVFILKGNALADKLATQGSYVVNAGKRTADGSEFEKRTADGSEFESPKKKAKVE

SEQ ID NO: 1346 - protein, 2195 aa, synthetic construct
MPAAKRVKLDGGDKKYSIGLDIGTNSVGWAVITDEYKVPSKKFKVLGNTDRHSIKKNLIGALLFDSGETAEATRLKRTARRRYTRRKNRICYLQEIFSNEMAKVDDSFFHRLEESFLVEEDKKHERHPIFGNIVDEVAYHEKYPTIYHLRKKLVDSTDKADLRLIYLALAHMIKFRGHFLIEGDLNPDNSDVDKLFIQLVQTYNQLFEENPINASGVDAKAILSARLSKSRRLENLIAQLPGEKKNGLFGNLIALSLGLTPNFKSNFDLAEDAKLQLSKDTYDDDLDNLLAQIGDQYADLFLAAKNLSDAILLSDILRVNTEITKAPLSASMIKRYDEHHQDLTLLKALVRQQLPEKYKEIFFDQSKNGYAGYIDGGASQEEFYKFIKPILEKMDGTEELLVKLNREDLLRKQRTFDNGSIPHQIHLGELHAILRRQEDFYPFLKDNREKIEKILTFRIPYYVGPLARGNSRFAWMTRKSEETITPWNFEEVVDKGASAQSFIERMTNFDKNLPNEKVLPKHSLLYEYFTVYNELTKVKYVTEGMRKPAFLSGEQKKAIVDLLFKTNRKVTVKQLKEDYFKKIECFDSVEISGVEDRFNASLGTYHDLLKIIKDKDFLDNEENEDILEDIVLTLTLFEDREMIEERLKTYAHLFDDKVMKQLKRRRYTGWGRLSRKLINGIRDKQSGKTILDFLKSDGFANRNFMQLIHDDSLTFKEDIQKAQVSGQGDSLHEHIANLAGSPAIKKGILQTVKVVDELVKVMGRHKPENIVIEMARENQTTQKGQKNSRERMKRIEEGIKELGSQILKEHPVENTQLQNEKLYLYYLQNGRDMYVDQELDINRLSDYDVDHIVPQSFLKDDSIDNKVLTRSDKARGKSDNVPSEEVVKKMKNYWRQLLNAKLITQRKFDNLTKAERGGLSELDKAGFIKRQLVETRQITKHVAQILDSRMNTKYDENDKLIREVKVITLKSKLVSDFRKDFQFYKVREINNYHHAHDAYLNAVVGTALIKKYPKLESEFVYGDYKVYDVRKMIAKSEQEIGKATAKYFFYSNIMNFFKTEITLANGEIRKRPLIETNGETGEIVWDKGRDFATVRKVLSMPQVNIVKKTEVQTGGFSKESILPKRNSDKLIARKKDWDPKKYGGFDSPTVAYSVLVVAKVEKGKSKKLKSVKELLGITIMERSSFEKNPIDFLEAKGYKEVKKDLIIKLPKYSLFELENGRKRMLASAGELQKGNELALPSKYVNFLYLASHYEKLKGSPEDNEQKQLFVEQHKHYLDEIIEQISEFSKRVILADANLDKVLSAYNKHRDKPIREQAENIIHLFTLTNLGAPAAFKYFDTTIDRKRYTSTKEVLDATLIHQSITGLYETRIDLSQLGGDGGEAAAKEAAAKEAAAKEAAAKEAAAKEAAAKGGMNPLQLLQPLPAEIKGTKLLAHWNSGATITCIPESFLEDEQPIKKTLIKTIHGEKQQNVYYVTFKVKGRKVEAEVIASPYEYILLSPTDVPWLTQQPLQLTILVPLQEYQEKILSKTALPEDQKQQLKTLFVKYDNLWQHWENQVGHRKIRPHNIATGDYPPRPQKQYPINPKAKPSIQIVIDDLLKQGVLTPQNSTMNTPVYPVPKPDGRWRMVLDYREVNKTIPLTAAQNQHSAGILATIVRQKYKTTLDLANGFWAHPITPESYWLTAFTWQGKQYCWTRLPQGFLNSPALFNADVVDLLKEIPNVQVYVDDIYLSHDDPKEHVQQLEKVFQILLQAGYVVSLKKSEIGQKTVEFLGFNITKEGRGLTDTFKTKLLNITPPKDLKQLQSILGKLNFARNFIPNFAELVQPLYNLIAPAKGKYIEWSEENTKQLNMVIEALNTASNLEERLPEQRLVIKVNTSPSAGYVRYYNETGKKPIMYLNYVFSKAELKFSMLEKLLTTMHKALIKAMDLAMGQEILVYSPIVSMTKIQKTPLPERKALPIRWITWMTYLEDPRIQFHYDKTLPELKHIPDVYTSSQSPVKHPSQYEGVFYTDGSAIKSPDPTKSNNAGMGIVHATYKPEYQVLNQWSIPLGNHTAQMAEIAAVEFACKKALKIPGPVLVITDSFYVAESANKELPYWKSNGFVNNKKKPLKHISKWKSIAECLSMKPDITIQHEKGISLQIPVFILKGNALADKLATQGSYVVNAGKRTADGSEFEKRTADGSEFESPKKKAKVE

SEQ ID NO: 1347 - protein, 2185 aa, synthetic construct
MPAAKRVKLDGGDKKYSIGLDIGTNSVGWAVITDEYKVPSKKFKVLGNTDRHSIKKNLIGALLFDSGETAEATRLKRTARRRYTRRKNRICYLQEIFSNEMAKVDDSFFHRLEESFLVEEDKKHERHPIFGNIVDEVAYHEKYPTIYHLRKKLVDSTDKADLRLIYLALAHMIKFRGHFLIEGDLNPDNSDVDKLFIQLVQTYNQLFEENPINASGVDAKAILSARLSKSRRLENLIAQLPGEKKNGLFGNLIALSLGLTPNFKSNFDLAEDAKLQLSKDTYDDDLDNLLAQIGDQYADLFLAAKNLSDAILLSDILRVNTEITKAPLSASMIKRYDEHHQDLTLLKALVRQQLPEKYKEIFFDQSKNGYAGYIDGGASQEEFYKFIKPILEKMDGTEELLVKLNREDLLRKQRTFDNGSIPHQIHLGELHAILRRQEDFYPFLKDNREKIEKILTFRIPYYVGPLARGNSRFAWMTRKSEETITPWNFEEVVDKGASAQSFIERMTNFDKNLPNEKVLPKHSLLYEYFTVYNELTKVKYVTEGMRKPAFLSGEQKKAIVDLLFKTNRKVTVKQLKEDYFKKIECFDSVEISGVEDRFNASLGTYHDLLKIIKDKDFLDNEENEDILEDIVLTLTLFEDREMIEERLKTYAHLFDDKVMKQLKRRRYTGWGRLSRKLINGIRDKQSGKTILDFLKSDGFANRNFMQLIHDDSLTFKEDIQKAQVSGQGDSLHEHIANLAGSPAIKKGILQTVKVVDELVKVMGRHKPENIVIEMARENQTTQKGQKNSRERMKRIEEGIKELGSQILKEHPVENTQLQNEKLYLYYLQNGRDMYVDQELDINRLSDYDVDHIVPQSFLKDDSIDNKVLTRSDKARGKSDNVPSEEVVKKMKNYWRQLLNAKLITQRKFDNLTKAERGGLSELDKAGFIKRQLVETRQITKHVAQILDSRMNTKYDENDKLIREVKVITLKSKLVSDFRKDFQFYKVREINNYHHAHDAYLNAVVGTALIKKYPKLESEFVYGDYKVYDVRKMIAKSEQEIGKATAKYFFYSNIMNFFKTEITLANGEIRKRPLIETNGETGEIVWDKGRDFATVRKVLSMPQVNIVKKTEVQTGGFSKESILPKRNSDKLIARKKDWDPKKYGGFDSPTVAYSVLVVAKVEKGKSKKLKSVKELLGITIMERSSFEKNPIDFLEAKGYKEVKKDLIIKLPKYSLFELENGRKRMLASAGELQKGNELALPSKYVNFLYLASHYEKLKGSPEDNEQKQLFVEQHKHYLDEIIEQISEFSKRVILADANLDKVLSAYNKHRDKPIREQAENIIHLFTLTNLGAPAAFKYFDTTIDRKRYTSTKEVLDATLIHQSITGLYETRIDLSQLGGDGGEAAAKEAAAKEAAAKEAAAKGGMNPLQLLQPLPAEIKGTKLLAHWNSGATITCIPESFLEDEQPIKKTLIKTIHGEKQQNVYYVTFKVKGRKVEAEVIASPYEYILLSPTDVPWLTQQPLQLTILVPLQEYQEKILSKTALPEDQKQQLKTLFVKYDNLWQHWENQVGHRKIRPHNIATGDYPPRPQKQYPINPKAKPSIQIVIDDLLKQGVLTPQNSTMNTPVYPVPKPDGRWRMVLDYREVNKTIPLTAAQNQHSAGILATIVRQKYKTTLDLANGFWAHPITPESYWLTAFTWQGKQYCWTRLPQGFLNSPALFNADVVDLLKEIPNVQVYVDDIYLSHDDPKEHVQQLEKVFQILLQAGYVVSLKKSEIGQKTVEFLGFNITKEGRGLTDTFKTKLLNITPPKDLKQLQSILGKLNFARNFIPNFAELVQPLYNLIAPAKGKYIEWSEENTKQLNMVIEALNTASNLEERLPEQRLVIKVNTSPSAGYVRYYNETGKKPIMYLNYVFSKAELKFSMLEKLLTTMHKALIKAMDLAMGQEILVYSPIVSMTKIQKTPLPERKALPIRWITWMTYLEDPRIQFHYDKTLPELKHIPDVYTSSQSPVKHPSQYEGVFYTDGSAIKSPDPTKSNNAGMGIVHATYKPEYQVLNQWSIPLGNHTAQMAEIAAVEFACKKALKIPGPVLVITDSFYVAESANKELPYWKSNGFVNNKKKPLKHISKWKSIAECLSMKPDITIQHEKGISLQIPVFILKGNALADKLATQGSYVVNAGKRTADGSEFEKRTADGSEFESPKKKAKVE

SEQ ID NO: 1348 - protein, 2176 aa, synthetic construct
MPAAKRVKLDGGDKKYSIGLDIGTNSVGWAVITDEYKVPSKKFKVLGNTDRHSIKKNLIGALLFDSGETAEATRLKRTARRRYTRRKNRICYLQEIFSNEMAKVDDSFFHRLEESFLVEEDKKHERHPIFGNIVDEVAYHEKYPTIYHLRKKLVDSTDKADLRLIYLALAHMIKFRGHFLIEGDLNPDNSDVDKLFIQLVQTYNQLFEENPINASGVDAKAILSARLSKSRRLENLIAQLPGEKKNGLFGNLIALSLGLTPNFKSNFDLAEDAKLQLSKDTYDDDLDNLLAQIGDQYADLFLAAKNLSDAILLSDILRVNTEITKAPLSASMIKRYDEHHQDLTLLKALVRQQLPEKYKEIFFDQSKNGYAGYIDGGASQEEFYKFIKPILEKMDGTEELLVKLNREDLLRKQRTFDNGSIPHQIHLGELHAILRRQEDFYPFLKDNREKIEKILTFRIPYYVGPLARGNSRFAWMTRKSEETITPWNFEEVVDKGASAQSFIERMTNFDKNLPNEKVLPKHSLLYEYFTVYNELTKVKYVTEGMRKPAFLSGEQKKAIVDLLFKTNRKVTVKQLKEDYFKKIECFDSVEISGVEDRFNASLGTYHDLLKIIKDKDFLDNEENEDILEDIVLTLTLFEDREMIEERLKTYAHLFDDKVMKQLKRRRYTGWGRLSRKLINGIRDKQSGKTILDFLKSDGFANRNFMQLIHDDSLTFKEDIQKAQVSGQGDSLHEHIANLAGSPAIKKGILQTVKVVDELVKVMGRHKPENIVIEMARENQTTQKGQKNSRERMKRIEEGIKELGSQILKEHPVENTQLQNEKLYLYYLQNGRDMYVDQELDINRLSDYDVDHIVPQSFLKDDSIDNKVLTRSDKARGKSDNVPSEEVVKKMKNYWRQLLNAKLITQRKFDNLTKAERGGLSELDKAGFIKRQLVETRQITKHVAQILDSRMNTKYDENDKLIREVKVITLKSKLVSDFRKDFQFYKVREINNYHHAHDAYLNAVVGTALIKKYPKLESEFVYGDYKVYDVRKMIAKSEQEIGKATAKYFFYSNIMNFFKTEITLANGEIRKRPLIETNGETGEIVWDKGRDFATVRKVLSMPQVNIVKKTEVQTGGFSKESILPKRNSDKLIARKKDWDPKKYGGFDSPTVAYSVLVVAKVEKGKSKKLKSVKELLGITIMERSSFEKNPIDFLEAKGYKEVKKDLIIKLPKYSLFELENGRKRMLASAGELQKGNELALPSKYVNFLYLASHYEKLKGSPEDNEQKQLFVEQHKHYLDEIIEQISEFSKRVILADANLDKVLSAYNKHRDKPIREQAENIIHLFTLTNLGAPAAFKYFDTTIDRKRYTSTKEVLDATLIHQSITGLYETRIDLSQLGGDGGGGSPAPEAAAKGGMNPLQLLQPLPAEIKGTKLLAHWNSGATITCIPESFLEDEQPIKKTLIKTIHGEKQQNVYYVTFKVKGRKVEAEVIASPYEYILLSPTDVPWLTQQPLQLTILVPLQEYQEKILSKTALPEDQKQQLKTLFVKYDNLWQHWENQVGHRKIRPHNIATGDYPPRPQKQYPINPKAKPSIQIVIDDLLKQGVLTPQNSTMNTPVYPVPKPDGRWRMVLDYREVNKTIPLTAAQNQHSAGILATIVRQKYKTTLDLANGFWAHPITPESYWLTAFTWQGKQYCWTRLPQGFLNSPALFNADVVDLLKEIPNVQVYVDDIYLSHDDPKEHVQQLEKVFQILLQAGYVVSLKKSEIGQKTVEFLGFNITKEGRGLTDTFKTKLLNITPPKDLKQLQSILGKLNFARNFIPNFAELVQPLYNLIAPAKGKYIEWSEENTKQLNMVIEALNTASNLEERLPEQRLVIKVNTSPSAGYVRYYNETGKKPIMYLNYVFSKAELKFSMLEKLLTTMHKALIKAMDLAMGQEILVYSPIVSMTKIQKTPLPERKALPIRWITWMTYLEDPRIQFHYDKTLPELKHIPDVYTSSQSPVKHPSQYEGVFYTDGSAIKSPDPTKSNNAGMGIVHATYKPEYQVLNQWSIPLGNHTAQMAEIAAVEFACKKALKIPGPVLVITDSFYVAESANKELPYWKSNGFVNNKKKPLKHISKWKSIAECLSMKPDITIQHEKGISLQIPVFILKGNALADKLATQGSYVVNAGKRTADGSEFEKRTADGSEFESPKKKAKVE

SEQ ID NO: 1349 - protein, 2177 aa, synthetic construct
MPAAKRVKLDGGDKKYSIGLDIGTNSVGWAVITDEYKVPSKKFKVLGNTDRHSIKKNLIGALLFDSGETAEATRLKRTARRRYTRRKNRICYLQEIFSNEMAKVDDSFFHRLEESFLVEEDKKHERHPIFGNIVDEVAYHEKYPTIYHLRKKLVDSTDKADLRLIYLALAHMIKFRGHFLIEGDLNPDNSDVDKLFIQLVQTYNQLFEENPINASGVDAKAILSARLSKSRRLENLIAQLPGEKKNGLFGNLIALSLGLTPNFKSNFDLAEDAKLQLSKDTYDDDLDNLLAQIGDQYADLFLAAKNLSDAILLSDILRVNTEITKAPLSASMIKRYDEHHQDLTLLKALVRQQLPEKYKEIFFDQSKNGYAGYIDGGASQEEFYKFIKPILEKMDGTEELLVKLNREDLLRKQRTFDNGSIPHQIHLGELHAILRRQEDFYPFLKDNREKIEKILTFRIPYYVGPLARGNSRFAWMTRKSEETITPWNFEEVVDKGASAQSFIERMTNFDKNLPNEKVLPKHSLLYEYFTVYNELTKVKYVTEGMRKPAFLSGEQKKAIVDLLFKTNRKVTVKQLKEDYFKKIECFDSVEISGVEDRFNASLGTYHDLLKIIKDKDFLDNEENEDILEDIVLTLTLFEDREMIEERLKTYAHLFDDKVMKQLKRRRYTGWGRLSRKLINGIRDKQSGKTILDFLKSDGFANRNFMQLIHDDSLTFKEDIQKAQVSGQGDSLHEHIANLAGSPAIKKGILQTVKVVDELVKVMGRHKPENIVIEMARENQTTQKGQKNSRERMKRIEEGIKELGSQILKEHPVENTQLQNEKLYLYYLQNGRDMYVDQELDINRLSDYDVDHIVPQSFLKDDSIDNKVLTRSDKARGKSDNVPSEEVVKKMKNYWRQLLNAKLITQRKFDNLTKAERGGLSELDKAGFIKRQLVETRQITKHVAQILDSRMNTKYDENDKLIREVKVITLKSKLVSDFRKDFQFYKVREINNYHHAHDAYLNAVVGTALIKKYPKLESEFVYGDYKVYDVRKMIAKSEQEIGKATAKYFFYSNIMNFFKTEITLANGEIRKRPLIETNGETGEIVWDKGRDFATVRKVLSMPQVNIVKKTEVQTGGFSKESILPKRNSDKLIARKKDWDPKKYGGFDSPTVAYSVLVVAKVEKGKSKKLKSVKELLGITIMERSSFEKNPIDFLEAKGYKEVKKDLIIKLPKYSLFELENGRKRMLASAGELQKGNELALPSKYVNFLYLASHYEKLKGSPEDNEQKQLFVEQHKHYLDEIIEQISEFSKRVILADANLDKVLSAYNKHRDKPIREQAENIIHLFTLTNLGAPAAFKYFDTTIDRKRYTSTKEVLDATLIHQSITGLYETRIDLSQLGGDGGGSAGSAAGSGEFGGMNPLQLLQPLPAEIKGTKLLAHWNSGATITCIPESFLEDEQPIKKTLIKTIHGEKQQNVYYVTFKVKGRKVEAEVIASPYEYILLSPTDVPWLTQQPLQLTILVPLQEYQEKILSKTALPEDQKQQLKTLFVKYDNLWQHWENQVGHRKIRPHNIATGDYPPRPQKQYPINPKAKPSIQIVIDDLLKQGVLTPQNSTMNTPVYPVPKPDGRWRMVLDYREVNKTIPLTAAQNQHSAGILATIVRQKYKTTLDLANGFWAHPITPESYWLTAFTWQGKQYCWTRLPQGFLNSPALFNADVVDLLKEIPNVQVYVDDIYLSHDDPKEHVQQLEKVFQILLQAGYVVSLKKSEIGQKTVEFLGFNITKEGRGLTDTFKTKLLNITPPKDLKQLQSILGKLNFARNFIPNFAELVQPLYNLIAPAKGKYIEWSEENTKQLNMVIEALNTASNLEERLPEQRLVIKVNTSPSAGYVRYYNETGKKPIMYLNYVFSKAELKFSMLEKLLTTMHKALIKAMDLAMGQEILVYSPIVSMTKIQKTPLPERKALPIRWITWMTYLEDPRIQFHYDKTLPELKHIPDVYTSSQSPVKHPSQYEGVFYTDGSAIKSPDPTKSNNAGMGIVHATYKPEYQVLNQWSIPLGNHTAQMAEIAAVEFACKKALKIPGPVLVITDSFYVAESANKELPYWKSNGFVNNKKKPLKHISKWKSIAECLSMKPDITIQHEKGISLQIPVFILKGNALADKLATQGSYVVNAGKRTADGSEFEKRTADGSEFESPKKKAKVE

SEQ ID NO: 1350 - protein, 2173 aa, synthetic construct
MPAAKRVKLDGGDKKYSIGLDIGTNSVGWAVITDEYKVPSKKFKVLGNTDRHSIKKNLIGALLFDSGETAEATRLKRTARRRYTRRKNRICYLQEIFSNEMAKVDDSFFHRLEESFLVEEDKKHERHPIFGNIVDEVAYHEKYPTIYHLRKKLVDSTDKADLRLIYLALAHMIKFRGHFLIEGDLNPDNSDVDKLFIQLVQTYNQLFEENPINASGVDAKAILSARLSKSRRLENLIAQLPGEKKNGLFGNLIALSLGLTPNFKSNFDLAEDAKLQLSKDTYDDDLDNLLAQIGDQYADLFLAAKNLSDAILLSDILRVNTEITKAPLSASMIKRYDEHHQDLTLLKALVRQQLPEKYKEIFFDQSKNGYAGYIDGGASQEEFYKFIKPILEKMDGTEELLVKLNREDLLRKQRTFDNGSIPHQIHLGELHAILRRQEDFYPFLKDNREKIEKILTFRIPYYVGPLARGNSRFAWMTRKSEETITPWNFEEVVDKGASAQSFIERMTNFDKNLPNEKVLPKHSLLYEYFTVYNELTKVKYVTEGMRKPAFLSGEQKKAIVDLLFKTNRKVTVKQLKEDYFKKIECFDSVEISGVEDRFNASLGTYHDLLKIIKDKDFLDNEENEDILEDIVLTLTLFEDREMIEERLKTYAHLFDDKVMKQLKRRRYTGWGRLSRKLINGIRDKQSGKTILDFLKSDGFANRNFMQLIHDDSLTFKEDIQKAQVSGQGDSLHEHIANLAGSPAIKKGILQTVKVVDELVKVMGRHKPENIVIEMARENQTTQKGQKNSRERMKRIEEGIKELGSQILKEHPVENTQLQNEKLYLYYLQNGRDMYVDQELDINRLSDYDVDHIVPQSFLKDDSIDNKVLTRSDKARGKSDNVPSEEVVKKMKNYWRQLLNAKLITQRKFDNLTKAERGGLSELDKAGFIKRQLVETRQITKHVAQILDSRMNTKYDENDKLIREVKVITLKSKLVSDFRKDFQFYKVREINNYHHAHDAYLNAVVGTALIKKYPKLESEFVYGDYKVYDVRKMIAKSEQEIGKATAKYFFYSNIMNFFKTEITLANGEIRKRPLIETNGETGEIVWDKGRDFATVRKVLSMPQVNIVKKTEVQTGGFSKESILPKRNSDKLIARKKDWDPKKYGGFDSPTVAYSVLVVAKVEKGKSKKLKSVKELLGITIMERSSFEKNPIDFLEAKGYKEVKKDLIIKLPKYSLFELENGRKRMLASAGELQKGNELALPSKYVNFLYLASHYEKLKGSPEDNEQKQLFVEQHKHYLDEIIEQISEFSKRVILADANLDKVLSAYNKHRDKPIREQAENIIHLFTLTNLGAPAAFKYFDTTIDRKRYTSTKEVLDATLIHQSITGLYETRIDLSQLGGDGGGGGEAAAKGGMNPLQLLQPLPAEIKGTKLLAHWNSGATITCIPESFLEDEQPIKKTLIKTIHGEKQQNVYYVTFKVKGRKVEAEVIASPYEYILLSPTDVPWLTQQPLQLTILVPLQEYQEKILSKTALPEDQKQQLKTLFVKYDNLWQHWENQVGHRKIRPHNIATGDYPPRPQKQYPINPKAKPSIQIVIDDLLKQGVLTPQNSTMNTPVYPVPKPDGRWRMVLDYREVNKTIPLTAAQNQHSAGILATIVRQKYKTTLDLANGFWAHPITPESYWLTAFTWQGKQYCWTRLPQGFLNSPALFNADVVDLLKEIPNVQVYVDDIYLSHDDPKEHVQQLEKVFQILLQAGYVVSLKKSEIGQKTVEFLGFNITKEGRGLTDTFKTKLLNITPPKDLKQLQSILGKLNFARNFIPNFAELVQPLYNLIAPAKGKYIEWSEENTKQLNMVIEALNTASNLEERLPEQRLVIKVNTSPSAGYVRYYNETGKKPIMYLNYVFSKAELKFSMLEKLLTTMHKALIKAMDLAMGQEILVYSPIVSMTKIQKTPLPERKALPIRWITWMTYLEDPRIQFHYDKTLPELKHIPDVYTSSQSPVKHPSQYEGVFYTDGSAIKSPDPTKSNNAGMGIVHATYKPEYQVLNQWSIPLGNHTAQMAEIAAVEFACKKALKIPGPVLVITDSFYVAESANKELPYWKSNGFVNNKKKPLKHISKWKSIAECLSMKPDITIQHEKGISLQIPVFILKGNALADKLATQGSYVVNAGKRTADGSEFEKRTADGSEFESPKKKAKVE

SEQ ID NO: 1351 - protein, 2176 aa, synthetic construct
MPAAKRVKLDGGDKKYSIGLDIGTNSVGWAVITDEYKVPSKKFKVLGNTDRHSIKKNLIGALLFDSGETAEATRLKRTARRRYTRRKNRICYLQEIFSNEMAKVDDSFFHRLEESFLVEEDKKHERHPIFGNIVDEVAYHEKYPTIYHLRKKLVDSTDKADLRLIYLALAHMIKFRGHFLIEGDLNPDNSDVDKLFIQLVQTYNQLFEENPINASGVDAKAILSARLSKSRRLENLIAQLPGEKKNGLFGNLIALSLGLTPNFKSNFDLAEDAKLQLSKDTYDDDLDNLLAQIGDQYADLFLAAKNLSDAILLSDILRVNTEITKAPLSASMIKRYDEHHQDLTLLKALVRQQLPEKYKEIFFDQSKNGYAGYIDGGASQEEFYKFIKPILEKMDGTEELLVKLNREDLLRKQRTFDNGSIPHQIHLGELHAILRRQEDFYPFLKDNREKIEKILTFRIPYYVGPLARGNSRFAWMTRKSEETITPWNFEEVVDKGASAQSFIERMTNFDKNLPNEKVLPKHSLLYEYFTVYNELTKVKYVTEGMRKPAFLSGEQKKAIVDLLFKTNRKVTVKQLKEDYFKKIECFDSVEISGVEDRFNASLGTYHDLLKIIKDKDFLDNEENEDILEDIVLTLTLFEDREMIEERLKTYAHLFDDKVMKQLKRRRYTGWGRLSRKLINGIRDKQSGKTILDFLKSDGFANRNFMQLIHDDSLTFKEDIQKAQVSGQGDSLHEHIANLAGSPAIKKGILQTVKVVDELVKVMGRHKPENIVIEMARENQTTQKGQKNSRERMKRIEEGIKELGSQILKEHPVENTQLQNEKLYLYYLQNGRDMYVDQELDINRLSDYDVDHIVPQSFLKDDSIDNKVLTRSDKARGKSDNVPSEEVVKKMKNYWRQLLNAKLITQRKFDNLTKAERGGLSELDKAGFIKRQLVETRQITKHVAQILDSRMNTKYDENDKLIREVKVITLKSKLVSDFRKDFQFYKVREINNYHHAHDAYLNAVVGTALIKKYPKLESEFVYGDYKVYDVRKMIAKSEQEIGKATAKYFFYSNIMNFFKTEITLANGEIRKRPLIETNGETGEIVWDKGRDFATVRKVLSMPQVNIVKKTEVQTGGFSKESILPKRNSDKLIARKKDWDPKKYGGFDSPTVAYSVLVVAKVEKGKSKKLKSVKELLGITIMERSSFEKNPIDFLEAKGYKEVKKDLIIKLPKYSLFELENGRKRMLASAGELQKGNELALPSKYVNFLYLASHYEKLKGSPEDNEQKQLFVEQHKHYLDEIIEQISEFSKRVILADANLDKVLSAYNKHRDKPIREQAENIIHLFTLTNLGAPAAFKYFDTTIDRKRYTSTKEVLDATLIHQSITGLYETRIDLSQLGGDGGGSSGGSEAAAKGGMNPLQLLQPLPAEIKGTKLLAHWNSGATITCIPESFLEDEQPIKKTLIKTIHGEKQQNVYYVTFKVKGRKVEAEVIASPYEYILLSPTDVPWLTQQPLQLTILVPLQEYQEKILSKTALPEDQKQQLKTLFVKYDNLWQHWENQVGHRKIRPHNIATGDYPPRPQKQYPINPKAKPSIQIVIDDLLKQGVLTPQNSTMNTPVYPVPKPDGRWRMVLDYREVNKTIPLTAAQNQHSAGILATIVRQKYKTTLDLANGFWAHPITPESYWLTAFTWQGKQYCWTRLPQGFLNSPALFNADVVDLLKEIPNVQVYVDDIYLSHDDPKEHVQQLEKVFQILLQAGYVVSLKKSEIGQKTVEFLGFNITKEGRGLTDTFKTKLLNITPPKDLKQLQSILGKLNFARNFIPNFAELVQPLYNLIAPAKGKYIEWSEENTKQLNMVIEALNTASNLEERLPEQRLVIKVNTSPSAGYVRYYNETGKKPIMYLNYVFSKAELKFSMLEKLLTTMHKALIKAMDLAMGQEILVYSPIVSMTKIQKTPLPERKALPIRWITWMTYLEDPRIQFHYDKTLPELKHIPDVYTSSQSPVKHPSQYEGVFYTDGSAIKSPDPTKSNNAGMGIVHATYKPEYQVLNQWSIPLGNHTAQMAEIAAVEFACKKALKIPGPVLVITDSFYVAESANKELPYWKSNGFVNNKKKPLKHISKWKSIAECLSMKPDITIQHEKGISLQIPVFILKGNALADKLATQGSYVVNAGKRTADGSEFEKRTADGSEFESPKKKAKVE

SEQ ID NO: 1352 - protein, 2174 aa, synthetic construct
MPAAKRVKLDGGDKKYSIGLDIGTNSVGWAVITDEYKVPSKKFKVLGNTDRHSIKKNLIGALLFDSGETAEATRLKRTARRRYTRRKNRICYLQEIFSNEMAKVDDSFFHRLEESFLVEEDKKHERHPIFGNIVDEVAYHEKYPTIYHLRKKLVDSTDKADLRLIYLALAHMIKFRGHFLIEGDLNPDNSDVDKLFIQLVQTYNQLFEENPINASGVDAKAILSARLSKSRRLENLIAQLPGEKKNGLFGNLIALSLGLTPNFKSNFDLAEDAKLQLSKDTYDDDLDNLLAQIGDQYADLFLAAKNLSDAILLSDILRVNTEITKAPLSASMIKRYDEHHQDLTLLKALVRQQLPEKYKEIFFDQSKNGYAGYIDGGASQEEFYKFIKPILEKMDGTEELLVKLNREDLLRKQRTFDNGSIPHQIHLGELHAILRRQEDFYPFLKDNREKIEKILTFRIPYYVGPLARGNSRFAWMTRKSEETITPWNFEEVVDKGASAQSFIERMTNFDKNLPNEKVLPKHSLLYEYFTVYNELTKVKYVTEGMRKPAFLSGEQKKAIVDLLFKTNRKVTVKQLKEDYFKKIECFDSVEISGVEDRFNASLGTYHDLLKIIKDKDFLDNEENEDILEDIVLTLTLFEDREMIEERLKTYAHLFDDKVMKQLKRRRYTGWGRLSRKLINGIRDKQSGKTILDFLKSDGFANRNFMQLIHDDSLTFKEDIQKAQVSGQGDSLHEHIANLAGSPAIKKGILQTVKVVDELVKVMGRHKPENIVIEMARENQTTQKGQKNSRERMKRIEEGIKELGSQILKEHPVENTQLQNEKLYLYYLQNGRDMYVDQELDINRLSDYDVDHIVPQSFLKDDSIDNKVLTRSDKARGKSDNVPSEEVVKKMKNYWRQLLNAKLITQRKFDNLTKAERGGLSELDKAGFIKRQLVETRQITKHVAQILDSRMNTKYDENDKLIREVKVITLKSKLVSDFRKDFQFYKVREINNYHHAHDAYLNAVVGTALIKKYPKLESEFVYGDYKVYDVRKMIAKSEQEIGKATAKYFFYSNIMNFFKTEITLANGEIRKRPLIETNGETGEIVWDKGRDFATVRKVLSMPQVNIVKKTEVQTGGFSKESILPKRNSDKLIARKKDWDPKKYGGFDSPTVAYSVLVVAKVEKGKSKKLKSVKELLGITIMERSSFEKNPIDFLEAKGYKEVKKDLIIKLPKYSLFELENGRKRMLASAGELQKGNELALPSKYVNFLYLASHYEKLKGSPEDNEQKQLFVEQHKHYLDEIIEQISEFSKRVILADANLDKVLSAYNKHRDKPIREQAENIIHLFTLTNLGAPAAFKYFDTTIDRKRYTSTKEVLDATLIHQSITGLYETRIDLSQLGGDGGGSSPAPGGSGGMNPLQLLQPLPAEIKGTKLLAHWNSGATITCIPESFLEDEQPIKKTLIKTIHGEKQQNVYYVTFKVKGRKVEAEVIASPYEYILLSPTDVPWLTQQPLQLTILVPLQEYQEKILSKTALPEDQKQQLKTLFVKYDNLWQHWENQVGHRKIRPHNIATGDYPPRPQKQYPINPKAKPSIQIVIDDLLKQGVLTPQNSTMNTPVYPVPKPDGRWRMVLDYREVNKTIPLTAAQNQHSAGILATIVRQKYKTTLDLANGFWAHPITPESYWLTAFTWQGKQYCWTRLPQGFLNSPALFNADVVDLLKEIPNVQVYVDDIYLSHDDPKEHVQQLEKVFQILLQAGYVVSLKKSEIGQKTVEFLGFNITKEGRGLTDTFKTKLLNITPPKDLKQLQSILGKLNFARNFIPNFAELVQPLYNLIAPAKGKYIEWSEENTKQLNMVIEALNTASNLEERLPEQRLVIKVNTSPSAGYVRYYNETGKKPIMYLNYVFSKAELKFSMLEKLLTTMHKALIKAMDLAMGQEILVYSPIVSMTKIQKTPLPERKALPIRWITWMTYLEDPRIQFHYDKTLPELKHIPDVYTSSQSPVKHPSQYEGVFYTDGSAIKSPDPTKSNNAGMGIVHATYKPEYQVLNQWSIPLGNHTAQMAEIAAVEFACKKALKIPGPVLVITDSFYVAESANKELPYWKSNGFVNNKKKPLKHISKWKSIAECLSMKPDITIQHEKGISLQIPVFILKGNALADKLATQGSYVVNAGKRTADGSEFEKRTADGSEFESPKKKAKVE

SEQ ID NO: 1353 - protein, 2176 aa, synthetic construct
MPAAKRVKLDGGDKKYSIGLDIGTNSVGWAVITDEYKVPSKKFKVLGNTDRHSIKKNLIGALLFDSGETAEATRLKRTARRRYTRRKNRICYLQEIFSNEMAKVDDSFFHRLEESFLVEEDKKHERHPIFGNIVDEVAYHEKYPTIYHLRKKLVDSTDKADLRLIYLALAHMIKFRGHFLIEGDLNPDNSDVDKLFIQLVQTYNQLFEENPINASGVDAKAILSARLSKSRRLENLIAQLPGEKKNGLFGNLIALSLGLTPNFKSNFDLAEDAKLQLSKDTYDDDLDNLLAQIGDQYADLFLAAKNLSDAILLSDILRVNTEITKAPLSASMIKRYDEHHQDLTLLKALVRQQLPEKYKEIFFDQSKNGYAGYIDGGASQEEFYKFIKPILEKMDGTEELLVKLNREDLLRKQRTFDNGSIPHQIHLGELHAILRRQEDFYPFLKDNREKIEKILTFRIPYYVGPLARGNSRFAWMTRKSEETITPWNFEEVVDKGASAQSFIERMTNFDKNLPNEKVLPKHSLLYEYFTVYNELTKVKYVTEGMRKPAFLSGEQKKAIVDLLFKTNRKVTVKQLKEDYFKKIECFDSVEISGVEDRFNASLGTYHDLLKIIKDKDFLDNEENEDILEDIVLTLTLFEDREMIEERLKTYAHLFDDKVMKQLKRRRYTGWGRLSRKLINGIRDKQSGKTILDFLKSDGFANRNFMQLIHDDSLTFKEDIQKAQVSGQGDSLHEHIANLAGSPAIKKGILQTVKVVDELVKVMGRHKPENIVIEMARENQTTQKGQKNSRERMKRIEEGIKELGSQILKEHPVENTQLQNEKLYLYYLQNGRDMYVDQELDINRLSDYDVDHIVPQSFLKDDSIDNKVLTRSDKARGKSDNVPSEEVVKKMKNYWRQLLNAKLITQRKFDNLTKAERGGLSELDKAGFIKRQLVETRQITKHVAQILDSRMNTKYDENDKLIREVKVITLKSKLVSDFRKDFQFYKVREINNYHHAHDAYLNAVVGTALIKKYPKLESEFVYGDYKVYDVRKMIAKSEQEIGKATAKYFFYSNIMNFFKTEITLANGEIRKRPLIETNGETGEIVWDKGRDFATVRKVLSMPQVNIVKKTEVQTGGFSKESILPKRNSDKLIARKKDWDPKKYGGFDSPTVAYSVLVVAKVEKGKSKKLKSVKELLGITIMERSSFEKNPIDFLEAKGYKEVKKDLIIKLPKYSLFELENGRKRMLASAGELQKGNELALPSKYVNFLYLASHYEKLKGSPEDNEQKQLFVEQHKHYLDEIIEQISEFSKRVILADANLDKVLSAYNKHRDKPIREQAENIIHLFTLTNLGAPAAFKYFDTTIDRKRYTSTKEVLDATLIHQSITGLYETRIDLSQLGGDGGGSSPAPEAAAKGGMNPLQLLQPLPAEIKGTKLLAHWNSGATITCIPESFLEDEQPIKKTLIKTIHGEKQQNVYYVTFKVKGRKVEAEVIASPYEYILLSPTDVPWLTQQPLQLTILVPLQEYQEKILSKTALPEDQKQQLKTLFVKYDNLWQHWENQVGHRKIRPHNIATGDYPPRPQKQYPINPKAKPSIQIVIDDLLKQGVLTPQNSTMNTPVYPVPKPDGRWRMVLDYREVNKTIPLTAAQNQHSAGILATIVRQKYKTTLDLANGFWAHPITPESYWLTAFTWQGKQYCWTRLPQGFLNSPALFNADVVDLLKEIPNVQVYVDDIYLSHDDPKEHVQQLEKVFQILLQAGYVVSLKKSEIGQKTVEFLGFNITKEGRGLTDTFKTKLLNITPPKDLKQLQSILGKLNFARNFIPNFAELVQPLYNLIAPAKGKYIEWSEENTKQLNMVIEALNTASNLEERLPEQRLVIKVNTSPSAGYVRYYNETGKKPIMYLNYVFSKAELKFSMLEKLLTTMHKALIKAMDLAMGQEILVYSPIVSMTKIQKTPLPERKALPIRWITWMTYLEDPRIQFHYDKTLPELKHIPDVYTSSQSPVKHPSQYEGVFYTDGSAIKSPDPTKSNNAGMGIVHATYKPEYQVLNQWSIPLGNHTAQMAEIAAVEFACKKALKIPGPVLVITDSFYVAESANKELPYWKSNGFVNNKKKPLKHISKWKSIAECLSMKPDITIQHEKGISLQIPVFILKGNALADKLATQGSYVVNAGKRTADGSEFEKRTADGSEFESPKKKAKVE

SEQ ID NO: 1354 - protein, 2174 aa, synthetic construct
MPAAKRVKLDGGDKKYSIGLDIGTNSVGWAVITDEYKVPSKKFKVLGNTDRHSIKKNLIGALLFDSGETAEATRLKRTARRRYTRRKNRICYLQEIFSNEMAKVDDSFFHRLEESFLVEEDKKHERHPIFGNIVDEVAYHEKYPTIYHLRKKLVDSTDKADLRLIYLALAHMIKFRGHFLIEGDLNPDNSDVDKLFIQLVQTYNQLFEENPINASGVDAKAILSARLSKSRRLENLIAQLPGEKKNGLFGNLIALSLGLTPNFKSNFDLAEDAKLQLSKDTYDDDLDNLLAQIGDQYADLFLAAKNLSDAILLSDILRVNTEITKAPLSASMIKRYDEHHQDLTLLKALVRQQLPEKYKEIFFDQSKNGYAGYIDGGASQEEFYKFIKPILEKMDGTEELLVKLNREDLLRKQRTFDNGSIPHQIHLGELHAILRRQEDFYPFLKDNREKIEKILTFRIPYYVGPLARGNSRFAWMTRKSEETITPWNFEEVVDKGASAQSFIERMTNFDKNLPNEKVLPKHSLLYEYFTVYNELTKVKYVTEGMRKPAFLSGEQKKAIVDLLFKTNRKVTVKQLKEDYFKKIECFDSVEISGVEDRFNASLGTYHDLLKIIKDKDFLDNEENEDILEDIVLTLTLFEDREMIEERLKTYAHLFDDKVMKQLKRRRYTGWGRLSRKLINGIRDKQSGKTILDFLKSDGFANRNFMQLIHDDSLTFKEDIQKAQVSGQGDSLHEHIANLAGSPAIKKGILQTVKVVDELVKVMGRHKPENIVIEMARENQTTQKGQKNSRERMKRIEEGIKELGSQILKEHPVENTQLQNEKLYLYYLQNGRDMYVDQELDINRLSDYDVDHIVPQSFLKDDSIDNKVLTRSDKARGKSDNVPSEEVVKKMKNYWRQLLNAKLITQRKFDNLTKAERGGLSELDKAGFIKRQLVETRQITKHVAQILDSRMNTKYDENDKLIREVKVITLKSKLVSDFRKDFQFYKVREINNYHHAHDAYLNAVVGTALIKKYPKLESEFVYGDYKVYDVRKMIAKSEQEIGKATAKYFFYSNIMNFFKTEITLANGEIRKRPLIETNGETGEIVWDKGRDFATVRKVLSMPQVNIVKKTEVQTGGFSKESILPKRNSDKLIARKKDWDPKKYGGFDSPTVAYSVLVVAKVEKGKSKKLKSVKELLGITIMERSSFEKNPIDFLEAKGYKEVKKDLIIKLPKYSLFELENGRKRMLASAGELQKGNELALPSKYVNFLYLASHYEKLKGSPEDNEQKQLFVEQHKHYLDEIIEQISEFSKRVILADANLDKVLSAYNKHRDKPIREQAENIIHLFTLTNLGAPAAFKYFDTTIDRKRYTSTKEVLDATLIHQSITGLYETRIDLSQLGGDGGGGSGGGPAPGGMNPLQLLQPLPAEIKGTKLLAHWNSGATITCIPESFLEDEQPIKKTLIKTIHGEKQQNVYYVTFKVKGRKVEAEVIASPYEYILLSPTDVPWLTQQPLQLTILVPLQEYQEKILSKTALPEDQKQQLKTLFVKYDNLWQHWENQVGHRKIRPHNIATGDYPPRPQKQYPINPKAKPSIQIVIDDLLKQGVLTPQNSTMNTPVYPVPKPDGRWRMVLDYREVNKTIPLTAAQNQHSAGILATIVRQKYKTTLDLANGFWAHPITPESYWLTAFTWQGKQYCWTRLPQGFLNSPALFNADVVDLLKEIPNVQVYVDDIYLSHDDPKEHVQQLEKVFQILLQAGYVVSLKKSEIGQKTVEFLGFNITKEGRGLTDTFKTKLLNITPPKDLKQLQSILGKLNFARNFIPNFAELVQPLYNLIAPAKGKYIEWSEENTKQLNMVIEALNTASNLEERLPEQRLVIKVNTSPSAGYVRYYNETGKKPIMYLNYVFSKAELKFSMLEKLLTTMHKALIKAMDLAMGQEILVYSPIVSMTKIQKTPLPERKALPIRWITWMTYLEDPRIQFHYDKTLPELKHIPDVYTSSQSPVKHPSQYEGVFYTDGSAIKSPDPTKSNNAGMGIVHATYKPEYQVLNQWSIPLGNHTAQMAEIAAVEFACKKALKIPGPVLVITDSFYVAESANKELPYWKSNGFVNNKKKPLKHISKWKSIAECLSMKPDITIQHEKGISLQIPVFILKGNALADKLATQGSYVVNAGKRTADGSEFEKRTADGSEFESPKKKAKVE

SEQ ID NO: 1355 - protein, 2176 aa, synthetic construct
MPAAKRVKLDGGDKKYSIGLDIGTNSVGWAVITDEYKVPSKKFKVLGNTDRHSIKKNLIGALLFDSGETAEATRLKRTARRRYTRRKNRICYLQEIFSNEMAKVDDSFFHRLEESFLVEEDKKHERHPIFGNIVDEVAYHEKYPTIYHLRKKLVDSTDKADLRLIYLALAHMIKFRGHFLIEGDLNPDNSDVDKLFIQLVQTYNQLFEENPINASGVDAKAILSARLSKSRRLENLIAQLPGEKKNGLFGNLIALSLGLTPNFKSNFDLAEDAKLQLSKDTYDDDLDNLLAQIGDQYADLFLAAKNLSDAILLSDILRVNTEITKAPLSASMIKRYDEHHQDLTLLKALVRQQLPEKYKEIFFDQSKNGYAGYIDGGASQEEFYKFIKPILEKMDGTEELLVKLNREDLLRKQRTFDNGSIPHQIHLGELHAILRRQEDFYPFLKDNREKIEKILTFRIPYYVGPLARGNSRFAWMTRKSEETITPWNFEEVVDKGASAQSFIERMTNFDKNLPNEKVLPKHSLLYEYFTVYNELTKVKYVTEGMRKPAFLSGEQKKAIVDLLFKTNRKVTVKQLKEDYFKKIECFDSVEISGVEDRFNASLGTYHDLLKIIKDKDFLDNEENEDILEDIVLTLTLFEDREMIEERLKTYAHLFDDKVMKQLKRRRYTGWGRLSRKLINGIRDKQSGKTILDFLKSDGFANRNFMQLIHDDSLTFKEDIQKAQVSGQGDSLHEHIANLAGSPAIKKGILQTVKVVDELVKVMGRHKPENIVIEMARENQTTQKGQKNSRERMKRIEEGIKELGSQILKEHPVENTQLQNEKLYLYYLQNGRDMYVDQELDINRLSDYDVDHIVPQSFLKDDSIDNKVLTRSDKARGKSDNVPSEEVVKKMKNYWRQLLNAKLITQRKFDNLTKAERGGLSELDKAGFIKRQLVETRQITKHVAQILDSRMNTKYDENDKLIREVKVITLKSKLVSDFRKDFQFYKVREINNYHHAHDAYLNAVVGTALIKKYPKLESEFVYGDYKVYDVRKMIAKSEQEIGKATAKYFFYSNIMNFFKTEITLANGEIRKRPLIETNGETGEIVWDKGRDFATVRKVLSMPQVNIVKKTEVQTGGFSKESILPKRNSDKLIARKKDWDPKKYGGFDSPTVAYSVLVVAKVEKGKSKKLKSVKELLGITIMERSSFEKNPIDFLEAKGYKEVKKDLIIKLPKYSLFELENGRKRMLASAGELQKGNELALPSKYVNFLYLASHYEKLKGSPEDNEQKQLFVEQHKHYLDEIIEQISEFSKRVILADANLDKVLSAYNKHRDKPIREQAENIIHLFTLTNLGAPAAFKYFDTTIDRKRYTSTKEVLDATLIHQSITGLYETRIDLSQLGGDGGEAAAKGSSGGSGGMNPLQLLQPLPAEIKGTKLLAHWNSGATITCIPESFLEDEQPIKKTLIKTIHGEKQQNVYYVTFKVKGRKVEAEVIASPYEYILLSPTDVPWLTQQPLQLTILVPLQEYQEKILSKTALPEDQKQQLKTLFVKYDNLWQHWENQVGHRKIRPHNIATGDYPPRPQKQYPINPKAKPSIQIVIDDLLKQGVLTPQNSTMNTPVYPVPKPDGRWRMVLDYREVNKTIPLTAAQNQHSAGILATIVRQKYKTTLDLANGFWAHPITPESYWLTAFTWQGKQYCWTRLPQGFLNSPALFNADVVDLLKEIPNVQVYVDDIYLSHDDPKEHVQQLEKVFQILLQAGYVVSLKKSEIGQKTVEFLGFNITKEGRGLTDTFKTKLLNITPPKDLKQLQSILGKLNFARNFIPNFAELVQPLYNLIAPAKGKYIEWSEENTKQLNMVIEALNTASNLEERLPEQRLVIKVNTSPSAGYVRYYNETGKKPIMYLNYVFSKAELKFSMLEKLLTTMHKALIKAMDLAMGQEILVYSPIVSMTKIQKTPLPERKALPIRWITWMTYLEDPRIQFHYDKTLPELKHIPDVYTSSQSPVKHPSQYEGVFYTDGSAIKSPDPTKSNNAGMGIVHATYKPEYQVLNQWSIPLGNHTAQMAEIAAVEFACKKALKIPGPVLVITDSFYVAESANKELPYWKSNGFVNNKKKPLKHISKWKSIAECLSMKPDITIQHEKGISLQIPVFILKGNALADKLATQGSYVVNAGKRTADGSEFEKRTADGSEFESPKKKAKVE

SEQ ID NO: 1356 - protein, 2172 aa, synthetic construct
MPAAKRVKLDGGDKKYSIGLDIGTNSVGWAVITDEYKVPSKKFKVLGNTDRHSIKKNLIGALLFDSGETAEATRLKRTARRRYTRRKNRICYLQEIFSNEMAKVDDSFFHRLEESFLVEEDKKHERHPIFGNIVDEVAYHEKYPTIYHLRKKLVDSTDKADLRLIYLALAHMIKFRGHFLIEGDLNPDNSDVDKLFIQLVQTYNQLFEENPINASGVDAKAILSARLSKSRRLENLIAQLPGEKKNGLFGNLIALSLGLTPNFKSNFDLAEDAKLQLSKDTYDDDLDNLLAQIGDQYADLFLAAKNLSDAILLSDILRVNTEITKAPLSASMIKRYDEHHQDLTLLKALVRQQLPEKYKEIFFDQSKNGYAGYIDGGASQEEFYKFIKPILEKMDGTEELLVKLNREDLLRKQRTFDNGSIPHQIHLGELHAILRRQEDFYPFLKDNREKIEKILTFRIPYYVGPLARGNSRFAWMTRKSEETITPWNFEEVVDKGASAQSFIERMTNFDKNLPNEKVLPKHSLLYEYFTVYNELTKVKYVTEGMRKPAFLSGEQKKAIVDLLFKTNRKVTVKQLKEDYFKKIECFDSVEISGVEDRFNASLGTYHDLLKIIKDKDFLDNEENEDILEDIVLTLTLFEDREMIEERLKTYAHLFDDKVMKQLKRRRYTGWGRLSRKLINGIRDKQSGKTILDFLKSDGFANRNFMQLIHDDSLTFKEDIQKAQVSGQGDSLHEHIANLAGSPAIKKGILQTVKVVDELVKVMGRHKPENIVIEMARENQTTQKGQKNSRERMKRIEEGIKELGSQILKEHPVENTQLQNEKLYLYYLQNGRDMYVDQELDINRLSDYDVDHIVPQSFLKDDSIDNKVLTRSDKARGKSDNVPSEEVVKKMKNYWRQLLNAKLITQRKFDNLTKAERGGLSELDKAGFIKRQLVETRQITKHVAQILDSRMNTKYDENDKLIREVKVITLKSKLVSDFRKDFQFYKVREINNYHHAHDAYLNAVVGTALIKKYPKLESEFVYGDYKVYDVRKMIAKSEQEIGKATAKYFFYSNIMNFFKTEITLANGEIRKRPLIETNGETGEIVWDKGRDFATVRKVLSMPQVNIVKKTEVQTGGFSKESILPKRNSDKLIARKKDWDPKKYGGFDSPTVAYSVLVVAKVEKGKSKKLKSVKELLGITIMERSSFEKNPIDFLEAKGYKEVKKDLIIKLPKYSLFELENGRKRMLASAGELQKGNELALPSKYVNFLYLASHYEKLKGSPEDNEQKQLFVEQHKHYLDEIIEQISEFSKRVILADANLDKVLSAYNKHRDKPIREQAENIIHLFTLTNLGAPAAFKYFDTTIDRKRYTSTKEVLDATLIHQSITGLYETRIDLSQLGGDGGGGGGGGGGGMNPLQLLQPLPAEIKGTKLLAHWNSGATITCIPESFLEDEQPIKKTLIKTIHGEKQQNVYYVTFKVKGRKVEAEVIASPYEYILLSPTDVPWLTQQPLQLTILVPLQEYQEKILSKTALPEDQKQQLKTLFVKYDNLWQHWENQVGHRKIRPHNIATGDYPPRPQKQYPINPKAKPSIQIVIDDLLKQGVLTPQNSTMNTPVYPVPKPDGRWRMVLDYREVNKTIPLTAAQNQHSAGILATIVRQKYKTTLDLANGFWAHPITPESYWLTAFTWQGKQYCWTRLPQGFLNSPALFNADVVDLLKEIPNVQVYVDDIYLSHDDPKEHVQQLEKVFQILLQAGYVVSLKKSEIGQKTVEFLGFNITKEGRGLTDTFKTKLLNITPPKDLKQLQSILGKLNFARNFIPNFAELVQPLYNLIAPAKGKYIEWSEENTKQLNMVIEALNTASNLEERLPEQRLVIKVNTSPSAGYVRYYNETGKKPIMYLNYVFSKAELKFSMLEKLLTTMHKALIKAMDLAMGQEILVYSPIVSMTKIQKTPLPERKALPIRWITWMTYLEDPRIQFHYDKTLPELKHIPDVYTSSQSPVKHPSQYEGVFYTDGSAIKSPDPTKSNNAGMGIVHATYKPEYQVLNQWSIPLGNHTAQMAEIAAVEFACKKALKIPGPVLVITDSFYVAESANKELPYWKSNGFVNNKKKPLKHISKWKSIAECLSMKPDITIQHEKGISLQIPVFILKGNALADKLATQGSYVVNAGKRTADGSEFEKRTADGSEFESPKKKAKVE

SEQ ID NO: 1357 - protein, 2176 aa, synthetic construct
MPAAKRVKLDGGDKKYSIGLDIGTNSVGWAVITDEYKVPSKKFKVLGNTDRHSIKKNLIGALLFDSGETAEATRLKRTARRRYTRRKNRICYLQEIFSNEMAKVDDSFFHRLEESFLVEEDKKHERHPIFGNIVDEVAYHEKYPTIYHLRKKLVDSTDKADLRLIYLALAHMIKFRGHFLIEGDLNPDNSDVDKLFIQLVQTYNQLFEENPINASGVDAKAILSARLSKSRRLENLIAQLPGEKKNGLFGNLIALSLGLTPNFKSNFDLAEDAKLQLSKDTYDDDLDNLLAQIGDQYADLFLAAKNLSDAILLSDILRVNTEITKAPLSASMIKRYDEHHQDLTLLKALVRQQLPEKYKEIFFDQSKNGYAGYIDGGASQEEFYKFIKPILEKMDGTEELLVKLNREDLLRKQRTFDNGSIPHQIHLGELHAILRRQEDFYPFLKDNREKIEKILTFRIPYYVGPLARGNSRFAWMTRKSEETITPWNFEEVVDKGASAQSFIERMTNFDKNLPNEKVLPKHSLLYEYFTVYNELTKVKYVTEGMRKPAFLSGEQKKAIVDLLFKTNRKVTVKQLKEDYFKKIECFDSVEISGVEDRFNASLGTYHDLLKIIKDKDFLDNEENEDILEDIVLTLTLFEDREMIEERLKTYAHLFDDKVMKQLKRRRYTGWGRLSRKLINGIRDKQSGKTILDFLKSDGFANRNFMQLIHDDSLTFKEDIQKAQVSGQGDSLHEHIANLAGSPAIKKGILQTVKVVDELVKVMGRHKPENIVIEMARENQTTQKGQKNSRERMKRIEEGIKELGSQILKEHPVENTQLQNEKLYLYYLQNGRDMYVDQELDINRLSDYDVDHIVPQSFLKDDSIDNKVLTRSDKARGKSDNVPSEEVVKKMKNYWRQLLNAKLITQRKFDNLTKAERGGLSELDKAGFIKRQLVETRQITKHVAQILDSRMNTKYDENDKLIREVKVITLKSKLVSDFRKDFQFYKVREINNYHHAHDAYLNAVVGTALIKKYPKLESEFVYGDYKVYDVRKMIAKSEQEIGKATAKYFFYSNIMNFFKTEITLANGEIRKRPLIETNGETGEIVWDKGRDFATVRKVLSMPQVNIVKKTEVQTGGFSKESILPKRNSDKLIARKKDWDPKKYGGFDSPTVAYSVLVVAKVEKGKSKKLKSVKELLGITIMERSSFEKNPIDFLEAKGYKEVKKDLIIKLPKYSLFELENGRKRMLASAGELQKGNELALPSKYVNFLYLASHYEKLKGSPEDNEQKQLFVEQHKHYLDEIIEQISEFSKRVILADANLDKVLSAYNKHRDKPIREQAENIIHLFTLTNLGAPAAFKYFDTTIDRKRYTSTKEVLDATLIHQSITGLYETRIDLSQLGGDGGGSSEAAAKGGSGGMNPLQLLQPLPAEIKGTKLLAHWNSGATITCIPESFLEDEQPIKKTLIKTIHGEKQQNVYYVTFKVKGRKVEAEVIASPYEYILLSPTDVPWLTQQPLQLTILVPLQEYQEKILSKTALPEDQKQQLKTLFVKYDNLWQHWENQVGHRKIRPHNIATGDYPPRPQKQYPINPKAKPSIQIVIDDLLKQGVLTPQNSTMNTPVYPVPKPDGRWRMVLDYREVNKTIPLTAAQNQHSAGILATIVRQKYKTTLDLANGFWAHPITPESYWLTAFTWQGKQYCWTRLPQGFLNSPALFNADVVDLLKEIPNVQVYVDDIYLSHDDPKEHVQQLEKVFQILLQAGYVVSLKKSEIGQKTVEFLGFNITKEGRGLTDTFKTKLLNITPPKDLKQLQSILGKLNFARNFIPNFAELVQPLYNLIAPAKGKYIEWSEENTKQLNMVIEALNTASNLEERLPEQRLVIKVNTSPSAGYVRYYNETGKKPIMYLNYVFSKAELKFSMLEKLLTTMHKALIKAMDLAMGQEILVYSPIVSMTKIQKTPLPERKALPIRWITWMTYLEDPRIQFHYDKTLPELKHIPDVYTSSQSPVKHPSQYEGVFYTDGSAIKSPDPTKSNNAGMGIVHATYKPEYQVLNQWSIPLGNHTAQMAEIAAVEFACKKALKIPGPVLVITDSFYVAESANKELPYWKSNGFVNNKKKPLKHISKWKSIAECLSMKPDITIQHEKGISLQIPVFILKGNALADKLATQGSYVVNAGKRTADGSEFEKRTADGSEFESPKKKAKVE

SEQ ID NO: 1358 - protein, 2171 aa, synthetic construct
MPAAKRVKLDGGDKKYSIGLDIGTNSVGWAVITDEYKVPSKKFKVLGNTDRHSIKKNLIGALLFDSGETAEATRLKRTARRRYTRRKNRICYLQEIFSNEMAKVDDSFFHRLEESFLVEEDKKHERHPIFGNIVDEVAYHEKYPTIYHLRKKLVDSTDKADLRLIYLALAHMIKFRGHFLIEGDLNPDNSDVDKLFIQLVQTYNQLFEENPINASGVDAKAILSARLSKSRRLENLIAQLPGEKKNGLFGNLIALSLGLTPNFKSNFDLAEDAKLQLSKDTYDDDLDNLLAQIGDQYADLFLAAKNLSDAILLSDILRVNTEITKAPLSASMIKRYDEHHQDLTLLKALVRQQLPEKYKEIFFDQSKNGYAGYIDGGASQEEFYKFIKPILEKMDGTEELLVKLNREDLLRKQRTFDNGSIPHQIHLGELHAILRRQEDFYPFLKDNREKIEKILTFRIPYYVGPLARGNSRFAWMTRKSEETITPWNFEEVVDKGASAQSFIERMTNFDKNLPNEKVLPKHSLLYEYFTVYNELTKVKYVTEGMRKPAFLSGEQKKAIVDLLFKTNRKVTVKQLKEDYFKKIECFDSVEISGVEDRFNASLGTYHDLLKIIKDKDFLDNEENEDILEDIVLTLTLFEDREMIEERLKTYAHLFDDKVMKQLKRRRYTGWGRLSRKLINGIRDKQSGKTILDFLKSDGFANRNFMQLIHDDSLTFKEDIQKAQVSGQGDSLHEHIANLAGSPAIKKGILQTVKVVDELVKVMGRHKPENIVIEMARENQTTQKGQKNSRERMKRIEEGIKELGSQILKEHPVENTQLQNEKLYLYYLQNGRDMYVDQELDINRLSDYDVDHIVPQSFLKDDSIDNKVLTRSDKARGKSDNVPSEEVVKKMKNYWRQLLNAKLITQRKFDNLTKAERGGLSELDKAGFIKRQLVETRQITKHVAQILDSRMNTKYDENDKLIREVKVITLKSKLVSDFRKDFQFYKVREINNYHHAHDAYLNAVVGTALIKKYPKLESEFVYGDYKVYDVRKMIAKSEQEIGKATAKYFFYSNIMNFFKTEITLANGEIRKRPLIETNGETGEIVWDKGRDFATVRKVLSMPQVNIVKKTEVQTGGFSKESILPKRNSDKLIARKKDWDPKKYGGFDSPTVAYSVLVVAKVEKGKSKKLKSVKELLGITIMERSSFEKNPIDFLEAKGYKEVKKDLIIKLPKYSLFELENGRKRMLASAGELQKGNELALPSKYVNFLYLASHYEKLKGSPEDNEQKQLFVEQHKHYLDEIIEQISEFSKRVILADANLDKVLSAYNKHRDKPIREQAENIIHLFTLTNLGAPAAFKYFDTTIDRKRYTSTKEVLDATLIHQSITGLYETRIDLSQLGGDGGPAPGSSGGMNPLQLLQPLPAEIKGTKLLAHWNSGATITCIPESFLEDEQPIKKTLIKTIHGEKQQNVYYVTFKVKGRKVEAEVIASPYEYILLSPTDVPWLTQQPLQLTILVPLQEYQEKILSKTALPEDQKQQLKTLFVKYDNLWQHWENQVGHRKIRPHNIATGDYPPRPQKQYPINPKAKPSIQIVIDDLLKQGVLTPQNSTMNTPVYPVPKPDGRWRMVLDYREVNKTIPLTAAQNQHSAGILATIVRQKYKTTLDLANGFWAHPITPESYWLTAFTWQGKQYCWTRLPQGFLNSPALFNADVVDLLKEIPNVQVYVDDIYLSHDDPKEHVQQLEKVFQILLQAGYVVSLKKSEIGQKTVEFLGFNITKEGRGLTDTFKTKLLNITPPKDLKQLQSILGKLNFARNFIPNFAELVQPLYNLIAPAKGKYIEWSEENTKQLNMVIEALNTASNLEERLPEQRLVIKVNTSPSAGYVRYYNETGKKPIMYLNYVFSKAELKFSMLEKLLTTMHKALIKAMDLAMGQEILVYSPIVSMTKIQKTPLPERKALPIRWITWMTYLEDPRIQFHYDKTLPELKHIPDVYTSSQSPVKHPSQYEGVFYTDGSAIKSPDPTKSNNAGMGIVHATYKPEYQVLNQWSIPLGNHTAQMAEIAAVEFACKKALKIPGPVLVITDSFYVAESANKELPYWKSNGFVNNKKKPLKHISKWKSIAECLSMKPDITIQHEKGISLQIPVFILKGNALADKLATQGSYVVNAGKRTADGSEFEKRTADGSEFESPKKKAKVE

SEQ ID NO: 1359 - protein, 2176 aa, synthetic construct
MPAAKRVKLDGGDKKYSIGLDIGTNSVGWAVITDEYKVPSKKFKVLGNTDRHSIKKNLIGALLFDSGETAEATRLKRTARRRYTRRKNRICYLQEIFSNEMAKVDDSFFHRLEESFLVEEDKKHERHPIFGNIVDEVAYHEKYPTIYHLRKKLVDSTDKADLRLIYLALAHMIKFRGHFLIEGDLNPDNSDVDKLFIQLVQTYNQLFEENPINASGVDAKAILSARLSKSRRLENLIAQLPGEKKNGLFGNLIALSLGLTPNFKSNFDLAEDAKLQLSKDTYDDDLDNLLAQIGDQYADLFLAAKNLSDAILLSDILRVNTEITKAPLSASMIKRYDEHHQDLTLLKALVRQQLPEKYKEIFFDQSKNGYAGYIDGGASQEEFYKFIKPILEKMDGTEELLVKLNREDLLRKQRTFDNGSIPHQIHLGELHAILRRQEDFYPFLKDNREKIEKILTFRIPYYVGPLARGNSRFAWMTRKSEETITPWNFEEVVDKGASAQSFIERMTNFDKNLPNEKVLPKHSLLYEYFTVYNELTKVKYVTEGMRKPAFLSGEQKKAIVDLLFKTNRKVTVKQLKEDYFKKIECFDSVEISGVEDRFNASLGTYHDLLKIIKDKDFLDNEENEDILEDIVLTLTLFEDREMIEERLKTYAHLFDDKVMKQLKRRRYTGWGRLSRKLINGIRDKQSGKTILDFLKSDGFANRNFMQLIHDDSLTFKEDIQKAQVSGQGDSLHEHIANLAGSPAIKKGILQTVKVVDELVKVMGRHKPENIVIEMARENQTTQKGQKNSRERMKRIEEGIKELGSQILKEHPVENTQLQNEKLYLYYLQNGRDMYVDQELDINRLSDYDVDHIVPQSFLKDDSIDNKVLTRSDKARGKSDNVPSEEVVKKMKNYWRQLLNAKLITQRKFDNLTKAERGGLSELDKAGFIKRQLVETRQITKHVAQILDSRMNTKYDENDKLIREVKVITLKSKLVSDFRKDFQFYKVREINNYHHAHDAYLNAVVGTALIKKYPKLESEFVYGDYKVYDVRKMIAKSEQEIGKATAKYFFYSNIMNFFKTEITLANGEIRKRPLIETNGETGEIVWDKGRDFATVRKVLSMPQVNIVKKTEVQTGGFSKESILPKRNSDKLIARKKDWDPKKYGGFDSPTVAYSVLVVAKVEKGKSKKLKSVKELLGITIMERSSFEKNPIDFLEAKGYKEVKKDLIIKLPKYSLFELENGRKRMLASAGELQKGNELALPSKYVNFLYLASHYEKLKGSPEDNEQKQLFVEQHKHYLDEIIEQISEFSKRVILADANLDKVLSAYNKHRDKPIREQAENIIHLFTLTNLGAPAAFKYFDTTIDRKRYTSTKEVLDATLIHQSITGLYETRIDLSQLGGDGGPAPEAAAKGGSGGMNPLQLLQPLPAEIKGTKLLAHWNSGATITCIPESFLEDEQPIKKTLIKTIHGEKQQNVYYVTFKVKGRKVEAEVIASPYEYILLSPTDVPWLTQQPLQLTILVPLQEYQEKILSKTALPEDQKQQLKTLFVKYDNLWQHWENQVGHRKIRPHNIATGDYPPRPQKQYPINPKAKPSIQIVIDDLLKQGVLTPQNSTMNTPVYPVPKPDGRWRMVLDYREVNKTIPLTAAQNQHSAGILATIVRQKYKTTLDLANGFWAHPITPESYWLTAFTWQGKQYCWTRLPQGFLNSPALFNADVVDLLKEIPNVQVYVDDIYLSHDDPKEHVQQLEKVFQILLQAGYVVSLKKSEIGQKTVEFLGFNITKEGRGLTDTFKTKLLNITPPKDLKQLQSILGKLNFARNFIPNFAELVQPLYNLIAPAKGKYIEWSEENTKQLNMVIEALNTASNLEERLPEQRLVIKVNTSPSAGYVRYYNETGKKPIMYLNYVFSKAELKFSMLEKLLTTMHKALIKAMDLAMGQEILVYSPIVSMTKIQKTPLPERKALPIRWITWMTYLEDPRIQFHYDKTLPELKHIPDVYTSSQSPVKHPSQYEGVFYTDGSAIKSPDPTKSNNAGMGIVHATYKPEYQVLNQWSIPLGNHTAQMAEIAAVEFACKKALKIPGPVLVITDSFYVAESANKELPYWKSNGFVNNKKKPLKHISKWKSIAECLSMKPDITIQHEKGISLQIPVFILKGNALADKLATQGSYVVNAGKRTADGSEFEKRTADGSEFESPKKKAKVE

SEQ ID NO: 1360 - protein, 2176 aa, synthetic construct
MPAAKRVKLDGGDKKYSIGLDIGTNSVGWAVITDEYKVPSKKFKVLGNTDRHSIKKNLIGALLFDSGETAEATRLKRTARRRYTRRKNRICYLQEIFSNEMAKVDDSFFHRLEESFLVEEDKKHERHPIFGNIVDEVAYHEKYPTIYHLRKKLVDSTDKADLRLIYLALAHMIKFRGHFLIEGDLNPDNSDVDKLFIQLVQTYNQLFEENPINASGVDAKAILSARLSKSRRLENLIAQLPGEKKNGLFGNLIALSLGLTPNFKSNFDLAEDAKLQLSKDTYDDDLDNLLAQIGDQYADLFLAAKNLSDAILLSDILRVNTEITKAPLSASMIKRYDEHHQDLTLLKALVRQQLPEKYKEIFFDQSKNGYAGYIDGGASQEEFYKFIKPILEKMDGTEELLVKLNREDLLRKQRTFDNGSIPHQIHLGELHAILRRQEDFYPFLKDNREKIEKILTFRIPYYVGPLARGNSRFAWMTRKSEETITPWNFEEVVDKGASAQSFIERMTNFDKNLPNEKVLPKHSLLYEYFTVYNELTKVKYVTEGMRKPAFLSGEQKKAIVDLLFKTNRKVTVKQLKEDYFKKIECFDSVEISGVEDRFNASLGTYHDLLKIIKDKDFLDNEENEDILEDIVLTLTLFEDREMIEERLKTYAHLFDDKVMKQLKRRRYTGWGRLSRKLINGIRDKQSGKTILDFLKSDGFANRNFMQLIHDDSLTFKEDIQKAQVSGQGDSLHEHIANLAGSPAIKKGILQTVKVVDELVKVMGRHKPENIVIEMARENQTTQKGQKNSRERMKRIEEGIKELGSQILKEHPVENTQLQNEKLYLYYLQNGRDMYVDQELDINRLSDYDVDHIVPQSFLKDDSIDNKVLTRSDKARGKSDNVPSEEVVKKMKNYWRQLLNAKLITQRKFDNLTKAERGGLSELDKAGFIKRQLVETRQITKHVAQILDSRMNTKYDENDKLIREVKVITLKSKLVSDFRKDFQFYKVREINNYHHAHDAYLNAVVGTALIKKYPKLESEFVYGDYKVYDVRKMIAKSEQEIGKATAKYFFYSNIMNFFKTEITLANGEIRKRPLIETNGETGEIVWDKGRDFATVRKVLSMPQVNIVKKTEVQTGGFSKESILPKRNSDKLIARKKDWDPKKYGGFDSPTVAYSVLVVAKVEKGKSKKLKSVKELLGITIMERSSFEKNPIDFLEAKGYKEVKKDLIIKLPKYSLFELENGRKRMLASAGELQKGNELALPSKYVNFLYLASHYEKLKGSPEDNEQKQLFVEQHKHYLDEIIEQISEFSKRVILADANLDKVLSAYNKHRDKPIREQAENIIHLFTLTNLGAPAAFKYFDTTIDRKRYTSTKEVLDATLIHQSITGLYETRIDLSQLGGDGGEAAAKGGGPAPGGMNPLQLLQPLPAEIKGTKLLAHWNSGATITCIPESFLEDEQPIKKTLIKTIHGEKQQNVYYVTFKVKGRKVEAEVIASPYEYILLSPTDVPWLTQQPLQLTILVPLQEYQEKILSKTALPEDQKQQLKTLFVKYDNLWQHWENQVGHRKIRPHNIATGDYPPRPQKQYPINPKAKPSIQIVIDDLLKQGVLTPQNSTMNTPVYPVPKPDGRWRMVLDYREVNKTIPLTAAQNQHSAGILATIVRQKYKTTLDLANGFWAHPITPESYWLTAFTWQGKQYCWTRLPQGFLNSPALFNADVVDLLKEIPNVQVYVDDIYLSHDDPKEHVQQLEKVFQILLQAGYVVSLKKSEIGQKTVEFLGFNITKEGRGLTDTFKTKLLNITPPKDLKQLQSILGKLNFARNFIPNFAELVQPLYNLIAPAKGKYIEWSEENTKQLNMVIEALNTASNLEERLPEQRLVIKVNTSPSAGYVRYYNETGKKPIMYLNYVFSKAELKFSMLEKLLTTMHKALIKAMDLAMGQEILVYSPIVSMTKIQKTPLPERKALPIRWITWMTYLEDPRIQFHYDKTLPELKHIPDVYTSSQSPVKHPSQYEGVFYTDGSAIKSPDPTKSNNAGMGIVHATYKPEYQVLNQWSIPLGNHTAQMAEIAAVEFACKKALKIPGPVLVITDSFYVAESANKELPYWKSNGFVNNKKKPLKHISKWKSIAECLSMKPDITIQHEKGISLQIPVFILKGNALADKLATQGSYVVNAGKRTADGSEFEKRTADGSEFESPKKKAKVE

SEQ ID NO: 1361 - protein, 2176 aa, synthetic construct
MPAAKRVKLDGGDKKYSIGLDIGTNSVGWAVITDEYKVPSKKFKVLGNTDRHSIKKNLIGALLFDSGETAEATRLKRTARRRYTRRKNRICYLQEIFSNEMAKVDDSFFHRLEESFLVEEDKKHERHPIFGNIVDEVAYHEKYPTIYHLRKKLVDSTDKADLRLIYLALAHMIKFRGHFLIEGDLNPDNSDVDKLFIQLVQTYNQLFEENPINASGVDAKAILSARLSKSRRLENLIAQLPGEKKNGLFGNLIALSLGLTPNFKSNFDLAEDAKLQLSKDTYDDDLDNLLAQIGDQYADLFLAAKNLSDAILLSDILRVNTEITKAPLSASMIKRYDEHHQDLTLLKALVRQQLPEKYKEIFFDQSKNGYAGYIDGGASQEEFYKFIKPILEKMDGTEELLVKLNREDLLRKQRTFDNGSIPHQIHLGELHAILRRQEDFYPFLKDNREKIEKILTFRIPYYVGPLARGNSRFAWMTRKSEETITPWNFEEVVDKGASAQSFIERMTNFDKNLPNEKVLPKHSLLYEYFTVYNELTKVKYVTEGMRKPAFLSGEQKKAIVDLLFKTNRKVTVKQLKEDYFKKIECFDSVEISGVEDRFNASLGTYHDLLKIIKDKDFLDNEENEDILEDIVLTLTLFEDREMIEERLKTYAHLFDDKVMKQLKRRRYTGWGRLSRKLINGIRDKQSGKTILDFLKSDGFANRNFMQLIHDDSLTFKEDIQKAQVSGQGDSLHEHIANLAGSPAIKKGILQTVKVVDELVKVMGRHKPENIVIEMARENQTTQKGQKNSRERMKRIEEGIKELGSQILKEHPVENTQLQNEKLYLYYLQNGRDMYVDQELDINRLSDYDVDHIVPQSFLKDDSIDNKVLTRSDKARGKSDNVPSEEVVKKMKNYWRQLLNAKLITQRKFDNLTKAERGGLSELDKAGFIKRQLVETRQITKHVAQILDSRMNTKYDENDKLIREVKVITLKSKLVSDFRKDFQFYKVREINNYHHAHDAYLNAVVGTALIKKYPKLESEFVYGDYKVYDVRKMIAKSEQEIGKATAKYFFYSNIMNFFKTEITLANGEIRKRPLIETNGETGEIVWDKGRDFATVRKVLSMPQVNIVKKTEVQTGGFSKESILPKRNSDKLIARKKDWDPKKYGGFDSPTVAYSVLVVAKVEKGKSKKLKSVKELLGITIMERSSFEKNPIDFLEAKGYKEVKKDLIIKLPKYSLFELENGRKRMLASAGELQKGNELALPSKYVNFLYLASHYEKLKGSPEDNEQKQLFVEQHKHYLDEIIEQISEFSKRVILADANLDKVLSAYNKHRDKPIREQAENIIHLFTLTNLGAPAAFKYFDTTIDRKRYTSTKEVLDATLIHQSITGLYETRIDLSQLGGDGGGSSEAAAKGGGGGMNPLQLLQPLPAEIKGTKLLAHWNSGATITCIPESFLEDEQPIKKTLIKTIHGEKQQNVYYVTFKVKGRKVEAEVIASPYEYILLSPTDVPWLTQQPLQLTILVPLQEYQEKILSKTALPEDQKQQLKTLFVKYDNLWQHWENQVGHRKIRPHNIATGDYPPRPQKQYPINPKAKPSIQIVIDDLLKQGVLTPQNSTMNTPVYPVPKPDGRWRMVLDYREVNKTIPLTAAQNQHSAGILATIVRQKYKTTLDLANGFWAHPITPESYWLTAFTWQGKQYCWTRLPQGFLNSPALFNADVVDLLKEIPNVQVYVDDIYLSHDDPKEHVQQLEKVFQILLQAGYVVSLKKSEIGQKTVEFLGFNITKEGRGLTDTFKTKLLNITPPKDLKQLQSILGKLNFARNFIPNFAELVQPLYNLIAPAKGKYIEWSEENTKQLNMVIEALNTASNLEERLPEQRLVIKVNTSPSAGYVRYYNETGKKPIMYLNYVFSKAELKFSMLEKLLTTMHKALIKAMDLAMGQEILVYSPIVSMTKIQKTPLPERKALPIRWITWMTYLEDPRIQFHYDKTLPELKHIPDVYTSSQSPVKHPSQYEGVFYTDGSAIKSPDPTKSNNAGMGIVHATYKPEYQVLNQWSIPLGNHTAQMAEIAAVEFACKKALKIPGPVLVITDSFYVAESANKELPYWKSNGFVNNKKKPLKHISKWKSIAECLSMKPDITIQHEKGISLQIPVFILKGNALADKLATQGSYVVNAGKRTADGSEFEKRTADGSEFESPKKKAKVE

SEQ ID NO: 1362 - protein, 2176 aa, synthetic construct
MPAAKRVKLDGGDKKYSIGLDIGTNSVGWAVITDEYKVPSKKFKVLGNTDRHSIKKNLIGALLFDSGETAEATRLKRTARRRYTRRKNRICYLQEIFSNEMAKVDDSFFHRLEESFLVEEDKKHERHPIFGNIVDEVAYHEKYPTIYHLRKKLVDSTDKADLRLIYLALAHMIKFRGHFLIEGDLNPDNSDVDKLFIQLVQTYNQLFEENPINASGVDAKAILSARLSKSRRLENLIAQLPGEKKNGLFGNLIALSLGLTPNFKSNFDLAEDAKLQLSKDTYDDDLDNLLAQIGDQYADLFLAAKNLSDAILLSDILRVNTEITKAPLSASMIKRYDEHHQDLTLLKALVRQQLPEKYKEIFFDQSKNGYAGYIDGGASQEEFYKFIKPILEKMDGTEELLVKLNREDLLRKQRTFDNGSIPHQIHLGELHAILRRQEDFYPFLKDNREKIEKILTFRIPYYVGPLARGNSRFAWMTRKSEETITPWNFEEVVDKGASAQSFIERMTNFDKNLPNEKVLPKHSLLYEYFTVYNELTKVKYVTEGMRKPAFLSGEQKKAIVDLLFKTNRKVTVKQLKEDYFKKIECFDSVEISGVEDRFNASLGTYHDLLKIIKDKDFLDNEENEDILEDIVLTLTLFEDREMIEERLKTYAHLFDDKVMKQLKRRRYTGWGRLSRKLINGIRDKQSGKTILDFLKSDGFANRNFMQLIHDDSLTFKEDIQKAQVSGQGDSLHEHIANLAGSPAIKKGILQTVKVVDELVKVMGRHKPENIVIEMARENQTTQKGQKNSRERMKRIEEGIKELGSQILKEHPVENTQLQNEKLYLYYLQNGRDMYVDQELDINRLSDYDVDHIVPQSFLKDDSIDNKVLTRSDKARGKSDNVPSEEVVKKMKNYWRQLLNAKLITQRKFDNLTKAERGGLSELDKAGFIKRQLVETRQITKHVAQILDSRMNTKYDENDKLIREVKVITLKSKLVSDFRKDFQFYKVREINNYHHAHDAYLNAVVGTALIKKYPKLESEFVYGDYKVYDVRKMIAKSEQEIGKATAKYFFYSNIMNFFKTEITLANGEIRKRPLIETNGETGEIVWDKGRDFATVRKVLSMPQVNIVKKTEVQTGGFSKESILPKRNSDKLIARKKDWDPKKYGGFDSPTVAYSVLVVAKVEKGKSKKLKSVKELLGITIMERSSFEKNPIDFLEAKGYKEVKKDLIIKLPKYSLFELENGRKRMLASAGELQKGNELALPSKYVNFLYLASHYEKLKGSPEDNEQKQLFVEQHKHYLDEIIEQISEFSKRVILADANLDKVLSAYNKHRDKPIREQAENIIHLFTLTNLGAPAAFKYFDTTIDRKRYTSTKEVLDATLIHQSITGLYETRIDLSQLGGDGGEAAAKGGGGSSGGMNPLQLLQPLPAEIKGTKLLAHWNSGATITCIPESFLEDEQPIKKTLIKTIHGEKQQNVYYVTFKVKGRKVEAEVIASPYEYILLSPTDVPWLTQQPLQLTILVPLQEYQEKILSKTALPEDQKQQLKTLFVKYDNLWQHWENQVGHRKIRPHNIATGDYPPRPQKQYPINPKAKPSIQIVIDDLLKQGVLTPQNSTMNTPVYPVPKPDGRWRMVLDYREVNKTIPLTAAQNQHSAGILATIVRQKYKTTLDLANGFWAHPITPESYWLTAFTWQGKQYCWTRLPQGFLNSPALFNADVVDLLKEIPNVQVYVDDIYLSHDDPKEHVQQLEKVFQILLQAGYVVSLKKSEIGQKTVEFLGFNITKEGRGLTDTFKTKLLNITPPKDLKQLQSILGKLNFARNFIPNFAELVQPLYNLIAPAKGKYIEWSEENTKQLNMVIEALNTASNLEERLPEQRLVIKVNTSPSAGYVRYYNETGKKPIMYLNYVFSKAELKFSMLEKLLTTMHKALIKAMDLAMGQEILVYSPIVSMTKIQKTPLPERKALPIRWITWMTYLEDPRIQFHYDKTLPELKHIPDVYTSSQSPVKHPSQYEGVFYTDGSAIKSPDPTKSNNAGMGIVHATYKPEYQVLNQWSIPLGNHTAQMAEIAAVEFACKKALKIPGPVLVITDSFYVAESANKELPYWKSNGFVNNKKKPLKHISKWKSIAECLSMKPDITIQHEKGISLQIPVFILKGNALADKLATQGSYVVNAGKRTADGSEFEKRTADGSEFESPKKKAKVE

SEQ ID NO: 1363 - protein, 2172 aa, synthetic construct
MPAAKRVKLDGGDKKYSIGLDIGTNSVGWAVITDEYKVPSKKFKVLGNTDRHSIKKNLIGALLFDSGETAEATRLKRTARRRYTRRKNRICYLQEIFSNEMAKVDDSFFHRLEESFLVEEDKKHERHPIFGNIVDEVAYHEKYPTIYHLRKKLVDSTDKADLRLIYLALAHMIKFRGHFLIEGDLNPDNSDVDKLFIQLVQTYNQLFEENPINASGVDAKAILSARLSKSRRLENLIAQLPGEKKNGLFGNLIALSLGLTPNFKSNFDLAEDAKLQLSKDTYDDDLDNLLAQIGDQYADLFLAAKNLSDAILLSDILRVNTEITKAPLSASMIKRYDEHHQDLTLLKALVRQQLPEKYKEIFFDQSKNGYAGYIDGGASQEEFYKFIKPILEKMDGTEELLVKLNREDLLRKQRTFDNGSIPHQIHLGELHAILRRQEDFYPFLKDNREKIEKILTFRIPYYVGPLARGNSRFAWMTRKSEETITPWNFEEVVDKGASAQSFIERMTNFDKNLPNEKVLPKHSLLYEYFTVYNELTKVKYVTEGMRKPAFLSGEQKKAIVDLLFKTNRKVTVKQLKEDYFKKIECFDSVEISGVEDRFNASLGTYHDLLKIIKDKDFLDNEENEDILEDIVLTLTLFEDREMIEERLKTYAHLFDDKVMKQLKRRRYTGWGRLSRKLINGIRDKQSGKTILDFLKSDGFANRNFMQLIHDDSLTFKEDIQKAQVSGQGDSLHEHIANLAGSPAIKKGILQTVKVVDELVKVMGRHKPENIVIEMARENQTTQKGQKNSRERMKRIEEGIKELGSQILKEHPVENTQLQNEKLYLYYLQNGRDMYVDQELDINRLSDYDVDHIVPQSFLKDDSIDNKVLTRSDKARGKSDNVPSEEVVKKMKNYWRQLLNAKLITQRKFDNLTKAERGGLSELDKAGFIKRQLVETRQITKHVAQILDSRMNTKYDENDKLIREVKVITLKSKLVSDFRKDFQFYKVREINNYHHAHDAYLNAVVGTALIKKYPKLESEFVYGDYKVYDVRKMIAKSEQEIGKATAKYFFYSNIMNFFKTEITLANGEIRKRPLIETNGETGEIVWDKGRDFATVRKVLSMPQVNIVKKTEVQTGGFSKESILPKRNSDKLIARKKDWDPKKYGGFDSPTVAYSVLVVAKVEKGKSKKLKSVKELLGITIMERSSFEKNPIDFLEAKGYKEVKKDLIIKLPKYSLFELENGRKRMLASAGELQKGNELALPSKYVNFLYLASHYEKLKGSPEDNEQKQLFVEQHKHYLDEIIEQISEFSKRVILADANLDKVLSAYNKHRDKPIREQAENIIHLFTLTNLGAPAAFKYFDTTIDRKRYTSTKEVLDATLIHQSITGLYETRIDLSQLGGDGGPAPAPAPGGMNPLQLLQPLPAEIKGTKLLAHWNSGATITCIPESFLEDEQPIKKTLIKTIHGEKQQNVYYVTFKVKGRKVEAEVIASPYEYILLSPTDVPWLTQQPLQLTILVPLQEYQEKILSKTALPEDQKQQLKTLFVKYDNLWQHWENQVGHRKIRPHNIATGDYPPRPQKQYPINPKAKPSIQIVIDDLLKQGVLTPQNSTMNTPVYPVPKPDGRWRMVLDYREVNKTIPLTAAQNQHSAGILATIVRQKYKTTLDLANGFWAHPITPESYWLTAFTWQGKQYCWTRLPQGFLNSPALFNADVVDLLKEIPNVQVYVDDIYLSHDDPKEHVQQLEKVFQILLQAGYVVSLKKSEIGQKTVEFLGFNITKEGRGLTDTFKTKLLNITPPKDLKQLQSILGKLNFARNFIPNFAELVQPLYNLIAPAKGKYIEWSEENTKQLNMVIEALNTASNLEERLPEQRLVIKVNTSPSAGYVRYYNETGKKPIMYLNYVFSKAELKFSMLEKLLTTMHKALIKAMDLAMGQEILVYSPIVSMTKIQKTPLPERKALPIRWITWMTYLEDPRIQFHYDKTLPELKHIPDVYTSSQSPVKHPSQYEGVFYTDGSAIKSPDPTKSNNAGMGIVHATYKPEYQVLNQWSIPLGNHTAQMAEIAAVEFACKKALKIPGPVLVITDSFYVAESANKELPYWKSNGFVNNKKKPLKHISKWKSIAECLSMKPDITIQHEKGISLQIPVFILKGNALADKLATQGSYVVNAGKRTADGSEFEKRTADGSEFESPKKKAKVE

SEQ ID NO: 1364 - protein, 2174 aa, synthetic construct
MPAAKRVKLDGGDKKYSIGLDIGTNSVGWAVITDEYKVPSKKFKVLGNTDRHSIKKNLIGALLFDSGETAEATRLKRTARRRYTRRKNRICYLQEIFSNEMAKVDDSFFHRLEESFLVEEDKKHERHPIFGNIVDEVAYHEKYPTIYHLRKKLVDSTDKADLRLIYLALAHMIKFRGHFLIEGDLNPDNSDVDKLFIQLVQTYNQLFEENPINASGVDAKAILSARLSKSRRLENLIAQLPGEKKNGLFGNLIALSLGLTPNFKSNFDLAEDAKLQLSKDTYDDDLDNLLAQIGDQYADLFLAAKNLSDAILLSDILRVNTEITKAPLSASMIKRYDEHHQDLTLLKALVRQQLPEKYKEIFFDQSKNGYAGYIDGGASQEEFYKFIKPILEKMDGTEELLVKLNREDLLRKQRTFDNGSIPHQIHLGELHAILRRQEDFYPFLKDNREKIEKILTFRIPYYVGPLARGNSRFAWMTRKSEETITPWNFEEVVDKGASAQSFIERMTNFDKNLPNEKVLPKHSLLYEYFTVYNELTKVKYVTEGMRKPAFLSGEQKKAIVDLLFKTNRKVTVKQLKEDYFKKIECFDSVEISGVEDRFNASLGTYHDLLKIIKDKDFLDNEENEDILEDIVLTLTLFEDREMIEERLKTYAHLFDDKVMKQLKRRRYTGWGRLSRKLINGIRDKQSGKTILDFLKSDGFANRNFMQLIHDDSLTFKEDIQKAQVSGQGDSLHEHIANLAGSPAIKKGILQTVKVVDELVKVMGRHKPENIVIEMARENQTTQKGQKNSRERMKRIEEGIKELGSQILKEHPVENTQLQNEKLYLYYLQNGRDMYVDQELDINRLSDYDVDHIVPQSFLKDDSIDNKVLTRSDKARGKSDNVPSEEVVKKMKNYWRQLLNAKLITQRKFDNLTKAERGGLSELDKAGFIKRQLVETRQITKHVAQILDSRMNTKYDENDKLIREVKVITLKSKLVSDFRKDFQFYKVREINNYHHAHDAYLNAVVGTALIKKYPKLESEFVYGDYKVYDVRKMIAKSEQEIGKATAKYFFYSNIMNFFKTEITLANGEIRKRPLIETNGETGEIVWDKGRDFATVRKVLSMPQVNIVKKTEVQTGGFSKESILPKRNSDKLIARKKDWDPKKYGGFDSPTVAYSVLVVAKVEKGKSKKLKSVKELLGITIMERSSFEKNPIDFLEAKGYKEVKKDLIIKLPKYSLFELENGRKRMLASAGELQKGNELALPSKYVNFLYLASHYEKLKGSPEDNEQKQLFVEQHKHYLDEIIEQISEFSKRVILADANLDKVLSAYNKHRDKPIREQAENIIHLFTLTNLGAPAAFKYFDTTIDRKRYTSTKEVLDATLIHQSITGLYETRIDLSQLGGDGGPAPAPAPAPGGMNPLQLLQPLPAEIKGTKLLAHWNSGATITCIPESFLEDEQPIKKTLIKTIHGEKQQNVYYVTFKVKGRKVEAEVIASPYEYILLSPTDVPWLTQQPLQLTILVPLQEYQEKILSKTALPEDQKQQLKTLFVKYDNLWQHWENQVGHRKIRPHNIATGDYPPRPQKQYPINPKAKPSIQIVIDDLLKQGVLTPQNSTMNTPVYPVPKPDGRWRMVLDYREVNKTIPLTAAQNQHSAGILATIVRQKYKTTLDLANGFWAHPITPESYWLTAFTWQGKQYCWTRLPQGFLNSPALFNADVVDLLKEIPNVQVYVDDIYLSHDDPKEHVQQLEKVFQILLQAGYVVSLKKSEIGQKTVEFLGFNITKEGRGLTDTFKTKLLNITPPKDLKQLQSILGKLNFARNFIPNFAELVQPLYNLIAPAKGKYIEWSEENTKQLNMVIEALNTASNLEERLPEQRLVIKVNTSPSAGYVRYYNETGKKPIMYLNYVFSKAELKFSMLEKLLTTMHKALIKAMDLAMGQEILVYSPIVSMTKIQKTPLPERKALPIRWITWMTYLEDPRIQFHYDKTLPELKHIPDVYTSSQSPVKHPSQYEGVFYTDGSAIKSPDPTKSNNAGMGIVHATYKPEYQVLNQWSIPLGNHTAQMAEIAAVEFACKKALKIPGPVLVITDSFYVAESANKELPYWKSNGFVNNKKKPLKHISKWKSIAECLSMKPDITIQHEKGISLQIPVFILKGNALADKLATQGSYVVNAGKRTADGSEFEKRTADGSEFESPKKKAKVE

SEQ ID NO: 1365 - protein, 2094 aa, synthetic construct
MPAAKRVKLDGGDKKYSIGLDIGTNSVGWAVITDEYKVPSKKFKVLGNTDRHSIKKNLIGALLFDSGETAEATRLKRTARRRYTRRKNRICYLQEIFSNEMAKVDDSFFHRLEESFLVEEDKKHERHPIFGNIVDEVAYHEKYPTIYHLRKKLVDSTDKADLRLIYLALAHMIKFRGHFLIEGDLNPDNSDVDKLFIQLVQTYNQLFEENPINASGVDAKAILSARLSKSRRLENLIAQLPGEKKNGLFGNLIALSLGLTPNFKSNFDLAEDAKLQLSKDTYDDDLDNLLAQIGDQYADLFLAAKNLSDAILLSDILRVNTEITKAPLSASMIKRYDEHHQDLTLLKALVRQQLPEKYKEIFFDQSKNGYAGYIDGGASQEEFYKFIKPILEKMDGTEELLVKLNREDLLRKQRTFDNGSIPHQIHLGELHAILRRQEDFYPFLKDNREKIEKILTFRIPYYVGPLARGNSRFAWMTRKSEETITPWNFEEVVDKGASAQSFIERMTNFDKNLPNEKVLPKHSLLYEYFTVYNELTKVKYVTEGMRKPAFLSGEQKKAIVDLLFKTNRKVTVKQLKEDYFKKIECFDSVEISGVEDRFNASLGTYHDLLKIIKDKDFLDNEENEDILEDIVLTLTLFEDREMIEERLKTYAHLFDDKVMKQLKRRRYTGWGRLSRKLINGIRDKQSGKTILDFLKSDGFANRNFMQLIHDDSLTFKEDIQKAQVSGQGDSLHEHIANLAGSPAIKKGILQTVKVVDELVKVMGRHKPENIVIEMARENQTTQKGQKNSRERMKRIEEGIKELGSQILKEHPVENTQLQNEKLYLYYLQNGRDMYVDQELDINRLSDYDVDHIVPQSFLKDDSIDNKVLTRSDKARGKSDNVPSEEVVKKMKNYWRQLLNAKLITQRKFDNLTKAERGGLSELDKAGFIKRQLVETRQITKHVAQILDSRMNTKYDENDKLIREVKVITLKSKLVSDFRKDFQFYKVREINNYHHAHDAYLNAVVGTALIKKYPKLESEFVYGDYKVYDVRKMIAKSEQEIGKATAKYFFYSNIMNFFKTEITLANGEIRKRPLIETNGETGEIVWDKGRDFATVRKVLSMPQVNIVKKTEVQTGGFSKESILPKRNSDKLIARKKDWDPKKYGGFDSPTVAYSVLVVAKVEKGKSKKLKSVKELLGITIMERSSFEKNPIDFLEAKGYKEVKKDLIIKLPKYSLFELENGRKRMLASAGELQKGNELALPSKYVNFLYLASHYEKLKGSPEDNEQKQLFVEQHKHYLDEIIEQISEFSKRVILADANLDKVLSAYNKHRDKPIREQAENIIHLFTLTNLGAPAAFKYFDTTIDRKRYTSTKEVLDATLIHQSITGLYETRIDLSQLGGDGGEAAAKGGSPAPGGVLNLEEEYRLHEKPVPSSIDPSWLQLFPTVWAERAGMGLANQVPPVVVELRSGASPVAVRQYPMSKEAREGIRPHIQKFLDLGVLVPCRSPWNTPLLPVKKPGTNDYRPVQDLREINKRVQDIHPTVPNPYNLLSSLPPSYTWYSVLDLKDAFFCLRLHPNSQPLFAFEWKDPEKGNTGQLTWTRLPQGFKNSPTLFDEALHRDLAPFRALNPQVVLLQYVDDLLVAAPTYEDCKKGTQKLLQELSKLGYRVSAKKAQLCQREVTYLGYLLKEGKRWLTPARKATVMKIPVPTTPRQVREFLGTAGFCRLWIPGFASLAAPLYPLTKESIPFIWTEEHQQAFDHIKKALLSAPALALPDLTKPFTLYIDERAGVARGVLTQTLGPWRRPVAYLSKKLDPVASGWPTCLKAVAAVALLLKDADKLTLGQNVTVIASHSLESIVRQPPDRWMTNARMTHYQSLLLNERVSFAPPAVLNPATLLPVESEATPVHRCSEILAEETGTRRDLEDQPLPGVPTWYTDGSSFITEGKRRAGAPIVDGKRTVWASSLPEGTSAQKAELVALTQALRLAEGKNINIYTDSRYAFATAHIHGAIYKQRGLLTSAGKDIKNKEEILALLEAIHLPRRVAIIHCPGHQRGSNPVATGNRRADEAAKQAALSTRVLAGTTKPAGKRTADGSEFEKRTADGSEFESPKKKAKVE

SEQ ID NO: 1366 - protein, 2101 aa, synthetic construct
MPAAKRVKLDGGDKKYSIGLDIGTNSVGWAVITDEYKVPSKKFKVLGNTDRHSIKKNLIGALLFDSGETAEATRLKRTARRRYTRRKNRICYLQEIFSNEMAKVDDSFFHRLEESFLVEEDKKHERHPIFGNIVDEVAYHEKYPTIYHLRKKLVDSTDKADLRLIYLALAHMIKFRGHFLIEGDLNPDNSDVDKLFIQLVQTYNQLFEENPINASGVDAKAILSARLSKSRRLENLIAQLPGEKKNGLFGNLIALSLGLTPNFKSNFDLAEDAKLQLSKDTYDDDLDNLLAQIGDQYADLFLAAKNLSDAILLSDILRVNTEITKAPLSASMIKRYDEHHQDLTLLKALVRQQLPEKYKEIFFDQSKNGYAGYIDGGASQEEFYKFIKPILEKMDGTEELLVKLNREDLLRKQRTFDNGSIPHQIHLGELHAILRRQEDFYPFLKDNREKIEKILTFRIPYYVGPLARGNSRFAWMTRKSEETITPWNFEEVVDKGASAQSFIERMTNFDKNLPNEKVLPKHSLLYEYFTVYNELTKVKYVTEGMRKPAFLSGEQKKAIVDLLFKTNRKVTVKQLKEDYFKKIECFDSVEISGVEDRFNASLGTYHDLLKIIKDKDFLDNEENEDILEDIVLTLTLFEDREMIEERLKTYAHLFDDKVMKQLKRRRYTGWGRLSRKLINGIRDKQSGKTILDFLKSDGFANRNFMQLIHDDSLTFKEDIQKAQVSGQGDSLHEHIANLAGSPAIKKGILQTVKVVDELVKVMGRHKPENIVIEMARENQTTQKGQKNSRERMKRIEEGIKELGSQILKEHPVENTQLQNEKLYLYYLQNGRDMYVDQELDINRLSDYDVDHIVPQSFLKDDSIDNKVLTRSDKARGKSDNVPSEEVVKKMKNYWRQLLNAKLITQRKFDNLTKAERGGLSELDKAGFIKRQLVETRQITKHVAQILDSRMNTKYDENDKLIREVKVITLKSKLVSDFRKDFQFYKVREINNYHHAHDAYLNAVVGTALIKKYPKLESEFVYGDYKVYDVRKMIAKSEQEIGKATAKYFFYSNIMNFFKTEITLANGEIRKRPLIETNGETGEIVWDKGRDFATVRKVLSMPQVNIVKKTEVQTGGFSKESILPKRNSDKLIARKKDWDPKKYGGFDSPTVAYSVLVVAKVEKGKSKKLKSVKELLGITIMERSSFEKNPIDFLEAKGYKEVKKDLIIKLPKYSLFELENGRKRMLASAGELQKGNELALPSKYVNFLYLASHYEKLKGSPEDNEQKQLFVEQHKHYLDEIIEQISEFSKRVILADANLDKVLSAYNKHRDKPIREQAENIIHLFTLTNLGAPAAFKYFDTTIDRKRYTSTKEVLDATLIHQSITGLYETRIDLSQLGGDGGGSSGSSGSSGSSGSSGSSGGVLNLEEEYRLHEKPVPSSIDPSWLQLFPTVWAERAGMGLANQVPPVVVELRSGASPVAVRQYPMSKEAREGIRPHIQKFLDLGVLVPCRSPWNTPLLPVKKPGTNDYRPVQDLREINKRVQDIHPTVPNPYNLLSSLPPSYTWYSVLDLKDAFFCLRLHPNSQPLFAFEWKDPEKGNTGQLTWTRLPQGFKNSPTLFDEALHRDLAPFRALNPQVVLLQYVDDLLVAAPTYEDCKKGTQKLLQELSKLGYRVSAKKAQLCQREVTYLGYLLKEGKRWLTPARKATVMKIPVPTTPRQVREFLGTAGFCRLWIPGFASLAAPLYPLTKESIPFIWTEEHQQAFDHIKKALLSAPALALPDLTKPFTLYIDERAGVARGVLTQTLGPWRRPVAYLSKKLDPVASGWPTCLKAVAAVALLLKDADKLTLGQNVTVIASHSLESIVRQPPDRWMTNARMTHYQSLLLNERVSFAPPAVLNPATLLPVESEATPVHRCSEILAEETGTRRDLEDQPLPGVPTWYTDGSSFITEGKRRAGAPIVDGKRTVWASSLPEGTSAQKAELVALTQALRLAEGKNINIYTDSRYAFATAHIHGAIYKQRGLLTSAGKDIKNKEEILALLEAIHLPRRVAIIHCPGHQRGSNPVATGNRRADEAAKQAALSTRVLAGTTKPAGKRTADGSEFEKRTADGSEFESPKKKAKVE

SEQ ID NO: 1367 - protein, 2103 aa, synthetic construct
MPAAKRVKLDGGDKKYSIGLDIGTNSVGWAVITDEYKVPSKKFKVLGNTDRHSIKKNLIGALLFDSGETAEATRLKRTARRRYTRRKNRICYLQEIFSNEMAKVDDSFFHRLEESFLVEEDKKHERHPIFGNIVDEVAYHEKYPTIYHLRKKLVDSTDKADLRLIYLALAHMIKFRGHFLIEGDLNPDNSDVDKLFIQLVQTYNQLFEENPINASGVDAKAILSARLSKSRRLENLIAQLPGEKKNGLFGNLIALSLGLTPNFKSNFDLAEDAKLQLSKDTYDDDLDNLLAQIGDQYADLFLAAKNLSDAILLSDILRVNTEITKAPLSASMIKRYDEHHQDLTLLKALVRQQLPEKYKEIFFDQSKNGYAGYIDGGASQEEFYKFIKPILEKMDGTEELLVKLNREDLLRKQRTFDNGSIPHQIHLGELHAILRRQEDFYPFLKDNREKIEKILTFRIPYYVGPLARGNSRFAWMTRKSEETITPWNFEEVVDKGASAQSFIERMTNFDKNLPNEKVLPKHSLLYEYFTVYNELTKVKYVTEGMRKPAFLSGEQKKAIVDLLFKTNRKVTVKQLKEDYFKKIECFDSVEISGVEDRFNASLGTYHDLLKIIKDKDFLDNEENEDILEDIVLTLTLFEDREMIEERLKTYAHLFDDKVMKQLKRRRYTGWGRLSRKLINGIRDKQSGKTILDFLKSDGFANRNFMQLIHDDSLTFKEDIQKAQVSGQGDSLHEHIANLAGSPAIKKGILQTVKVVDELVKVMGRHKPENIVIEMARENQTTQKGQKNSRERMKRIEEGIKELGSQILKEHPVENTQLQNEKLYLYYLQNGRDMYVDQELDINRLSDYDVDHIVPQSFLKDDSIDNKVLTRSDKARGKSDNVPSEEVVKKMKNYWRQLLNAKLITQRKFDNLTKAERGGLSELDKAGFIKRQLVETRQITKHVAQILDSRMNTKYDENDKLIREVKVITLKSKLVSDFRKDFQFYKVREINNYHHAHDAYLNAVVGTALIKKYPKLESEFVYGDYKVYDVRKMIAKSEQEIGKATAKYFFYSNIMNFFKTEITLANGEIRKRPLIETNGETGEIVWDKGRDFATVRKVLSMPQVNIVKKTEVQTGGFSKESILPKRNSDKLIARKKDWDPKKYGGFDSPTVAYSVLVVAKVEKGKSKKLKSVKELLGITIMERSSFEKNPIDFLEAKGYKEVKKDLIIKLPKYSLFELENGRKRMLASAGELQKGNELALPSKYVNFLYLASHYEKLKGSPEDNEQKQLFVEQHKHYLDEIIEQISEFSKRVILADANLDKVLSAYNKHRDKPIREQAENIIHLFTLTNLGAPAAFKYFDTTIDRKRYTSTKEVLDATLIHQSITGLYETRIDLSQLGGDGGEAAAKEAAAKEAAAKEAAAKGGVLNLEEEYRLHEKPVPSSIDPSWLQLFPTVWAERAGMGLANQVPPVVVELRSGASPVAVRQYPMSKEAREGIRPHIQKFLDLGVLVPCRSPWNTPLLPVKKPGTNDYRPVQDLREINKRVQDIHPTVPNPYNLLSSLPPSYTWYSVLDLKDAFFCLRLHPNSQPLFAFEWKDPEKGNTGQLTWTRLPQGFKNSPTLFDEALHRDLAPFRALNPQVVLLQYVDDLLVAAPTYEDCKKGTQKLLQELSKLGYRVSAKKAQLCQREVTYLGYLLKEGKRWLTPARKATVMKIPVPTTPRQVREFLGTAGFCRLWIPGFASLAAPLYPLTKESIPFIWTEEHQQAFDHIKKALLSAPALALPDLTKPFTLYIDERAGVARGVLTQTLGPWRRPVAYLSKKLDPVASGWPTCLKAVAAVALLLKDADKLTLGQNVTVIASHSLESIVRQPPDRWMTNARMTHYQSLLLNERVSFAPPAVLNPATLLPVESEATPVHRCSEILAEETGTRRDLEDQPLPGVPTWYTDGSSFITEGKRRAGAPIVDGKRTVWASSLPEGTSAQKAELVALTQALRLAEGKNINIYTDSRYAFATAHIHGAIYKQRGLLTSAGKDIKNKEEILALLEAIHLPRRVAIIHCPGHQRGSNPVATGNRRADEAAKQAALSTRVLAGTTKPAGKRTADGSEFEKRTADGSEFESPKKKAKVE

SEQ ID NO: 1368 - protein, 2098 aa, synthetic construct
MPAAKRVKLDGGDKKYSIGLDIGTNSVGWAVITDEYKVPSKKFKVLGNTDRHSIKKNLIGALLFDSGETAEATRLKRTARRRYTRRKNRICYLQEIFSNEMAKVDDSFFHRLEESFLVEEDKKHERHPIFGNIVDEVAYHEKYPTIYHLRKKLVDSTDKADLRLIYLALAHMIKFRGHFLIEGDLNPDNSDVDKLFIQLVQTYNQLFEENPINASGVDAKAILSARLSKSRRLENLIAQLPGEKKNGLFGNLIALSLGLTPNFKSNFDLAEDAKLQLSKDTYDDDLDNLLAQIGDQYADLFLAAKNLSDAILLSDILRVNTEITKAPLSASMIKRYDEHHQDLTLLKALVRQQLPEKYKEIFFDQSKNGYAGYIDGGASQEEFYKFIKPILEKMDGTEELLVKLNREDLLRKQRTFDNGSIPHQIHLGELHAILRRQEDFYPFLKDNREKIEKILTFRIPYYVGPLARGNSRFAWMTRKSEETITPWNFEEVVDKGASAQSFIERMTNFDKNLPNEKVLPKHSLLYEYFTVYNELTKVKYVTEGMRKPAFLSGEQKKAIVDLLFKTNRKVTVKQLKEDYFKKIECFDSVEISGVEDRFNASLGTYHDLLKIIKDKDFLDNEENEDILEDIVLTLTLFEDREMIEERLKTYAHLFDDKVMKQLKRRRYTGWGRLSRKLINGIRDKQSGKTILDFLKSDGFANRNFMQLIHDDSLTFKEDIQKAQVSGQGDSLHEHIANLAGSPAIKKGILQTVKVVDELVKVMGRHKPENIVIEMARENQTTQKGQKNSRERMKRIEEGIKELGSQILKEHPVENTQLQNEKLYLYYLQNGRDMYVDQELDINRLSDYDVDHIVPQSFLKDDSIDNKVLTRSDKARGKSDNVPSEEVVKKMKNYWRQLLNAKLITQRKFDNLTKAERGGLSELDKAGFIKRQLVETRQITKHVAQILDSRMNTKYDENDKLIREVKVITLKSKLVSDFRKDFQFYKVREINNYHHAHDAYLNAVVGTALIKKYPKLESEFVYGDYKVYDVRKMIAKSEQEIGKATAKYFFYSNIMNFFKTEITLANGEIRKRPLIETNGETGEIVWDKGRDFATVRKVLSMPQVNIVKKTEVQTGGFSKESILPKRNSDKLIARKKDWDPKKYGGFDSPTVAYSVLVVAKVEKGKSKKLKSVKELLGITIMERSSFEKNPIDFLEAKGYKEVKKDLIIKLPKYSLFELENGRKRMLASAGELQKGNELALPSKYVNFLYLASHYEKLKGSPEDNEQKQLFVEQHKHYLDEIIEQISEFSKRVILADANLDKVLSAYNKHRDKPIREQAENIIHLFTLTNLGAPAAFKYFDTTIDRKRYTSTKEVLDATLIHQSITGLYETRIDLSQLGGDGGGSSGSSGSSGSSGSSGGVLNLEEEYRLHEKPVPSSIDPSWLQLFPTVWAERAGMGLANQVPPVVVELRSGASPVAVRQYPMSKEAREGIRPHIQKFLDLGVLVPCRSPWNTPLLPVKKPGTNDYRPVQDLREINKRVQDIHPTVPNPYNLLSSLPPSYTWYSVLDLKDAFFCLRLHPNSQPLFAFEWKDPEKGNTGQLTWTRLPQGFKNSPTLFDEALHRDLAPFRALNPQVVLLQYVDDLLVAAPTYEDCKKGTQKLLQELSKLGYRVSAKKAQLCQREVTYLGYLLKEGKRWLTPARKATVMKIPVPTTPRQVREFLGTAGFCRLWIPGFASLAAPLYPLTKESIPFIWTEEHQQAFDHIKKALLSAPALALPDLTKPFTLYIDERAGVARGVLTQTLGPWRRPVAYLSKKLDPVASGWPTCLKAVAAVALLLKDADKLTLGQNVTVIASHSLESIVRQPPDRWMTNARMTHYQSLLLNERVSFAPPAVLNPATLLPVESEATPVHRCSEILAEETGTRRDLEDQPLPGVPTWYTDGSSFITEGKRRAGAPIVDGKRTVWASSLPEGTSAQKAELVALTQALRLAEGKNINIYTDSRYAFATAHIHGAIYKQRGLLTSAGKDIKNKEEILALLEAIHLPRRVAIIHCPGHQRGSNPVATGNRRADEAAKQAALSTRVLAGTTKPAGKRTADGSEFEKRTADGSEFESPKKKAKVE

SEQ ID NO: 1369 - protein, 2094 aa, synthetic construct
MPAAKRVKLDGGDKKYSIGLDIGTNSVGWAVITDEYKVPSKKFKVLGNTDRHSIKKNLIGALLFDSGETAEATRLKRTARRRYTRRKNRICYLQEIFSNEMAKVDDSFFHRLEESFLVEEDKKHERHPIFGNIVDEVAYHEKYPTIYHLRKKLVDSTDKADLRLIYLALAHMIKFRGHFLIEGDLNPDNSDVDKLFIQLVQTYNQLFEENPINASGVDAKAILSARLSKSRRLENLIAQLPGEKKNGLFGNLIALSLGLTPNFKSNFDLAEDAKLQLSKDTYDDDLDNLLAQIGDQYADLFLAAKNLSDAILLSDILRVNTEITKAPLSASMIKRYDEHHQDLTLLKALVRQQLPEKYKEIFFDQSKNGYAGYIDGGASQEEFYKFIKPILEKMDGTEELLVKLNREDLLRKQRTFDNGSIPHQIHLGELHAILRRQEDFYPFLKDNREKIEKILTFRIPYYVGPLARGNSRFAWMTRKSEETITPWNFEEVVDKGASAQSFIERMTNFDKNLPNEKVLPKHSLLYEYFTVYNELTKVKYVTEGMRKPAFLSGEQKKAIVDLLFKTNRKVTVKQLKEDYFKKIECFDSVEISGVEDRFNASLGTYHDLLKIIKDKDFLDNEENEDILEDIVLTLTLFEDREMIEERLKTYAHLFDDKVMKQLKRRRYTGWGRLSRKLINGIRDKQSGKTILDFLKSDGFANRNFMQLIHDDSLTFKEDIQKAQVSGQGDSLHEHIANLAGSPAIKKGILQTVKVVDELVKVMGRHKPENIVIEMARENQTTQKGQKNSRERMKRIEEGIKELGSQILKEHPVENTQLQNEKLYLYYLQNGRDMYVDQELDINRLSDYDVDHIVPQSFLKDDSIDNKVLTRSDKARGKSDNVPSEEVVKKMKNYWRQLLNAKLITQRKFDNLTKAERGGLSELDKAGFIKRQLVETRQITKHVAQILDSRMNTKYDENDKLIREVKVITLKSKLVSDFRKDFQFYKVREINNYHHAHDAYLNAVVGTALIKKYPKLESEFVYGDYKVYDVRKMIAKSEQEIGKATAKYFFYSNIMNFFKTEITLANGEIRKRPLIETNGETGEIVWDKGRDFATVRKVLSMPQVNIVKKTEVQTGGFSKESILPKRNSDKLIARKKDWDPKKYGGFDSPTVAYSVLVVAKVEKGKSKKLKSVKELLGITIMERSSFEKNPIDFLEAKGYKEVKKDLIIKLPKYSLFELENGRKRMLASAGELQKGNELALPSKYVNFLYLASHYEKLKGSPEDNEQKQLFVEQHKHYLDEIIEQISEFSKRVILADANLDKVLSAYNKHRDKPIREQAENIIHLFTLTNLGAPAAFKYFDTTIDRKRYTSTKEVLDATLIHQSITGLYETRIDLSQLGGDGGEAAAKGSSGGSGGVLNLEEEYRLHEKPVPSSIDPSWLQLFPTVWAERAGMGLANQVPPVVVELRSGASPVAVRQYPMSKEAREGIRPHIQKFLDLGVLVPCRSPWNTPLLPVKKPGTNDYRPVQDLREINKRVQDIHPTVPNPYNLLSSLPPSYTWYSVLDLKDAFFCLRLHPNSQPLFAFEWKDPEKGNTGQLTWTRLPQGFKNSPTLFDEALHRDLAPFRALNPQVVLLQYVDDLLVAAPTYEDCKKGTQKLLQELSKLGYRVSAKKAQLCQREVTYLGYLLKEGKRWLTPARKATVMKIPVPTTPRQVREFLGTAGFCRLWIPGFASLAAPLYPLTKESIPFIWTEEHQQAFDHIKKALLSAPALALPDLTKPFTLYIDERAGVARGVLTQTLGPWRRPVAYLSKKLDPVASGWPTCLKAVAAVALLLKDADKLTLGQNVTVIASHSLESIVRQPPDRWMTNARMTHYQSLLLNERVSFAPPAVLNPATLLPVESEATPVHRCSEILAEETGTRRDLEDQPLPGVPTWYTDGSSFITEGKRRAGAPIVDGKRTVWASSLPEGTSAQKAELVALTQALRLAEGKNINIYTDSRYAFATAHIHGAIYKQRGLLTSAGKDIKNKEEILALLEAIHLPRRVAIIHCPGHQRGSNPVATGNRRADEAAKQAALSTRVLAGTTKPAGKRTADGSEFEKRTADGSEFESPKKKAKVE

SEQ ID NO: 1370 - protein, 2129 aa, synthetic construct
MPAAKRVKLDGGDKKYSIGLDIGTNSVGWAVITDEYKVPSKKFKVLGNTDRHSIKKNLIGALLFDSGETAEATRLKRTARRRYTRRKNRICYLQEIFSNEMAKVDDSFFHRLEESFLVEEDKKHERHPIFGNIVDEVAYHEKYPTIYHLRKKLVDSTDKADLRLIYLALAHMIKFRGHFLIEGDLNPDNSDVDKLFIQLVQTYNQLFEENPINASGVDAKAILSARLSKSRRLENLIAQLPGEKKNGLFGNLIALSLGLTPNFKSNFDLAEDAKLQLSKDTYDDDLDNLLAQIGDQYADLFLAAKNLSDAILLSDILRVNTEITKAPLSASMIKRYDEHHQDLTLLKALVRQQLPEKYKEIFFDQSKNGYAGYIDGGASQEEFYKFIKPILEKMDGTEELLVKLNREDLLRKQRTFDNGSIPHQIHLGELHAILRRQEDFYPFLKDNREKIEKILTFRIPYYVGPLARGNSRFAWMTRKSEETITPWNFEEVVDKGASAQSFIERMTNFDKNLPNEKVLPKHSLLYEYFTVYNELTKVKYVTEGMRKPAFLSGEQKKAIVDLLFKTNRKVTVKQLKEDYFKKIECFDSVEISGVEDRFNASLGTYHDLLKIIKDKDFLDNEENEDILEDIVLTLTLFEDREMIEERLKTYAHLFDDKVMKQLKRRRYTGWGRLSRKLINGIRDKQSGKTILDFLKSDGFANRNFMQLIHDDSLTFKEDIQKAQVSGQGDSLHEHIANLAGSPAIKKGILQTVKVVDELVKVMGRHKPENIVIEMARENQTTQKGQKNSRERMKRIEEGIKELGSQILKEHPVENTQLQNEKLYLYYLQNGRDMYVDQELDINRLSDYDVDHIVPQSFLKDDSIDNKVLTRSDKARGKSDNVPSEEVVKKMKNYWRQLLNAKLITQRKFDNLTKAERGGLSELDKAGFIKRQLVETRQITKHVAQILDSRMNTKYDENDKLIREVKVITLKSKLVSDFRKDFQFYKVREINNYHHAHDAYLNAVVGTALIKKYPKLESEFVYGDYKVYDVRKMIAKSEQEIGKATAKYFFYSNIMNFFKTEITLANGEIRKRPLIETNGETGEIVWDKGRDFATVRKVLSMPQVNIVKKTEVQTGGFSKESILPKRNSDKLIARKKDWDPKKYGGFDSPTVAYSVLVVAKVEKGKSKKLKSVKELLGITIMERSSFEKNPIDFLEAKGYKEVKKDLIIKLPKYSLFELENGRKRMLASAGELQKGNELALPSKYVNFLYLASHYEKLKGSPEDNEQKQLFVEQHKHYLDEIIEQISEFSKRVILADANLDKVLSAYNKHRDKPIREQAENIIHLFTLTNLGAPAAFKYFDTTIDRKRYTSTKEVLDATLIHQSITGLYETRIDLSQLGGDGGAEAAAKEAAAKEAAAKEAAAKALEAEAAAKEAAAKEAAAKEAAAKAGGVLNLEEEYRLHEKPVPSSIDPSWLQLFPTVWAERAGMGLANQVPPVVVELRSGASPVAVRQYPMSKEAREGIRPHIQKFLDLGVLVPCRSPWNTPLLPVKKPGTNDYRPVQDLREINKRVQDIHPTVPNPYNLLSSLPPSYTWYSVLDLKDAFFCLRLHPNSQPLFAFEWKDPEKGNTGQLTWTRLPQGFKNSPTLFNEALHRDLAPFRALNPQVVLLQYVDDLLVAAPTYEDCKKGTQKLLQELSKLGYRVSAKKAQLCQREVTYLGYLLKEGKRWLTPARKATVMKIPVPTTPRQVREFLGTAGFCRLWIPGFASLAAPLYPLTKPSIPFIWTEEHQQAFDHIKKALLSAPALALPDLTKPFTLYIDERAGVARGVLTQTLGPWRRPVAYLSKKLDPVASGWPTCLKAVAAVALLLKDADKLTLGQNVTVIASHSLESIVRQPPDRWMTNARMTHYQSLLLNERVSFAPPAVLNPATLLPVESEATPVHRCSEILAEETGTRRDLEDQPLPGVPTWYTDGSSFITEGKRRAGAPIVDGKRTVWASSLPEGTSAQKAELVALTQALRLAEGKNINIYTDSRYAFATAHIHGAIYKQRGWLTSAGKDIKNKEEILALLEAIHLPRRVAIIHCPGHQRGSNPVATGNRRADEAAKQAALSTRVLAGTTKPAGKRTADGSEFEKRTADGSEFESPKKKAKVE

SEQ ID NO: 1371 - protein, 2098 aa, synthetic construct
MPAAKRVKLDGGDKKYSIGLDIGTNSVGWAVITDEYKVPSKKFKVLGNTDRHSIKKNLIGALLFDSGETAEATRLKRTARRRYTRRKNRICYLQEIFSNEMAKVDDSFFHRLEESFLVEEDKKHERHPIFGNIVDEVAYHEKYPTIYHLRKKLVDSTDKADLRLIYLALAHMIKFRGHFLIEGDLNPDNSDVDKLFIQLVQTYNQLFEENPINASGVDAKAILSARLSKSRRLENLIAQLPGEKKNGLFGNLIALSLGLTPNFKSNFDLAEDAKLQLSKDTYDDDLDNLLAQIGDQYADLFLAAKNLSDAILLSDILRVNTEITKAPLSASMIKRYDEHHQDLTLLKALVRQQLPEKYKEIFFDQSKNGYAGYIDGGASQEEFYKFIKPILEKMDGTEELLVKLNREDLLRKQRTFDNGSIPHQIHLGELHAILRRQEDFYPFLKDNREKIEKILTFRIPYYVGPLARGNSRFAWMTRKSEETITPWNFEEVVDKGASAQSFIERMTNFDKNLPNEKVLPKHSLLYEYFTVYNELTKVKYVTEGMRKPAFLSGEQKKAIVDLLFKTNRKVTVKQLKEDYFKKIECFDSVEISGVEDRFNASLGTYHDLLKIIKDKDFLDNEENEDILEDIVLTLTLFEDREMIEERLKTYAHLFDDKVMKQLKRRRYTGWGRLSRKLINGIRDKQSGKTILDFLKSDGFANRNFMQLIHDDSLTFKEDIQKAQVSGQGDSLHEHIANLAGSPAIKKGILQTVKVVDELVKVMGRHKPENIVIEMARENQTTQKGQKNSRERMKRIEEGIKELGSQILKEHPVENTQLQNEKLYLYYLQNGRDMYVDQELDINRLSDYDVDHIVPQSFLKDDSIDNKVLTRSDKARGKSDNVPSEEVVKKMKNYWRQLLNAKLITQRKFDNLTKAERGGLSELDKAGFIKRQLVETRQITKHVAQILDSRMNTKYDENDKLIREVKVITLKSKLVSDFRKDFQFYKVREINNYHHAHDAYLNAVVGTALIKKYPKLESEFVYGDYKVYDVRKMIAKSEQEIGKATAKYFFYSNIMNFFKTEITLANGEIRKRPLIETNGETGEIVWDKGRDFATVRKVLSMPQVNIVKKTEVQTGGFSKESILPKRNSDKLIARKKDWDPKKYGGFDSPTVAYSVLVVAKVEKGKSKKLKSVKELLGITIMERSSFEKNPIDFLEAKGYKEVKKDLIIKLPKYSLFELENGRKRMLASAGELQKGNELALPSKYVNFLYLASHYEKLKGSPEDNEQKQLFVEQHKHYLDEIIEQISEFSKRVILADANLDKVLSAYNKHRDKPIREQAENIIHLFTLTNLGAPAAFKYFDTTIDRKRYTSTKEVLDATLIHQSITGLYETRIDLSQLGGDGGPAPGGSEAAAKGGTAPLEEEYRLFLEAPIQNVTLLEQWKREIPKVWAEINPPGLASTQAPIHVQLLSTALPVRVRQYPITLEAKRSLRETIRKFRAAGILRPVHSPWNTPLLPVRKSGTSEYRMVQDLREVNKRVETIHPTVPNPYTLLSLLPPDRIWYSVLDLKDAFFCIPLAPESQLIFAFEWADAEEGESGQLTWTRLPQGFKNSPTLFNEALNRDLQGFRLDHPSVSLLQYVDDLLIAADTQAACLSATRDLLMTLAELGYRVSGKKAQLCQEEVTYLGFKIHKGSRSLSNSRTQAILQIPVPKTKRQVREFLGKIGYCRLFIPGFAELAQPLYAATRPGNDPLVWGEKEEEAFQSLKLALTQPPALALPSLDKPFQLFVEETSGAAKGVLTQALGPWKRPVAYLSKRLDPVAAGWPRCLRAIAAAALLTREASKLTFGQDIEITSSHNLESLLRSPPDKWLTNARITQYQVLLLDPPRVRFKQTAALNPATLLPETDDTLPIHHCLDTLDSLTSTRPDLTDQPLAQAEATLFTDGSSYIRDGKRYAGAAVVTLDSVIWAEPLPIGTSAQKAELIALTKALEWSKDKSVNIYTDSRYAFATLHVHGMIYRERGWLTAGGKAIKNAPEILALLTAVWLPKRVAVMHCKGHQKDDAPTSTGNRRADEVAREVAIRPLSTQATISAGKRTADGSEFEKRTADGSEFESPKKKAKVE

SEQ ID NO: 1372 - protein, 2133 aa, synthetic construct
MPAAKRVKLDGGDKKYSIGLDIGTNSVGWAVITDEYKVPSKKFKVLGNTDRHSIKKNLIGALLFDSGETAEATRLKRTARRRYTRRKNRICYLQEIFSNEMAKVDDSFFHRLEESFLVEEDKKHERHPIFGNIVDEVAYHEKYPTIYHLRKKLVDSTDKADLRLIYLALAHMIKFRGHFLIEGDLNPDNSDVDKLFIQLVQTYNQLFEENPINASGVDAKAILSARLSKSRRLENLIAQLPGEKKNGLFGNLIALSLGLTPNFKSNFDLAEDAKLQLSKDTYDDDLDNLLAQIGDQYADLFLAAKNLSDAILLSDILRVNTEITKAPLSASMIKRYDEHHQDLTLLKALVRQQLPEKYKEIFFDQSKNGYAGYIDGGASQEEFYKFIKPILEKMDGTEELLVKLNREDLLRKQRTFDNGSIPHQIHLGELHAILRRQEDFYPFLKDNREKIEKILTFRIPYYVGPLARGNSRFAWMTRKSEETITPWNFEEVVDKGASAQSFIERMTNFDKNLPNEKVLPKHSLLYEYFTVYNELTKVKYVTEGMRKPAFLSGEQKKAIVDLLFKTNRKVTVKQLKEDYFKKIECFDSVEISGVEDRFNASLGTYHDLLKIIKDKDFLDNEENEDILEDIVLTLTLFEDREMIEERLKTYAHLFDDKVMKQLKRRRYTGWGRLSRKLINGIRDKQSGKTILDFLKSDGFANRNFMQLIHDDSLTFKEDIQKAQVSGQGDSLHEHIANLAGSPAIKKGILQTVKVVDELVKVMGRHKPENIVIEMARENQTTQKGQKNSRERMKRIEEGIKELGSQILKEHPVENTQLQNEKLYLYYLQNGRDMYVDQELDINRLSDYDVDHIVPQSFLKDDSIDNKVLTRSDKARGKSDNVPSEEVVKKMKNYWRQLLNAKLITQRKFDNLTKAERGGLSELDKAGFIKRQLVETRQITKHVAQILDSRMNTKYDENDKLIREVKVITLKSKLVSDFRKDFQFYKVREINNYHHAHDAYLNAVVGTALIKKYPKLESEFVYGDYKVYDVRKMIAKSEQEIGKATAKYFFYSNIMNFFKTEITLANGEIRKRPLIETNGETGEIVWDKGRDFATVRKVLSMPQVNIVKKTEVQTGGFSKESILPKRNSDKLIARKKDWDPKKYGGFDSPTVAYSVLVVAKVEKGKSKKLKSVKELLGITIMERSSFEKNPIDFLEAKGYKEVKKDLIIKLPKYSLFELENGRKRMLASAGELQKGNELALPSKYVNFLYLASHYEKLKGSPEDNEQKQLFVEQHKHYLDEIIEQISEFSKRVILADANLDKVLSAYNKHRDKPIREQAENIIHLFTLTNLGAPAAFKYFDTTIDRKRYTSTKEVLDATLIHQSITGLYETRIDLSQLGGDGGAEAAAKEAAAKEAAAKEAAAKALEAEAAAKEAAAKEAAAKEAAAKAGGTAPLEEEYRLFLEAPIQNVTLLEQWKREIPKVWAEINPPGLASTQAPIHVQLLSTALPVRVRQYPITLEAKRSLRETIRKFRAAGILRPVHSPWNTPLLPVRKSGTSEYRMVQDLREVNKRVETIHPTVPNPYTLLSLLPPDRIWYSVLDLKDAFFCIPLAPESQLIFAFEWADAEEGESGQLTWTRLPQGFKNSPTLFNEALNRDLQGFRLDHPSVSLLQYVDDLLIAADTQAACLSATRDLLMTLAELGYRVSGKKAQLCQEEVTYLGFKIHKGSRSLSNSRTQAILQIPVPKTKRQVREFLGKIGYCRLFIPGFAELAQPLYAATRPGNDPLVWGEKEEEAFQSLKLALTQPPALALPSLDKPFQLFVEETSGAAKGVLTQALGPWKRPVAYLSKRLDPVAAGWPRCLRAIAAAALLTREASKLTFGQDIEITSSHNLESLLRSPPDKWLTNARITQYQVLLLDPPRVRFKQTAALNPATLLPETDDTLPIHHCLDTLDSLTSTRPDLTDQPLAQAEATLFTDGSSYIRDGKRYAGAAVVTLDSVIWAEPLPIGTSAQKAELIALTKALEWSKDKSVNIYTDSRYAFATLHVHGMIYRERGWLTAGGKAIKNAPEILALLTAVWLPKRVAVMHCKGHQKDDAPTSTGNRRADEVAREVAIRPLSTQATISAGKRTADGSEFEKRTADGSEFESPKKKAKVE

SEQ ID NO: 1373 - protein, 2117 aa, synthetic construct
MPAAKRVKLDGGDKKYSIGLDIGTNSVGWAVITDEYKVPSKKFKVLGNTDRHSIKKNLIGALLFDSGETAEATRLKRTARRRYTRRKNRICYLQEIFSNEMAKVDDSFFHRLEESFLVEEDKKHERHPIFGNIVDEVAYHEKYPTIYHLRKKLVDSTDKADLRLIYLALAHMIKFRGHFLIEGDLNPDNSDVDKLFIQLVQTYNQLFEENPINASGVDAKAILSARLSKSRRLENLIAQLPGEKKNGLFGNLIALSLGLTPNFKSNFDLAEDAKLQLSKDTYDDDLDNLLAQIGDQYADLFLAAKNLSDAILLSDILRVNTEITKAPLSASMIKRYDEHHQDLTLLKALVRQQLPEKYKEIFFDQSKNGYAGYIDGGASQEEFYKFIKPILEKMDGTEELLVKLNREDLLRKQRTFDNGSIPHQIHLGELHAILRRQEDFYPFLKDNREKIEKILTFRIPYYVGPLARGNSRFAWMTRKSEETITPWNFEEVVDKGASAQSFIERMTNFDKNLPNEKVLPKHSLLYEYFTVYNELTKVKYVTEGMRKPAFLSGEQKKAIVDLLFKTNRKVTVKQLKEDYFKKIECFDSVEISGVEDRFNASLGTYHDLLKIIKDKDFLDNEENEDILEDIVLTLTLFEDREMIEERLKTYAHLFDDKVMKQLKRRRYTGWGRLSRKLINGIRDKQSGKTILDFLKSDGFANRNFMQLIHDDSLTFKEDIQKAQVSGQGDSLHEHIANLAGSPAIKKGILQTVKVVDELVKVMGRHKPENIVIEMARENQTTQKGQKNSRERMKRIEEGIKELGSQILKEHPVENTQLQNEKLYLYYLQNGRDMYVDQELDINRLSDYDVDHIVPQSFLKDDSIDNKVLTRSDKARGKSDNVPSEEVVKKMKNYWRQLLNAKLITQRKFDNLTKAERGGLSELDKAGFIKRQLVETRQITKHVAQILDSRMNTKYDENDKLIREVKVITLKSKLVSDFRKDFQFYKVREINNYHHAHDAYLNAVVGTALIKKYPKLESEFVYGDYKVYDVRKMIAKSEQEIGKATAKYFFYSNIMNFFKTEITLANGEIRKRPLIETNGETGEIVWDKGRDFATVRKVLSMPQVNIVKKTEVQTGGFSKESILPKRNSDKLIARKKDWDPKKYGGFDSPTVAYSVLVVAKVEKGKSKKLKSVKELLGITIMERSSFEKNPIDFLEAKGYKEVKKDLIIKLPKYSLFELENGRKRMLASAGELQKGNELALPSKYVNFLYLASHYEKLKGSPEDNEQKQLFVEQHKHYLDEIIEQISEFSKRVILADANLDKVLSAYNKHRDKPIREQAENIIHLFTLTNLGAPAAFKYFDTTIDRKRYTSTKEVLDATLIHQSITGLYETRIDLSQLGGDGGGGGGSGGGGSGGGGSGGGGSGGGGSGGGGSGGTAPLEEEYRLFLEAPIQNVTLLEQWKREIPKVWAEINPPGLASTQAPIHVQLLSTALPVRVRQYPITLEAKRSLRETIRKFRAAGILRPVHSPWNTPLLPVRKSGTSEYRMVQDLREVNKRVETIHPTVPNPYTLLSLLPPDRIWYSVLDLKDAFFCIPLAPESQLIFAFEWADAEEGESGQLTWTRLPQGFKNSPTLFNEALNRDLQGFRLDHPSVSLLQYVDDLLIAADTQAACLSATRDLLMTLAELGYRVSGKKAQLCQEEVTYLGFKIHKGSRSLSNSRTQAILQIPVPKTKRQVREFLGKIGYCRLFIPGFAELAQPLYAATRPGNDPLVWGEKEEEAFQSLKLALTQPPALALPSLDKPFQLFVEETSGAAKGVLTQALGPWKRPVAYLSKRLDPVAAGWPRCLRAIAAAALLTREASKLTFGQDIEITSSHNLESLLRSPPDKWLTNARITQYQVLLLDPPRVRFKQTAALNPATLLPETDDTLPIHHCLDTLDSLTSTRPDLTDQPLAQAEATLFTDGSSYIRDGKRYAGAAVVTLDSVIWAEPLPIGTSAQKAELIALTKALEWSKDKSVNIYTDSRYAFATLHVHGMIYRERGWLTAGGKAIKNAPEILALLTAVWLPKRVAVMHCKGHQKDDAPTSTGNRRADEVAREVAIRPLSTQATISAGKRTADGSEFEKRTADGSEFESPKKKAKVE

SEQ ID NO: 1374 - protein, 2107 aa, synthetic construct
MPAAKRVKLDGGDKKYSIGLDIGTNSVGWAVITDEYKVPSKKFKVLGNTDRHSIKKNLIGALLFDSGETAEATRLKRTARRRYTRRKNRICYLQEIFSNEMAKVDDSFFHRLEESFLVEEDKKHERHPIFGNIVDEVAYHEKYPTIYHLRKKLVDSTDKADLRLIYLALAHMIKFRGHFLIEGDLNPDNSDVDKLFIQLVQTYNQLFEENPINASGVDAKAILSARLSKSRRLENLIAQLPGEKKNGLFGNLIALSLGLTPNFKSNFDLAEDAKLQLSKDTYDDDLDNLLAQIGDQYADLFLAAKNLSDAILLSDILRVNTEITKAPLSASMIKRYDEHHQDLTLLKALVRQQLPEKYKEIFFDQSKNGYAGYIDGGASQEEFYKFIKPILEKMDGTEELLVKLNREDLLRKQRTFDNGSIPHQIHLGELHAILRRQEDFYPFLKDNREKIEKILTFRIPYYVGPLARGNSRFAWMTRKSEETITPWNFEEVVDKGASAQSFIERMTNFDKNLPNEKVLPKHSLLYEYFTVYNELTKVKYVTEGMRKPAFLSGEQKKAIVDLLFKTNRKVTVKQLKEDYFKKIECFDSVEISGVEDRFNASLGTYHDLLKIIKDKDFLDNEENEDILEDIVLTLTLFEDREMIEERLKTYAHLFDDKVMKQLKRRRYTGWGRLSRKLINGIRDKQSGKTILDFLKSDGFANRNFMQLIHDDSLTFKEDIQKAQVSGQGDSLHEHIANLAGSPAIKKGILQTVKVVDELVKVMGRHKPENIVIEMARENQTTQKGQKNSRERMKRIEEGIKELGSQILKEHPVENTQLQNEKLYLYYLQNGRDMYVDQELDINRLSDYDVDHIVPQSFLKDDSIDNKVLTRSDKARGKSDNVPSEEVVKKMKNYWRQLLNAKLITQRKFDNLTKAERGGLSELDKAGFIKRQLVETRQITKHVAQILDSRMNTKYDENDKLIREVKVITLKSKLVSDFRKDFQFYKVREINNYHHAHDAYLNAVVGTALIKKYPKLESEFVYGDYKVYDVRKMIAKSEQEIGKATAKYFFYSNIMNFFKTEITLANGEIRKRPLIETNGETGEIVWDKGRDFATVRKVLSMPQVNIVKKTEVQTGGFSKESILPKRNSDKLIARKKDWDPKKYGGFDSPTVAYSVLVVAKVEKGKSKKLKSVKELLGITIMERSSFEKNPIDFLEAKGYKEVKKDLIIKLPKYSLFELENGRKRMLASAGELQKGNELALPSKYVNFLYLASHYEKLKGSPEDNEQKQLFVEQHKHYLDEIIEQISEFSKRVILADANLDKVLSAYNKHRDKPIREQAENIIHLFTLTNLGAPAAFKYFDTTIDRKRYTSTKEVLDATLIHQSITGLYETRIDLSQLGGDGGGGGGSGGGGSGGGGSGGGGSGGTAPLEEEYRLFLEAPIQNVTLLEQWKREIPKVWAEINPPGLASTQAPIHVQLLSTALPVRVRQYPITLEAKRSLRETIRKFRAAGILRPVHSPWNTPLLPVRKSGTSEYRMVQDLREVNKRVETIHPTVPNPYTLLSLLPPDRIWYSVLDLKDAFFCIPLAPESQLIFAFEWADAEEGESGQLTWTRLPQGFKNSPTLFNEALNRDLQGFRLDHPSVSLLQYVDDLLIAADTQAACLSATRDLLMTLAELGYRVSGKKAQLCQEEVTYLGFKIHKGSRSLSNSRTQAILQIPVPKTKRQVREFLGKIGYCRLFIPGFAELAQPLYAATRPGNDPLVWGEKEEEAFQSLKLALTQPPALALPSLDKPFQLFVEETSGAAKGVLTQALGPWKRPVAYLSKRLDPVAAGWPRCLRAIAAAALLTREASKLTFGQDIEITSSHNLESLLRSPPDKWLTNARITQYQVLLLDPPRVRFKQTAALNPATLLPETDDTLPIHHCLDTLDSLTSTRPDLTDQPLAQAEATLFTDGSSYIRDGKRYAGAAVVTLDSVIWAEPLPIGTSAQKAELIALTKALEWSKDKSVNIYTDSRYAFATLHVHGMIYRERGWLTAGGKAIKNAPEILALLTAVWLPKRVAVMHCKGHQKDDAPTSTGNRRADEVAREVAIRPLSTQATISAGKRTADGSEFEKRTADGSEFESPKKKAKVE

SEQ ID NO: 1375 - protein, 2093 aa, synthetic construct
MPAAKRVKLDGGDKKYSIGLDIGTNSVGWAVITDEYKVPSKKFKVLGNTDRHSIKKNLIGALLFDSGETAEATRLKRTARRRYTRRKNRICYLQEIFSNEMAKVDDSFFHRLEESFLVEEDKKHERHPIFGNIVDEVAYHEKYPTIYHLRKKLVDSTDKADLRLIYLALAHMIKFRGHFLIEGDLNPDNSDVDKLFIQLVQTYNQLFEENPINASGVDAKAILSARLSKSRRLENLIAQLPGEKKNGLFGNLIALSLGLTPNFKSNFDLAEDAKLQLSKDTYDDDLDNLLAQIGDQYADLFLAAKNLSDAILLSDILRVNTEITKAPLSASMIKRYDEHHQDLTLLKALVRQQLPEKYKEIFFDQSKNGYAGYIDGGASQEEFYKFIKPILEKMDGTEELLVKLNREDLLRKQRTFDNGSIPHQIHLGELHAILRRQEDFYPFLKDNREKIEKILTFRIPYYVGPLARGNSRFAWMTRKSEETITPWNFEEVVDKGASAQSFIERMTNFDKNLPNEKVLPKHSLLYEYFTVYNELTKVKYVTEGMRKPAFLSGEQKKAIVDLLFKTNRKVTVKQLKEDYFKKIECFDSVEISGVEDRFNASLGTYHDLLKIIKDKDFLDNEENEDILEDIVLTLTLFEDREMIEERLKTYAHLFDDKVMKQLKRRRYTGWGRLSRKLINGIRDKQSGKTILDFLKSDGFANRNFMQLIHDDSLTFKEDIQKAQVSGQGDSLHEHIANLAGSPAIKKGILQTVKVVDELVKVMGRHKPENIVIEMARENQTTQKGQKNSRERMKRIEEGIKELGSQILKEHPVENTQLQNEKLYLYYLQNGRDMYVDQELDINRLSDYDVDHIVPQSFLKDDSIDNKVLTRSDKARGKSDNVPSEEVVKKMKNYWRQLLNAKLITQRKFDNLTKAERGGLSELDKAGFIKRQLVETRQITKHVAQILDSRMNTKYDENDKLIREVKVITLKSKLVSDFRKDFQFYKVREINNYHHAHDAYLNAVVGTALIKKYPKLESEFVYGDYKVYDVRKMIAKSEQEIGKATAKYFFYSNIMNFFKTEITLANGEIRKRPLIETNGETGEIVWDKGRDFATVRKVLSMPQVNIVKKTEVQTGGFSKESILPKRNSDKLIARKKDWDPKKYGGFDSPTVAYSVLVVAKVEKGKSKKLKSVKELLGITIMERSSFEKNPIDFLEAKGYKEVKKDLIIKLPKYSLFELENGRKRMLASAGELQKGNELALPSKYVNFLYLASHYEKLKGSPEDNEQKQLFVEQHKHYLDEIIEQISEFSKRVILADANLDKVLSAYNKHRDKPIREQAENIIHLFTLTNLGAPAAFKYFDTTIDRKRYTSTKEVLDATLIHQSITGLYETRIDLSQLGGDGGGSSPAPGGTAPLEEEYRLFLEAPIQNVTLLEQWKREIPKVWAEINPPGLASTQAPIHVQLLSTALPVRVRQYPITLEAKRSLRETIRKFRAAGILRPVHSPWNTPLLPVRKSGTSEYRMVQDLREVNKRVETIHPTVPNPYTLLSLLPPDRIWYSVLDLKDAFFCIPLAPESQLIFAFEWADAEEGESGQLTWTRLPQGFKNSPTLFNEALNRDLQGFRLDHPSVSLLQYVDDLLIAADTQAACLSATRDLLMTLAELGYRVSGKKAQLCQEEVTYLGFKIHKGSRSLSNSRTQAILQIPVPKTKRQVREFLGKIGYCRLFIPGFAELAQPLYAATRPGNDPLVWGEKEEEAFQSLKLALTQPPALALPSLDKPFQLFVEETSGAAKGVLTQALGPWKRPVAYLSKRLDPVAAGWPRCLRAIAAAALLTREASKLTFGQDIEITSSHNLESLLRSPPDKWLTNARITQYQVLLLDPPRVRFKQTAALNPATLLPETDDTLPIHHCLDTLDSLTSTRPDLTDQPLAQAEATLFTDGSSYIRDGKRYAGAAVVTLDSVIWAEPLPIGTSAQKAELIALTKALEWSKDKSVNIYTDSRYAFATLHVHGMIYRERGWLTAGGKAIKNAPEILALLTAVWLPKRVAVMHCKGHQKDDAPTSTGNRRADEVAREVAIRPLSTQATISAGKRTADGSEFEKRTADGSEFESPKKKAKVE

SEQ ID NO: 1376 - protein, 2103 aa, synthetic construct
MPAAKRVKLDGGDKKYSIGLDIGTNSVGWAVITDEYKVPSKKFKVLGNTDRHSIKKNLIGALLFDSGETAEATRLKRTARRRYTRRKNRICYLQEIFSNEMAKVDDSFFHRLEESFLVEEDKKHERHPIFGNIVDEVAYHEKYPTIYHLRKKLVDSTDKADLRLIYLALAHMIKFRGHFLIEGDLNPDNSDVDKLFIQLVQTYNQLFEENPINASGVDAKAILSARLSKSRRLENLIAQLPGEKKNGLFGNLIALSLGLTPNFKSNFDLAEDAKLQLSKDTYDDDLDNLLAQIGDQYADLFLAAKNLSDAILLSDILRVNTEITKAPLSASMIKRYDEHHQDLTLLKALVRQQLPEKYKEIFFDQSKNGYAGYIDGGASQEEFYKFIKPILEKMDGTEELLVKLNREDLLRKQRTFDNGSIPHQIHLGELHAILRRQEDFYPFLKDNREKIEKILTFRIPYYVGPLARGNSRFAWMTRKSEETITPWNFEEVVDKGASAQSFIERMTNFDKNLPNEKVLPKHSLLYEYFTVYNELTKVKYVTEGMRKPAFLSGEQKKAIVDLLFKTNRKVTVKQLKEDYFKKIECFDSVEISGVEDRFNASLGTYHDLLKIIKDKDFLDNEENEDILEDIVLTLTLFEDREMIEERLKTYAHLFDDKVMKQLKRRRYTGWGRLSRKLINGIRDKQSGKTILDFLKSDGFANRNFMQLIHDDSLTFKEDIQKAQVSGQGDSLHEHIANLAGSPAIKKGILQTVKVVDELVKVMGRHKPENIVIEMARENQTTQKGQKNSRERMKRIEEGIKELGSQILKEHPVENTQLQNEKLYLYYLQNGRDMYVDQELDINRLSDYDVDHIVPQSFLKDDSIDNKVLTRSDKARGKSDNVPSEEVVKKMKNYWRQLLNAKLITQRKFDNLTKAERGGLSELDKAGFIKRQLVETRQITKHVAQILDSRMNTKYDENDKLIREVKVITLKSKLVSDFRKDFQFYKVREINNYHHAHDAYLNAVVGTALIKKYPKLESEFVYGDYKVYDVRKMIAKSEQEIGKATAKYFFYSNIMNFFKTEITLANGEIRKRPLIETNGETGEIVWDKGRDFATVRKVLSMPQVNIVKKTEVQTGGFSKESILPKRNSDKLIARKKDWDPKKYGGFDSPTVAYSVLVVAKVEKGKSKKLKSVKELLGITIMERSSFEKNPIDFLEAKGYKEVKKDLIIKLPKYSLFELENGRKRMLASAGELQKGNELALPSKYVNFLYLASHYEKLKGSPEDNEQKQLFVEQHKHYLDEIIEQISEFSKRVILADANLDKVLSAYNKHRDKPIREQAENIIHLFTLTNLGAPAAFKYFDTTIDRKRYTSTKEVLDATLIHQSITGLYETRIDLSQLGGDGGSGSETPGTSESATPESGGTAPLEEEYRLFLEAPIQNVTLLEQWKREIPKVWAEINPPGLASTQAPIHVQLLSTALPVRVRQYPITLEAKRSLRETIRKFRAAGILRPVHSPWNTPLLPVRKSGTSEYRMVQDLREVNKRVETIHPTVPNPYTLLSLLPPDRIWYSVLDLKDAFFCIPLAPESQLIFAFEWADAEEGESGQLTWTRLPQGFKNSPTLFNEALNRDLQGFRLDHPSVSLLQYVDDLLIAADTQAACLSATRDLLMTLAELGYRVSGKKAQLCQEEVTYLGFKIHKGSRSLSNSRTQAILQIPVPKTKRQVREFLGKIGYCRLFIPGFAELAQPLYAATRPGNDPLVWGEKEEEAFQSLKLALTQPPALALPSLDKPFQLFVEETSGAAKGVLTQALGPWKRPVAYLSKRLDPVAAGWPRCLRAIAAAALLTREASKLTFGQDIEITSSHNLESLLRSPPDKWLTNARITQYQVLLLDPPRVRFKQTAALNPATLLPETDDTLPIHHCLDTLDSLTSTRPDLTDQPLAQAEATLFTDGSSYIRDGKRYAGAAVVTLDSVIWAEPLPIGTSAQKAELIALTKALEWSKDKSVNIYTDSRYAFATLHVHGMIYRERGWLTAGGKAIKNAPEILALLTAVWLPKRVAVMHCKGHQKDDAPTSTGNRRADEVAREVAIRPLSTQATISAGKRTADGSEFEKRTADGSEFESPKKKAKVE

SEQ ID NO: 1377 - protein, 2098 aa, synthetic construct
MPAAKRVKLDGGDKKYSIGLDIGTNSVGWAVITDEYKVPSKKFKVLGNTDRHSIKKNLIGALLFDSGETAEATRLKRTARRRYTRRKNRICYLQEIFSNEMAKVDDSFFHRLEESFLVEEDKKHERHPIFGNIVDEVAYHEKYPTIYHLRKKLVDSTDKADLRLIYLALAHMIKFRGHFLIEGDLNPDNSDVDKLFIQLVQTYNQLFEENPINASGVDAKAILSARLSKSRRLENLIAQLPGEKKNGLFGNLIALSLGLTPNFKSNFDLAEDAKLQLSKDTYDDDLDNLLAQIGDQYADLFLAAKNLSDAILLSDILRVNTEITKAPLSASMIKRYDEHHQDLTLLKALVRQQLPEKYKEIFFDQSKNGYAGYIDGGASQEEFYKFIKPILEKMDGTEELLVKLNREDLLRKQRTFDNGSIPHQIHLGELHAILRRQEDFYPFLKDNREKIEKILTFRIPYYVGPLARGNSRFAWMTRKSEETITPWNFEEVVDKGASAQSFIERMTNFDKNLPNEKVLPKHSLLYEYFTVYNELTKVKYVTEGMRKPAFLSGEQKKAIVDLLFKTNRKVTVKQLKEDYFKKIECFDSVEISGVEDRFNASLGTYHDLLKIIKDKDFLDNEENEDILEDIVLTLTLFEDREMIEERLKTYAHLFDDKVMKQLKRRRYTGWGRLSRKLINGIRDKQSGKTILDFLKSDGFANRNFMQLIHDDSLTFKEDIQKAQVSGQGDSLHEHIANLAGSPAIKKGILQTVKVVDELVKVMGRHKPENIVIEMARENQTTQKGQKNSRERMKRIEEGIKELGSQILKEHPVENTQLQNEKLYLYYLQNGRDMYVDQELDINRLSDYDVDHIVPQSFLKDDSIDNKVLTRSDKARGKSDNVPSEEVVKKMKNYWRQLLNAKLITQRKFDNLTKAERGGLSELDKAGFIKRQLVETRQITKHVAQILDSRMNTKYDENDKLIREVKVITLKSKLVSDFRKDFQFYKVREINNYHHAHDAYLNAVVGTALIKKYPKLESEFVYGDYKVYDVRKMIAKSEQEIGKATAKYFFYSNIMNFFKTEITLANGEIRKRPLIETNGETGEIVWDKGRDFATVRKVLSMPQVNIVKKTEVQTGGFSKESILPKRNSDKLIARKKDWDPKKYGGFDSPTVAYSVLVVAKVEKGKSKKLKSVKELLGITIMERSSFEKNPIDFLEAKGYKEVKKDLIIKLPKYSLFELENGRKRMLASAGELQKGNELALPSKYVNFLYLASHYEKLKGSPEDNEQKQLFVEQHKHYLDEIIEQISEFSKRVILADANLDKVLSAYNKHRDKPIREQAENIIHLFTLTNLGAPAAFKYFDTTIDRKRYTSTKEVLDATLIHQSITGLYETRIDLSQLGGDGGPAPEAAAKGGSGGTAPLEEEYRLFLEAPIQNVTLLEQWKREIPKVWAEINPPGLASTQAPIHVQLLSTALPVRVRQYPITLEAKRSLRETIRKFRAAGILRPVHSPWNTPLLPVRKSGTSEYRMVQDLREVNKRVETIHPTVPNPYTLLSLLPPDRIWYSVLDLKDAFFCIPLAPESQLIFAFEWADAEEGESGQLTWTRLPQGFKNSPTLFNEALNRDLQGFRLDHPSVSLLQYVDDLLIAADTQAACLSATRDLLMTLAELGYRVSGKKAQLCQEEVTYLGFKIHKGSRSLSNSRTQAILQIPVPKTKRQVREFLGKIGYCRLFIPGFAELAQPLYAATRPGNDPLVWGEKEEEAFQSLKLALTQPPALALPSLDKPFQLFVEETSGAAKGVLTQALGPWKRPVAYLSKRLDPVAAGWPRCLRAIAAAALLTREASKLTFGQDIEITSSHNLESLLRSPPDKWLTNARITQYQVLLLDPPRVRFKQTAALNPATLLPETDDTLPIHHCLDTLDSLTSTRPDLTDQPLAQAEATLFTDGSSYIRDGKRYAGAAVVTLDSVIWAEPLPIGTSAQKAELIALTKALEWSKDKSVNIYTDSRYAFATLHVHGMIYRERGWLTAGGKAIKNAPEILALLTAVWLPKRVAVMHCKGHQKDDAPTSTGNRRADEVAREVAIRPLSTQATISAGKRTADGSEFEKRTADGSEFESPKKKAKVE

SEQ ID NO: 1378 - protein, 2092 aa, synthetic construct
MPAAKRVKLDGGDKKYSIGLDIGTNSVGWAVITDEYKVPSKKFKVLGNTDRHSIKKNLIGALLFDSGETAEATRLKRTARRRYTRRKNRICYLQEIFSNEMAKVDDSFFHRLEESFLVEEDKKHERHPIFGNIVDEVAYHEKYPTIYHLRKKLVDSTDKADLRLIYLALAHMIKFRGHFLIEGDLNPDNSDVDKLFIQLVQTYNQLFEENPINASGVDAKAILSARLSKSRRLENLIAQLPGEKKNGLFGNLIALSLGLTPNFKSNFDLAEDAKLQLSKDTYDDDLDNLLAQIGDQYADLFLAAKNLSDAILLSDILRVNTEITKAPLSASMIKRYDEHHQDLTLLKALVRQQLPEKYKEIFFDQSKNGYAGYIDGGASQEEFYKFIKPILEKMDGTEELLVKLNREDLLRKQRTFDNGSIPHQIHLGELHAILRRQEDFYPFLKDNREKIEKILTFRIPYYVGPLARGNSRFAWMTRKSEETITPWNFEEVVDKGASAQSFIERMTNFDKNLPNEKVLPKHSLLYEYFTVYNELTKVKYVTEGMRKPAFLSGEQKKAIVDLLFKTNRKVTVKQLKEDYFKKIECFDSVEISGVEDRFNASLGTYHDLLKIIKDKDFLDNEENEDILEDIVLTLTLFEDREMIEERLKTYAHLFDDKVMKQLKRRRYTGWGRLSRKLINGIRDKQSGKTILDFLKSDGFANRNFMQLIHDDSLTFKEDIQKAQVSGQGDSLHEHIANLAGSPAIKKGILQTVKVVDELVKVMGRHKPENIVIEMARENQTTQKGQKNSRERMKRIEEGIKELGSQILKEHPVENTQLQNEKLYLYYLQNGRDMYVDQELDINRLSDYDVDHIVPQSFLKDDSIDNKVLTRSDKARGKSDNVPSEEVVKKMKNYWRQLLNAKLITQRKFDNLTKAERGGLSELDKAGFIKRQLVETRQITKHVAQILDSRMNTKYDENDKLIREVKVITLKSKLVSDFRKDFQFYKVREINNYHHAHDAYLNAVVGTALIKKYPKLESEFVYGDYKVYDVRKMIAKSEQEIGKATAKYFFYSNIMNFFKTEITLANGEIRKRPLIETNGETGEIVWDKGRDFATVRKVLSMPQVNIVKKTEVQTGGFSKESILPKRNSDKLIARKKDWDPKKYGGFDSPTVAYSVLVVAKVEKGKSKKLKSVKELLGITIMERSSFEKNPIDFLEAKGYKEVKKDLIIKLPKYSLFELENGRKRMLASAGELQKGNELALPSKYVNFLYLASHYEKLKGSPEDNEQKQLFVEQHKHYLDEIIEQISEFSKRVILADANLDKVLSAYNKHRDKPIREQAENIIHLFTLTNLGAPAAFKYFDTTIDRKRYTSTKEVLDATLIHQSITGLYETRIDLSQLGGDGGPAPAPGGTAPLEEEYRLFLEAPIQNVTLLEQWKREIPKVWAEINPPGLASTQAPIHVQLLSTALPVRVRQYPITLEAKRSLRETIRKFRAAGILRPVHSPWNTPLLPVRKSGTSEYRMVQDLREVNKRVETIHPTVPNPYTLLSLLPPDRIWYSVLDLKDAFFCIPLAPESQLIFAFEWADAEEGESGQLTWTRLPQGFKNSPTLFNEALNRDLQGFRLDHPSVSLLQYVDDLLIAADTQAACLSATRDLLMTLAELGYRVSGKKAQLCQEEVTYLGFKIHKGSRSLSNSRTQAILQIPVPKTKRQVREFLGKIGYCRLFIPGFAELAQPLYAATRPGNDPLVWGEKEEEAFQSLKLALTQPPALALPSLDKPFQLFVEETSGAAKGVLTQALGPWKRPVAYLSKRLDPVAAGWPRCLRAIAAAALLTREASKLTFGQDIEITSSHNLESLLRSPPDKWLTNARITQYQVLLLDPPRVRFKQTAALNPATLLPETDDTLPIHHCLDTLDSLTSTRPDLTDQPLAQAEATLFTDGSSYIRDGKRYAGAAVVTLDSVIWAEPLPIGTSAQKAELIALTKALEWSKDKSVNIYTDSRYAFATLHVHGMIYRERGWLTAGGKAIKNAPEILALLTAVWLPKRVAVMHCKGHQKDDAPTSTGNRRADEVAREVAIRPLSTQATISAGKRTADGSEFEKRTADGSEFESPKKKAKVE

SEQ ID NO: 1379 - protein, 2098 aa, synthetic construct
MPAAKRVKLDGGDKKYSIGLDIGTNSVGWAVITDEYKVPSKKFKVLGNTDRHSIKKNLIGALLFDSGETAEATRLKRTARRRYTRRKNRICYLQEIFSNEMAKVDDSFFHRLEESFLVEEDKKHERHPIFGNIVDEVAYHEKYPTIYHLRKKLVDSTDKADLRLIYLALAHMIKFRGHFLIEGDLNPDNSDVDKLFIQLVQTYNQLFEENPINASGVDAKAILSARLSKSRRLENLIAQLPGEKKNGLFGNLIALSLGLTPNFKSNFDLAEDAKLQLSKDTYDDDLDNLLAQIGDQYADLFLAAKNLSDAILLSDILRVNTEITKAPLSASMIKRYDEHHQDLTLLKALVRQQLPEKYKEIFFDQSKNGYAGYIDGGASQEEFYKFIKPILEKMDGTEELLVKLNREDLLRKQRTFDNGSIPHQIHLGELHAILRRQEDFYPFLKDNREKIEKILTFRIPYYVGPLARGNSRFAWMTRKSEETITPWNFEEVVDKGASAQSFIERMTNFDKNLPNEKVLPKHSLLYEYFTVYNELTKVKYVTEGMRKPAFLSGEQKKAIVDLLFKTNRKVTVKQLKEDYFKKIECFDSVEISGVEDRFNASLGTYHDLLKIIKDKDFLDNEENEDILEDIVLTLTLFEDREMIEERLKTYAHLFDDKVMKQLKRRRYTGWGRLSRKLINGIRDKQSGKTILDFLKSDGFANRNFMQLIHDDSLTFKEDIQKAQVSGQGDSLHEHIANLAGSPAIKKGILQTVKVVDELVKVMGRHKPENIVIEMARENQTTQKGQKNSRERMKRIEEGIKELGSQILKEHPVENTQLQNEKLYLYYLQNGRDMYVDQELDINRLSDYDVDHIVPQSFLKDDSIDNKVLTRSDKARGKSDNVPSEEVVKKMKNYWRQLLNAKLITQRKFDNLTKAERGGLSELDKAGFIKRQLVETRQITKHVAQILDSRMNTKYDENDKLIREVKVITLKSKLVSDFRKDFQFYKVREINNYHHAHDAYLNAVVGTALIKKYPKLESEFVYGDYKVYDVRKMIAKSEQEIGKATAKYFFYSNIMNFFKTEITLANGEIRKRPLIETNGETGEIVWDKGRDFATVRKVLSMPQVNIVKKTEVQTGGFSKESILPKRNSDKLIARKKDWDPKKYGGFDSPTVAYSVLVVAKVEKGKSKKLKSVKELLGITIMERSSFEKNPIDFLEAKGYKEVKKDLIIKLPKYSLFELENGRKRMLASAGELQKGNELALPSKYVNFLYLASHYEKLKGSPEDNEQKQLFVEQHKHYLDEIIEQISEFSKRVILADANLDKVLSAYNKHRDKPIREQAENIIHLFTLTNLGAPAAFKYFDTTIDRKRYTSTKEVLDATLIHQSITGLYETRIDLSQLGGDGGGGGEAAAKGGSGGTAPLEEEYRLFLEAPIQNVTLLEQWKREIPKVWAEINPPGLASTQAPIHVQLLSTALPVRVRQYPITLEAKRSLRETIRKFRAAGILRPVHSPWNTPLLPVRKSGTSEYRMVQDLREVNKRVETIHPTVPNPYTLLSLLPPDRIWYSVLDLKDAFFCIPLAPESQLIFAFEWADAEEGESGQLTWTRLPQGFKNSPTLFNEALNRDLQGFRLDHPSVSLLQYVDDLLIAADTQAACLSATRDLLMTLAELGYRVSGKKAQLCQEEVTYLGFKIHKGSRSLSNSRTQAILQIPVPKTKRQVREFLGKIGYCRLFIPGFAELAQPLYAATRPGNDPLVWGEKEEEAFQSLKLALTQPPALALPSLDKPFQLFVEETSGAAKGVLTQALGPWKRPVAYLSKRLDPVAAGWPRCLRAIAAAALLTREASKLTFGQDIEITSSHNLESLLRSPPDKWLTNARITQYQVLLLDPPRVRFKQTAALNPATLLPETDDTLPIHHCLDTLDSLTSTRPDLTDQPLAQAEATLFTDGSSYIRDGKRYAGAAVVTLDSVIWAEPLPIGTSAQKAELIALTKALEWSKDKSVNIYTDSRYAFATLHVHGMIYRERGWLTAGGKAIKNAPEILALLTAVWLPKRVAVMHCKGHQKDDAPTSTGNRRADEVAREVAIRPLSTQATISAGKRTADGSEFEKRTADGSEFESPKKKAKVE

SEQ ID NO: 1380 - protein, 2092 aa, synthetic construct
MPAAKRVKLDGGDKKYSIGLDIGTNSVGWAVITDEYKVPSKKFKVLGNTDRHSIKKNLIGALLFDSGETAEATRLKRTARRRYTRRKNRICYLQEIFSNEMAKVDDSFFHRLEESFLVEEDKKHERHPIFGNIVDEVAYHEKYPTIYHLRKKLVDSTDKADLRLIYLALAHMIKFRGHFLIEGDLNPDNSDVDKLFIQLVQTYNQLFEENPINASGVDAKAILSARLSKSRRLENLIAQLPGEKKNGLFGNLIALSLGLTPNFKSNFDLAEDAKLQLSKDTYDDDLDNLLAQIGDQYADLFLAAKNLSDAILLSDILRVNTEITKAPLSASMIKRYDEHHQDLTLLKALVRQQLPEKYKEIFFDQSKNGYAGYIDGGASQEEFYKFIKPILEKMDGTEELLVKLNREDLLRKQRTFDNGSIPHQIHLGELHAILRRQEDFYPFLKDNREKIEKILTFRIPYYVGPLARGNSRFAWMTRKSEETITPWNFEEVVDKGASAQSFIERMTNFDKNLPNEKVLPKHSLLYEYFTVYNELTKVKYVTEGMRKPAFLSGEQKKAIVDLLFKTNRKVTVKQLKEDYFKKIECFDSVEISGVEDRFNASLGTYHDLLKIIKDKDFLDNEENEDILEDIVLTLTLFEDREMIEERLKTYAHLFDDKVMKQLKRRRYTGWGRLSRKLINGIRDKQSGKTILDFLKSDGFANRNFMQLIHDDSLTFKEDIQKAQVSGQGDSLHEHIANLAGSPAIKKGILQTVKVVDELVKVMGRHKPENIVIEMARENQTTQKGQKNSRERMKRIEEGIKELGSQILKEHPVENTQLQNEKLYLYYLQNGRDMYVDQELDINRLSDYDVDHIVPQSFLKDDSIDNKVLTRSDKARGKSDNVPSEEVVKKMKNYWRQLLNAKLITQRKFDNLTKAERGGLSELDKAGFIKRQLVETRQITKHVAQILDSRMNTKYDENDKLIREVKVITLKSKLVSDFRKDFQFYKVREINNYHHAHDAYLNAVVGTALIKKYPKLESEFVYGDYKVYDVRKMIAKSEQEIGKATAKYFFYSNIMNFFKTEITLANGEIRKRPLIETNGETGEIVWDKGRDFATVRKVLSMPQVNIVKKTEVQTGGFSKESILPKRNSDKLIARKKDWDPKKYGGFDSPTVAYSVLVVAKVEKGKSKKLKSVKELLGITIMERSSFEKNPIDFLEAKGYKEVKKDLIIKLPKYSLFELENGRKRMLASAGELQKGNELALPSKYVNFLYLASHYEKLKGSPEDNEQKQLFVEQHKHYLDEIIEQISEFSKRVILADANLDKVLSAYNKHRDKPIREQAENIIHLFTLTNLGAPAAFKYFDTTIDRKRYTSTKEVLDATLIHQSITGLYETRIDLSQLGGDGGEAAAKGGTAPLEEEYRLFLEAPIQNVTLLEQWKREIPKVWAEINPPGLASTQAPIHVQLLSTALPVRVRQYPITLEAKRSLRETIRKFRAAGILRPVHSPWNTPLLPVRKSGTSEYRMVQDLREVNKRVETIHPTVPNPYTLLSLLPPDRIWYSVLDLKDAFFCIPLAPESQLIFAFEWADAEEGESGQLTWTRLPQGFKNSPTLFNEALNRDLQGFRLDHPSVSLLQYVDDLLIAADTQAACLSATRDLLMTLAELGYRVSGKKAQLCQEEVTYLGFKIHKGSRSLSNSRTQAILQIPVPKTKRQVREFLGKIGYCRLFIPGFAELAQPLYAATRPGNDPLVWGEKEEEAFQSLKLALTQPPALALPSLDKPFQLFVEETSGAAKGVLTQALGPWKRPVAYLSKRLDPVAAGWPRCLRAIAAAALLTREASKLTFGQDIEITSSHNLESLLRSPPDKWLTNARITQYQVLLLDPPRVRFKQTAALNPATLLPETDDTLPIHHCLDTLDSLTSTRPDLTDQPLAQAEATLFTDGSSYIRDGKRYAGAAVVTLDSVIWAEPLPIGTSAQKAELIALTKALEWSKDKSVNIYTDSRYAFATLHVHGMIYRERGWLTAGGKAIKNAPEILALLTAVWLPKRVAVMHCKGHQKDDAPTSTGNRRADEVAREVAIRPLSTQATISAGKRTADGSEFEKRTADGSEFESPKKKAKVE

SEQ ID NO: 1381 - protein, 2098 aa, synthetic construct
MPAAKRVKLDGGDKKYSIGLDIGTNSVGWAVITDEYKVPSKKFKVLGNTDRHSIKKNLIGALLFDSGETAEATRLKRTARRRYTRRKNRICYLQEIFSNEMAKVDDSFFHRLEESFLVEEDKKHERHPIFGNIVDEVAYHEKYPTIYHLRKKLVDSTDKADLRLIYLALAHMIKFRGHFLIEGDLNPDNSDVDKLFIQLVQTYNQLFEENPINASGVDAKAILSARLSKSRRLENLIAQLPGEKKNGLFGNLIALSLGLTPNFKSNFDLAEDAKLQLSKDTYDDDLDNLLAQIGDQYADLFLAAKNLSDAILLSDILRVNTEITKAPLSASMIKRYDEHHQDLTLLKALVRQQLPEKYKEIFFDQSKNGYAGYIDGGASQEEFYKFIKPILEKMDGTEELLVKLNREDLLRKQRTFDNGSIPHQIHLGELHAILRRQEDFYPFLKDNREKIEKILTFRIPYYVGPLARGNSRFAWMTRKSEETITPWNFEEVVDKGASAQSFIERMTNFDKNLPNEKVLPKHSLLYEYFTVYNELTKVKYVTEGMRKPAFLSGEQKKAIVDLLFKTNRKVTVKQLKEDYFKKIECFDSVEISGVEDRFNASLGTYHDLLKIIKDKDFLDNEENEDILEDIVLTLTLFEDREMIEERLKTYAHLFDDKVMKQLKRRRYTGWGRLSRKLINGIRDKQSGKTILDFLKSDGFANRNFMQLIHDDSLTFKEDIQKAQVSGQGDSLHEHIANLAGSPAIKKGILQTVKVVDELVKVMGRHKPENIVIEMARENQTTQKGQKNSRERMKRIEEGIKELGSQILKEHPVENTQLQNEKLYLYYLQNGRDMYVDQELDINRLSDYDVDHIVPQSFLKDDSIDNKVLTRSDKARGKSDNVPSEEVVKKMKNYWRQLLNAKLITQRKFDNLTKAERGGLSELDKAGFIKRQLVETRQITKHVAQILDSRMNTKYDENDKLIREVKVITLKSKLVSDFRKDFQFYKVREINNYHHAHDAYLNAVVGTALIKKYPKLESEFVYGDYKVYDVRKMIAKSEQEIGKATAKYFFYSNIMNFFKTEITLANGEIRKRPLIETNGETGEIVWDKGRDFATVRKVLSMPQVNIVKKTEVQTGGFSKESILPKRNSDKLIARKKDWDPKKYGGFDSPTVAYSVLVVAKVEKGKSKKLKSVKELLGITIMERSSFEKNPIDFLEAKGYKEVKKDLIIKLPKYSLFELENGRKRMLASAGELQKGNELALPSKYVNFLYLASHYEKLKGSPEDNEQKQLFVEQHKHYLDEIIEQISEFSKRVILADANLDKVLSAYNKHRDKPIREQAENIIHLFTLTNLGAPAAFKYFDTTIDRKRYTSTKEVLDATLIHQSITGLYETRIDLSQLGGDGGGSSEAAAKPAPGGTAPLEEEYRLFLEAPIQNVTLLEQWKREIPKVWAEINPPGLASTQAPIHVQLLSTALPVRVRQYPITLEAKRSLRETIRKFRAAGILRPVHSPWNTPLLPVRKSGTSEYRMVQDLREVNKRVETIHPTVPNPYTLLSLLPPDRIWYSVLDLKDAFFCIPLAPESQLIFAFEWADAEEGESGQLTWTRLPQGFKNSPTLFNEALNRDLQGFRLDHPSVSLLQYVDDLLIAADTQAACLSATRDLLMTLAELGYRVSGKKAQLCQEEVTYLGFKIHKGSRSLSNSRTQAILQIPVPKTKRQVREFLGKIGYCRLFIPGFAELAQPLYAATRPGNDPLVWGEKEEEAFQSLKLALTQPPALALPSLDKPFQLFVEETSGAAKGVLTQALGPWKRPVAYLSKRLDPVAAGWPRCLRAIAAAALLTREASKLTFGQDIEITSSHNLESLLRSPPDKWLTNARITQYQVLLLDPPRVRFKQTAALNPATLLPETDDTLPIHHCLDTLDSLTSTRPDLTDQPLAQAEATLFTDGSSYIRDGKRYAGAAVVTLDSVIWAEPLPIGTSAQKAELIALTKALEWSKDKSVNIYTDSRYAFATLHVHGMIYRERGWLTAGGKAIKNAPEILALLTAVWLPKRVAVMHCKGHQKDDAPTSTGNRRADEVAREVAIRPLSTQATISAGKRTADGSEFEKRTADGSEFESPKKKAKVE

SEQ ID NO: 1382 - protein, 2105 aa, synthetic construct
MPAAKRVKLDGGDKKYSIGLDIGTNSVGWAVITDEYKVPSKKFKVLGNTDRHSIKKNLIGALLFDSGETAEATRLKRTARRRYTRRKNRICYLQEIFSNEMAKVDDSFFHRLEESFLVEEDKKHERHPIFGNIVDEVAYHEKYPTIYHLRKKLVDSTDKADLRLIYLALAHMIKFRGHFLIEGDLNPDNSDVDKLFIQLVQTYNQLFEENPINASGVDAKAILSARLSKSRRLENLIAQLPGEKKNGLFGNLIALSLGLTPNFKSNFDLAEDAKLQLSKDTYDDDLDNLLAQIGDQYADLFLAAKNLSDAILLSDILRVNTEITKAPLSASMIKRYDEHHQDLTLLKALVRQQLPEKYKEIFFDQSKNGYAGYIDGGASQEEFYKFIKPILEKMDGTEELLVKLNREDLLRKQRTFDNGSIPHQIHLGELHAILRRQEDFYPFLKDNREKIEKILTFRIPYYVGPLARGNSRFAWMTRKSEETITPWNFEEVVDKGASAQSFIERMTNFDKNLPNEKVLPKHSLLYEYFTVYNELTKVKYVTEGMRKPAFLSGEQKKAIVDLLFKTNRKVTVKQLKEDYFKKIECFDSVEISGVEDRFNASLGTYHDLLKIIKDKDFLDNEENEDILEDIVLTLTLFEDREMIEERLKTYAHLFDDKVMKQLKRRRYTGWGRLSRKLINGIRDKQSGKTILDFLKSDGFANRNFMQLIHDDSLTFKEDIQKAQVSGQGDSLHEHIANLAGSPAIKKGILQTVKVVDELVKVMGRHKPENIVIEMARENQTTQKGQKNSRERMKRIEEGIKELGSQILKEHPVENTQLQNEKLYLYYLQNGRDMYVDQELDINRLSDYDVDHIVPQSFLKDDSIDNKVLTRSDKARGKSDNVPSEEVVKKMKNYWRQLLNAKLITQRKFDNLTKAERGGLSELDKAGFIKRQLVETRQITKHVAQILDSRMNTKYDENDKLIREVKVITLKSKLVSDFRKDFQFYKVREINNYHHAHDAYLNAVVGTALIKKYPKLESEFVYGDYKVYDVRKMIAKSEQEIGKATAKYFFYSNIMNFFKTEITLANGEIRKRPLIETNGETGEIVWDKGRDFATVRKVLSMPQVNIVKKTEVQTGGFSKESILPKRNSDKLIARKKDWDPKKYGGFDSPTVAYSVLVVAKVEKGKSKKLKSVKELLGITIMERSSFEKNPIDFLEAKGYKEVKKDLIIKLPKYSLFELENGRKRMLASAGELQKGNELALPSKYVNFLYLASHYEKLKGSPEDNEQKQLFVEQHKHYLDEIIEQISEFSKRVILADANLDKVLSAYNKHRDKPIREQAENIIHLFTLTNLGAPAAFKYFDTTIDRKRYTSTKEVLDATLIHQSITGLYETRIDLSQLGGDGGGSSGSSGSSGSSGSSGSSGGTAPLEEEYRLFLEAPIQNVTLLEQWKREIPKVWAEINPPGLASTQAPIHVQLLSTALPVRVRQYPITLEAKRSLRETIRKFRAAGILRPVHSPWNTPLLPVRKSGTSEYRMVQDLREVNKRVETIHPTVPNPYTLLSLLPPDRIWYSVLDLKDAFFCIPLAPESQLIFAFEWADAEEGESGQLTWTRLPQGFKNSPTLFNEALNRDLQGFRLDHPSVSLLQYVDDLLIAADTQAACLSATRDLLMTLAELGYRVSGKKAQLCQEEVTYLGFKIHKGSRSLSNSRTQAILQIPVPKTKRQVREFLGKIGYCRLFIPGFAELAQPLYAATRPGNDPLVWGEKEEEAFQSLKLALTQPPALALPSLDKPFQLFVEETSGAAKGVLTQALGPWKRPVAYLSKRLDPVAAGWPRCLRAIAAAALLTREASKLTFGQDIEITSSHNLESLLRSPPDKWLTNARITQYQVLLLDPPRVRFKQTAALNPATLLPETDDTLPIHHCLDTLDSLTSTRPDLTDQPLAQAEATLFTDGSSYIRDGKRYAGAAVVTLDSVIWAEPLPIGTSAQKAELIALTKALEWSKDKSVNIYTDSRYAFATLHVHGMIYRERGWLTAGGKAIKNAPEILALLTAVWLPKRVAVMHCKGHQKDDAPTSTGNRRADEVAREVAIRPLSTQATISAGKRTADGSEFEKRTADGSEFESPKKKAKVE

SEQ ID NO: 1383 - protein, 2096 aa, synthetic construct
MPAAKRVKLDGGDKKYSIGLDIGTNSVGWAVITDEYKVPSKKFKVLGNTDRHSIKKNLIGALLFDSGETAEATRLKRTARRRYTRRKNRICYLQEIFSNEMAKVDDSFFHRLEESFLVEEDKKHERHPIFGNIVDEVAYHEKYPTIYHLRKKLVDSTDKADLRLIYLALAHMIKFRGHFLIEGDLNPDNSDVDKLFIQLVQTYNQLFEENPINASGVDAKAILSARLSKSRRLENLIAQLPGEKKNGLFGNLIALSLGLTPNFKSNFDLAEDAKLQLSKDTYDDDLDNLLAQIGDQYADLFLAAKNLSDAILLSDILRVNTEITKAPLSASMIKRYDEHHQDLTLLKALVRQQLPEKYKEIFFDQSKNGYAGYIDGGASQEEFYKFIKPILEKMDGTEELLVKLNREDLLRKQRTFDNGSIPHQIHLGELHAILRRQEDFYPFLKDNREKIEKILTFRIPYYVGPLARGNSRFAWMTRKSEETITPWNFEEVVDKGASAQSFIERMTNFDKNLPNEKVLPKHSLLYEYFTVYNELTKVKYVTEGMRKPAFLSGEQKKAIVDLLFKTNRKVTVKQLKEDYFKKIECFDSVEISGVEDRFNASLGTYHDLLKIIKDKDFLDNEENEDILEDIVLTLTLFEDREMIEERLKTYAHLFDDKVMKQLKRRRYTGWGRLSRKLINGIRDKQSGKTILDFLKSDGFANRNFMQLIHDDSLTFKEDIQKAQVSGQGDSLHEHIANLAGSPAIKKGILQTVKVVDELVKVMGRHKPENIVIEMARENQTTQKGQKNSRERMKRIEEGIKELGSQILKEHPVENTQLQNEKLYLYYLQNGRDMYVDQELDINRLSDYDVDHIVPQSFLKDDSIDNKVLTRSDKARGKSDNVPSEEVVKKMKNYWRQLLNAKLITQRKFDNLTKAERGGLSELDKAGFIKRQLVETRQITKHVAQILDSRMNTKYDENDKLIREVKVITLKSKLVSDFRKDFQFYKVREINNYHHAHDAYLNAVVGTALIKKYPKLESEFVYGDYKVYDVRKMIAKSEQEIGKATAKYFFYSNIMNFFKTEITLANGEIRKRPLIETNGETGEIVWDKGRDFATVRKVLSMPQVNIVKKTEVQTGGFSKESILPKRNSDKLIARKKDWDPKKYGGFDSPTVAYSVLVVAKVEKGKSKKLKSVKELLGITIMERSSFEKNPIDFLEAKGYKEVKKDLIIKLPKYSLFELENGRKRMLASAGELQKGNELALPSKYVNFLYLASHYEKLKGSPEDNEQKQLFVEQHKHYLDEIIEQISEFSKRVILADANLDKVLSAYNKHRDKPIREQAENIIHLFTLTNLGAPAAFKYFDTTIDRKRYTSTKEVLDATLIHQSITGLYETRIDLSQLGGDGGGGSPAPGGGGGTAPLEEEYRLFLEAPIQNVTLLEQWKREIPKVWAEINPPGLASTQAPIHVQLLSTALPVRVRQYPITLEAKRSLRETIRKFRAAGILRPVHSPWNTPLLPVRKSGTSEYRMVQDLREVNKRVETIHPTVPNPYTLLSLLPPDRIWYSVLDLKDAFFCIPLAPESQLIFAFEWADAEEGESGQLTWTRLPQGFKNSPTLFNEALNRDLQGFRLDHPSVSLLQYVDDLLIAADTQAACLSATRDLLMTLAELGYRVSGKKAQLCQEEVTYLGFKIHKGSRSLSNSRTQAILQIPVPKTKRQVREFLGKIGYCRLFIPGFAELAQPLYAATRPGNDPLVWGEKEEEAFQSLKLALTQPPALALPSLDKPFQLFVEETSGAAKGVLTQALGPWKRPVAYLSKRLDPVAAGWPRCLRAIAAAALLTREASKLTFGQDIEITSSHNLESLLRSPPDKWLTNARITQYQVLLLDPPRVRFKQTAALNPATLLPETDDTLPIHHCLDTLDSLTSTRPDLTDQPLAQAEATLFTDGSSYIRDGKRYAGAAVVTLDSVIWAEPLPIGTSAQKAELIALTKALEWSKDKSVNIYTDSRYAFATLHVHGMIYRERGWLTAGGKAIKNAPEILALLTAVWLPKRVAVMHCKGHQKDDAPTSTGNRRADEVAREVAIRPLSTQATISAGKRTADGSEFEKRTADGSEFESPKKKAKVE

SEQ ID NO: 1384 - protein, 2098 aa, synthetic construct
MPAAKRVKLDGGDKKYSIGLDIGTNSVGWAVITDEYKVPSKKFKVLGNTDRHSIKKNLIGALLFDSGETAEATRLKRTARRRYTRRKNRICYLQEIFSNEMAKVDDSFFHRLEESFLVEEDKKHERHPIFGNIVDEVAYHEKYPTIYHLRKKLVDSTDKADLRLIYLALAHMIKFRGHFLIEGDLNPDNSDVDKLFIQLVQTYNQLFEENPINASGVDAKAILSARLSKSRRLENLIAQLPGEKKNGLFGNLIALSLGLTPNFKSNFDLAEDAKLQLSKDTYDDDLDNLLAQIGDQYADLFLAAKNLSDAILLSDILRVNTEITKAPLSASMIKRYDEHHQDLTLLKALVRQQLPEKYKEIFFDQSKNGYAGYIDGGASQEEFYKFIKPILEKMDGTEELLVKLNREDLLRKQRTFDNGSIPHQIHLGELHAILRRQEDFYPFLKDNREKIEKILTFRIPYYVGPLARGNSRFAWMTRKSEETITPWNFEEVVDKGASAQSFIERMTNFDKNLPNEKVLPKHSLLYEYFTVYNELTKVKYVTEGMRKPAFLSGEQKKAIVDLLFKTNRKVTVKQLKEDYFKKIECFDSVEISGVEDRFNASLGTYHDLLKIIKDKDFLDNEENEDILEDIVLTLTLFEDREMIEERLKTYAHLFDDKVMKQLKRRRYTGWGRLSRKLINGIRDKQSGKTILDFLKSDGFANRNFMQLIHDDSLTFKEDIQKAQVSGQGDSLHEHIANLAGSPAIKKGILQTVKVVDELVKVMGRHKPENIVIEMARENQTTQKGQKNSRERMKRIEEGIKELGSQILKEHPVENTQLQNEKLYLYYLQNGRDMYVDQELDINRLSDYDVDHIVPQSFLKDDSIDNKVLTRSDKARGKSDNVPSEEVVKKMKNYWRQLLNAKLITQRKFDNLTKAERGGLSELDKAGFIKRQLVETRQITKHVAQILDSRMNTKYDENDKLIREVKVITLKSKLVSDFRKDFQFYKVREINNYHHAHDAYLNAVVGTALIKKYPKLESEFVYGDYKVYDVRKMIAKSEQEIGKATAKYFFYSNIMNFFKTEITLANGEIRKRPLIETNGETGEIVWDKGRDFATVRKVLSMPQVNIVKKTEVQTGGFSKESILPKRNSDKLIARKKDWDPKKYGGFDSPTVAYSVLVVAKVEKGKSKKLKSVKELLGITIMERSSFEKNPIDFLEAKGYKEVKKDLIIKLPKYSLFELENGRKRMLASAGELQKGNELALPSKYVNFLYLASHYEKLKGSPEDNEQKQLFVEQHKHYLDEIIEQISEFSKRVILADANLDKVLSAYNKHRDKPIREQAENIIHLFTLTNLGAPAAFKYFDTTIDRKRYTSTKEVLDATLIHQSITGLYETRIDLSQLGGDGGGGGEAAAKPAPGGTAPLEEEYRLFLEAPIQNVTLLEQWKREIPKVWAEINPPGLASTQAPIHVQLLSTALPVRVRQYPITLEAKRSLRETIRKFRAAGILRPVHSPWNTPLLPVRKSGTSEYRMVQDLREVNKRVETIHPTVPNPYTLLSLLPPDRIWYSVLDLKDAFFCIPLAPESQLIFAFEWADAEEGESGQLTWTRLPQGFKNSPTLFNEALNRDLQGFRLDHPSVSLLQYVDDLLIAADTQAACLSATRDLLMTLAELGYRVSGKKAQLCQEEVTYLGFKIHKGSRSLSNSRTQAILQIPVPKTKRQVREFLGKIGYCRLFIPGFAELAQPLYAATRPGNDPLVWGEKEEEAFQSLKLALTQPPALALPSLDKPFQLFVEETSGAAKGVLTQALGPWKRPVAYLSKRLDPVAAGWPRCLRAIAAAALLTREASKLTFGQDIEITSSHNLESLLRSPPDKWLTNARITQYQVLLLDPPRVRFKQTAALNPATLLPETDDTLPIHHCLDTLDSLTSTRPDLTDQPLAQAEATLFTDGSSYIRDGKRYAGAAVVTLDSVIWAEPLPIGTSAQKAELIALTKALEWSKDKSVNIYTDSRYAFATLHVHGMIYRERGWLTAGGKAIKNAPEILALLTAVWLPKRVAVMHCKGHQKDDAPTSTGNRRADEVAREVAIRPLSTQATISAGKRTADGSEFEKRTADGSEFESPKKKAKVE

SEQ ID NO: 1385 - protein, 2096 aa, synthetic construct
MPAAKRVKLDGGDKKYSIGLDIGTNSVGWAVITDEYKVPSKKFKVLGNTDRHSIKKNLIGALLFDSGETAEATRLKRTARRRYTRRKNRICYLQEIFSNEMAKVDDSFFHRLEESFLVEEDKKHERHPIFGNIVDEVAYHEKYPTIYHLRKKLVDSTDKADLRLIYLALAHMIKFRGHFLIEGDLNPDNSDVDKLFIQLVQTYNQLFEENPINASGVDAKAILSARLSKSRRLENLIAQLPGEKKNGLFGNLIALSLGLTPNFKSNFDLAEDAKLQLSKDTYDDDLDNLLAQIGDQYADLFLAAKNLSDAILLSDILRVNTEITKAPLSASMIKRYDEHHQDLTLLKALVRQQLPEKYKEIFFDQSKNGYAGYIDGGASQEEFYKFIKPILEKMDGTEELLVKLNREDLLRKQRTFDNGSIPHQIHLGELHAILRRQEDFYPFLKDNREKIEKILTFRIPYYVGPLARGNSRFAWMTRKSEETITPWNFEEVVDKGASAQSFIERMTNFDKNLPNEKVLPKHSLLYEYFTVYNELTKVKYVTEGMRKPAFLSGEQKKAIVDLLFKTNRKVTVKQLKEDYFKKIECFDSVEISGVEDRFNASLGTYHDLLKIIKDKDFLDNEENEDILEDIVLTLTLFEDREMIEERLKTYAHLFDDKVMKQLKRRRYTGWGRLSRKLINGIRDKQSGKTILDFLKSDGFANRNFMQLIHDDSLTFKEDIQKAQVSGQGDSLHEHIANLAGSPAIKKGILQTVKVVDELVKVMGRHKPENIVIEMARENQTTQKGQKNSRERMKRIEEGIKELGSQILKEHPVENTQLQNEKLYLYYLQNGRDMYVDQELDINRLSDYDVDHIVPQSFLKDDSIDNKVLTRSDKARGKSDNVPSEEVVKKMKNYWRQLLNAKLITQRKFDNLTKAERGGLSELDKAGFIKRQLVETRQITKHVAQILDSRMNTKYDENDKLIREVKVITLKSKLVSDFRKDFQFYKVREINNYHHAHDAYLNAVVGTALIKKYPKLESEFVYGDYKVYDVRKMIAKSEQEIGKATAKYFFYSNIMNFFKTEITLANGEIRKRPLIETNGETGEIVWDKGRDFATVRKVLSMPQVNIVKKTEVQTGGFSKESILPKRNSDKLIARKKDWDPKKYGGFDSPTVAYSVLVVAKVEKGKSKKLKSVKELLGITIMERSSFEKNPIDFLEAKGYKEVKKDLIIKLPKYSLFELENGRKRMLASAGELQKGNELALPSKYVNFLYLASHYEKLKGSPEDNEQKQLFVEQHKHYLDEIIEQISEFSKRVILADANLDKVLSAYNKHRDKPIREQAENIIHLFTLTNLGAPAAFKYFDTTIDRKRYTSTKEVLDATLIHQSITGLYETRIDLSQLGGDGGPAPGGSGSSGGTAPLEEEYRLFLEAPIQNVTLLEQWKREIPKVWAEINPPGLASTQAPIHVQLLSTALPVRVRQYPITLEAKRSLRETIRKFRAAGILRPVHSPWNTPLLPVRKSGTSEYRMVQDLREVNKRVETIHPTVPNPYTLLSLLPPDRIWYSVLDLKDAFFCIPLAPESQLIFAFEWADAEEGESGQLTWTRLPQGFKNSPTLFNEALNRDLQGFRLDHPSVSLLQYVDDLLIAADTQAACLSATRDLLMTLAELGYRVSGKKAQLCQEEVTYLGFKIHKGSRSLSNSRTQAILQIPVPKTKRQVREFLGKIGYCRLFIPGFAELAQPLYAATRPGNDPLVWGEKEEEAFQSLKLALTQPPALALPSLDKPFQLFVEETSGAAKGVLTQALGPWKRPVAYLSKRLDPVAAGWPRCLRAIAAAALLTREASKLTFGQDIEITSSHNLESLLRSPPDKWLTNARITQYQVLLLDPPRVRFKQTAALNPATLLPETDDTLPIHHCLDTLDSLTSTRPDLTDQPLAQAEATLFTDGSSYIRDGKRYAGAAVVTLDSVIWAEPLPIGTSAQKAELIALTKALEWSKDKSVNIYTDSRYAFATLHVHGMIYRERGWLTAGGKAIKNAPEILALLTAVWLPKRVAVMHCKGHQKDDAPTSTGNRRADEVAREVAIRPLSTQATISAGKRTADGSEFEKRTADGSEFESPKKKAKVE

SEQ ID NO: 1386 - protein, 2099 aa, synthetic construct
MPAAKRVKLDGGDKKYSIGLDIGTNSVGWAVITDEYKVPSKKFKVLGNTDRHSIKKNLIGALLFDSGETAEATRLKRTARRRYTRRKNRICYLQEIFSNEMAKVDDSFFHRLEESFLVEEDKKHERHPIFGNIVDEVAYHEKYPTIYHLRKKLVDSTDKADLRLIYLALAHMIKFRGHFLIEGDLNPDNSDVDKLFIQLVQTYNQLFEENPINASGVDAKAILSARLSKSRRLENLIAQLPGEKKNGLFGNLIALSLGLTPNFKSNFDLAEDAKLQLSKDTYDDDLDNLLAQIGDQYADLFLAAKNLSDAILLSDILRVNTEITKAPLSASMIKRYDEHHQDLTLLKALVRQQLPEKYKEIFFDQSKNGYAGYIDGGASQEEFYKFIKPILEKMDGTEELLVKLNREDLLRKQRTFDNGSIPHQIHLGELHAILRRQEDFYPFLKDNREKIEKILTFRIPYYVGPLARGNSRFAWMTRKSEETITPWNFEEVVDKGASAQSFIERMTNFDKNLPNEKVLPKHSLLYEYFTVYNELTKVKYVTEGMRKPAFLSGEQKKAIVDLLFKTNRKVTVKQLKEDYFKKIECFDSVEISGVEDRFNASLGTYHDLLKIIKDKDFLDNEENEDILEDIVLTLTLFEDREMIEERLKTYAHLFDDKVMKQLKRRRYTGWGRLSRKLINGIRDKQSGKTILDFLKSDGFANRNFMQLIHDDSLTFKEDIQKAQVSGQGDSLHEHIANLAGSPAIKKGILQTVKVVDELVKVMGRHKPENIVIEMARENQTTQKGQKNSRERMKRIEEGIKELGSQILKEHPVENTQLQNEKLYLYYLQNGRDMYVDQELDINRLSDYDVDHIVPQSFLKDDSIDNKVLTRSDKARGKSDNVPSEEVVKKMKNYWRQLLNAKLITQRKFDNLTKAERGGLSELDKAGFIKRQLVETRQITKHVAQILDSRMNTKYDENDKLIREVKVITLKSKLVSDFRKDFQFYKVREINNYHHAHDAYLNAVVGTALIKKYPKLESEFVYGDYKVYDVRKMIAKSEQEIGKATAKYFFYSNIMNFFKTEITLANGEIRKRPLIETNGETGEIVWDKGRDFATVRKVLSMPQVNIVKKTEVQTGGFSKESILPKRNSDKLIARKKDWDPKKYGGFDSPTVAYSVLVVAKVEKGKSKKLKSVKELLGITIMERSSFEKNPIDFLEAKGYKEVKKDLIIKLPKYSLFELENGRKRMLASAGELQKGNELALPSKYVNFLYLASHYEKLKGSPEDNEQKQLFVEQHKHYLDEIIEQISEFSKRVILADANLDKVLSAYNKHRDKPIREQAENIIHLFTLTNLGAPAAFKYFDTTIDRKRYTSTKEVLDATLIHQSITGLYETRIDLSQLGGDGGGSSGSSGSSGSSGGTAPLEEEYRLFLEAPIQNVTLLEQWKREIPKVWAEINPPGLASTQAPIHVQLLSTALPVRVRQYPITLEAKRSLRETIRKFRAAGILRPVHSPWNTPLLPVRKSGTSEYRMVQDLREVNKRVETIHPTVPNPYTLLSLLPPDRIWYSVLDLKDAFFCIPLAPESQLIFAFEWADAEEGESGQLTWTRLPQGFKNSPTLFNEALNRDLQGFRLDHPSVSLLQYVDDLLIAADTQAACLSATRDLLMTLAELGYRVSGKKAQLCQEEVTYLGFKIHKGSRSLSNSRTQAILQIPVPKTKRQVREFLGKIGYCRLFIPGFAELAQPLYAATRPGNDPLVWGEKEEEAFQSLKLALTQPPALALPSLDKPFQLFVEETSGAAKGVLTQALGPWKRPVAYLSKRLDPVAAGWPRCLRAIAAAALLTREASKLTFGQDIEITSSHNLESLLRSPPDKWLTNARITQYQVLLLDPPRVRFKQTAALNPATLLPETDDTLPIHHCLDTLDSLTSTRPDLTDQPLAQAEATLFTDGSSYIRDGKRYAGAAVVTLDSVIWAEPLPIGTSAQKAELIALTKALEWSKDKSVNIYTDSRYAFATLHVHGMIYRERGWLTAGGKAIKNAPEILALLTAVWLPKRVAVMHCKGHQKDDAPTSTGNRRADEVAREVAIRPLSTQATISAGKRTADGSEFEKRTADGSEFESPKKKAKVE

SEQ ID NO: 1387 - protein, 2098 aa, synthetic construct
MPAAKRVKLDGGDKKYSIGLDIGTNSVGWAVITDEYKVPSKKFKVLGNTDRHSIKKNLIGALLFDSGETAEATRLKRTARRRYTRRKNRICYLQEIFSNEMAKVDDSFFHRLEESFLVEEDKKHERHPIFGNIVDEVAYHEKYPTIYHLRKKLVDSTDKADLRLIYLALAHMIKFRGHFLIEGDLNPDNSDVDKLFIQLVQTYNQLFEENPINASGVDAKAILSARLSKSRRLENLIAQLPGEKKNGLFGNLIALSLGLTPNFKSNFDLAEDAKLQLSKDTYDDDLDNLLAQIGDQYADLFLAAKNLSDAILLSDILRVNTEITKAPLSASMIKRYDEHHQDLTLLKALVRQQLPEKYKEIFFDQSKNGYAGYIDGGASQEEFYKFIKPILEKMDGTEELLVKLNREDLLRKQRTFDNGSIPHQIHLGELHAILRRQEDFYPFLKDNREKIEKILTFRIPYYVGPLARGNSRFAWMTRKSEETITPWNFEEVVDKGASAQSFIERMTNFDKNLPNEKVLPKHSLLYEYFTVYNELTKVKYVTEGMRKPAFLSGEQKKAIVDLLFKTNRKVTVKQLKEDYFKKIECFDSVEISGVEDRFNASLGTYHDLLKIIKDKDFLDNEENEDILEDIVLTLTLFEDREMIEERLKTYAHLFDDKVMKQLKRRRYTGWGRLSRKLINGIRDKQSGKTILDFLKSDGFANRNFMQLIHDDSLTFKEDIQKAQVSGQGDSLHEHIANLAGSPAIKKGILQTVKVVDELVKVMGRHKPENIVIEMARENQTTQKGQKNSRERMKRIEEGIKELGSQILKEHPVENTQLQNEKLYLYYLQNGRDMYVDQELDINRLSDYDVDHIVPQSFLKDDSIDNKVLTRSDKARGKSDNVPSEEVVKKMKNYWRQLLNAKLITQRKFDNLTKAERGGLSELDKAGFIKRQLVETRQITKHVAQILDSRMNTKYDENDKLIREVKVITLKSKLVSDFRKDFQFYKVREINNYHHAHDAYLNAVVGTALIKKYPKLESEFVYGDYKVYDVRKMIAKSEQEIGKATAKYFFYSNIMNFFKTEITLANGEIRKRPLIETNGETGEIVWDKGRDFATVRKVLSMPQVNIVKKTEVQTGGFSKESILPKRNSDKLIARKKDWDPKKYGGFDSPTVAYSVLVVAKVEKGKSKKLKSVKELLGITIMERSSFEKNPIDFLEAKGYKEVKKDLIIKLPKYSLFELENGRKRMLASAGELQKGNELALPSKYVNFLYLASHYEKLKGSPEDNEQKQLFVEQHKHYLDEIIEQISEFSKRVILADANLDKVLSAYNKHRDKPIREQAENIIHLFTLTNLGAPAAFKYFDTTIDRKRYTSTKEVLDATLIHQSITGLYETRIDLSQLGGDGGPAPEAAAKGGGGGTAPLEEEYRLFLEAPIQNVTLLEQWKREIPKVWAEINPPGLASTQAPIHVQLLSTALPVRVRQYPITLEAKRSLRETIRKFRAAGILRPVHSPWNTPLLPVRKSGTSEYRMVQDLREVNKRVETIHPTVPNPYTLLSLLPPDRIWYSVLDLKDAFFCIPLAPESQLIFAFEWADAEEGESGQLTWTRLPQGFKNSPTLFNEALNRDLQGFRLDHPSVSLLQYVDDLLIAADTQAACLSATRDLLMTLAELGYRVSGKKAQLCQEEVTYLGFKIHKGSRSLSNSRTQAILQIPVPKTKRQVREFLGKIGYCRLFIPGFAELAQPLYAATRPGNDPLVWGEKEEEAFQSLKLALTQPPALALPSLDKPFQLFVEETSGAAKGVLTQALGPWKRPVAYLSKRLDPVAAGWPRCLRAIAAAALLTREASKLTFGQDIEITSSHNLESLLRSPPDKWLTNARITQYQVLLLDPPRVRFKQTAALNPATLLPETDDTLPIHHCLDTLDSLTSTRPDLTDQPLAQAEATLFTDGSSYIRDGKRYAGAAVVTLDSVIWAEPLPIGTSAQKAELIALTKALEWSKDKSVNIYTDSRYAFATLHVHGMIYRERGWLTAGGKAIKNAPEILALLTAVWLPKRVAVMHCKGHQKDDAPTSTGNRRADEVAREVAIRPLSTQATISAGKRTADGSEFEKRTADGSEFESPKKKAKVE

SEQ ID NO: 1388 - protein, 2098 aa, synthetic construct
MPAAKRVKLDGGDKKYSIGLDIGTNSVGWAVITDEYKVPSKKFKVLGNTDRHSIKKNLIGALLFDSGETAEATRLKRTARRRYTRRKNRICYLQEIFSNEMAKVDDSFFHRLEESFLVEEDKKHERHPIFGNIVDEVAYHEKYPTIYHLRKKLVDSTDKADLRLIYLALAHMIKFRGHFLIEGDLNPDNSDVDKLFIQLVQTYNQLFEENPINASGVDAKAILSARLSKSRRLENLIAQLPGEKKNGLFGNLIALSLGLTPNFKSNFDLAEDAKLQLSKDTYDDDLDNLLAQIGDQYADLFLAAKNLSDAILLSDILRVNTEITKAPLSASMIKRYDEHHQDLTLLKALVRQQLPEKYKEIFFDQSKNGYAGYIDGGASQEEFYKFIKPILEKMDGTEELLVKLNREDLLRKQRTFDNGSIPHQIHLGELHAILRRQEDFYPFLKDNREKIEKILTFRIPYYVGPLARGNSRFAWMTRKSEETITPWNFEEVVDKGASAQSFIERMTNFDKNLPNEKVLPKHSLLYEYFTVYNELTKVKYVTEGMRKPAFLSGEQKKAIVDLLFKTNRKVTVKQLKEDYFKKIECFDSVEISGVEDRFNASLGTYHDLLKIIKDKDFLDNEENEDILEDIVLTLTLFEDREMIEERLKTYAHLFDDKVMKQLKRRRYTGWGRLSRKLINGIRDKQSGKTILDFLKSDGFANRNFMQLIHDDSLTFKEDIQKAQVSGQGDSLHEHIANLAGSPAIKKGILQTVKVVDELVKVMGRHKPENIVIEMARENQTTQKGQKNSRERMKRIEEGIKELGSQILKEHPVENTQLQNEKLYLYYLQNGRDMYVDQELDINRLSDYDVDHIVPQSFLKDDSIDNKVLTRSDKARGKSDNVPSEEVVKKMKNYWRQLLNAKLITQRKFDNLTKAERGGLSELDKAGFIKRQLVETRQITKHVAQILDSRMNTKYDENDKLIREVKVITLKSKLVSDFRKDFQFYKVREINNYHHAHDAYLNAVVGTALIKKYPKLESEFVYGDYKVYDVRKMIAKSEQEIGKATAKYFFYSNIMNFFKTEITLANGEIRKRPLIETNGETGEIVWDKGRDFATVRKVLSMPQVNIVKKTEVQTGGFSKESILPKRNSDKLIARKKDWDPKKYGGFDSPTVAYSVLVVAKVEKGKSKKLKSVKELLGITIMERSSFEKNPIDFLEAKGYKEVKKDLIIKLPKYSLFELENGRKRMLASAGELQKGNELALPSKYVNFLYLASHYEKLKGSPEDNEQKQLFVEQHKHYLDEIIEQISEFSKRVILADANLDKVLSAYNKHRDKPIREQAENIIHLFTLTNLGAPAAFKYFDTTIDRKRYTSTKEVLDATLIHQSITGLYETRIDLSQLGGDGGPAPEAAAKGSSGGTAPLEEEYRLFLEAPIQNVTLLEQWKREIPKVWAEINPPGLASTQAPIHVQLLSTALPVRVRQYPITLEAKRSLRETIRKFRAAGILRPVHSPWNTPLLPVRKSGTSEYRMVQDLREVNKRVETIHPTVPNPYTLLSLLPPDRIWYSVLDLKDAFFCIPLAPESQLIFAFEWADAEEGESGQLTWTRLPQGFKNSPTLFNEALNRDLQGFRLDHPSVSLLQYVDDLLIAADTQAACLSATRDLLMTLAELGYRVSGKKAQLCQEEVTYLGFKIHKGSRSLSNSRTQAILQIPVPKTKRQVREFLGKIGYCRLFIPGFAELAQPLYAATRPGNDPLVWGEKEEEAFQSLKLALTQPPALALPSLDKPFQLFVEETSGAAKGVLTQALGPWKRPVAYLSKRLDPVAAGWPRCLRAIAAAALLTREASKLTFGQDIEITSSHNLESLLRSPPDKWLTNARITQYQVLLLDPPRVRFKQTAALNPATLLPETDDTLPIHHCLDTLDSLTSTRPDLTDQPLAQAEATLFTDGSSYIRDGKRYAGAAVVTLDSVIWAEPLPIGTSAQKAELIALTKALEWSKDKSVNIYTDSRYAFATLHVHGMIYRERGWLTAGGKAIKNAPEILALLTAVWLPKRVAVMHCKGHQKDDAPTSTGNRRADEVAREVAIRPLSTQATISAGKRTADGSEFEKRTADGSEFESPKKKAKVE

SEQ ID NO: 1389 - protein, 2090 aa, synthetic construct
MPAAKRVKLDGGDKKYSIGLDIGTNSVGWAVITDEYKVPSKKFKVLGNTDRHSIKKNLIGALLFDSGETAEATRLKRTARRRYTRRKNRICYLQEIFSNEMAKVDDSFFHRLEESFLVEEDKKHERHPIFGNIVDEVAYHEKYPTIYHLRKKLVDSTDKADLRLIYLALAHMIKFRGHFLIEGDLNPDNSDVDKLFIQLVQTYNQLFEENPINASGVDAKAILSARLSKSRRLENLIAQLPGEKKNGLFGNLIALSLGLTPNFKSNFDLAEDAKLQLSKDTYDDDLDNLLAQIGDQYADLFLAAKNLSDAILLSDILRVNTEITKAPLSASMIKRYDEHHQDLTLLKALVRQQLPEKYKEIFFDQSKNGYAGYIDGGASQEEFYKFIKPILEKMDGTEELLVKLNREDLLRKQRTFDNGSIPHQIHLGELHAILRRQEDFYPFLKDNREKIEKILTFRIPYYVGPLARGNSRFAWMTRKSEETITPWNFEEVVDKGASAQSFIERMTNFDKNLPNEKVLPKHSLLYEYFTVYNELTKVKYVTEGMRKPAFLSGEQKKAIVDLLFKTNRKVTVKQLKEDYFKKIECFDSVEISGVEDRFNASLGTYHDLLKIIKDKDFLDNEENEDILEDIVLTLTLFEDREMIEERLKTYAHLFDDKVMKQLKRRRYTGWGRLSRKLINGIRDKQSGKTILDFLKSDGFANRNFMQLIHDDSLTFKEDIQKAQVSGQGDSLHEHIANLAGSPAIKKGILQTVKVVDELVKVMGRHKPENIVIEMARENQTTQKGQKNSRERMKRIEEGIKELGSQILKEHPVENTQLQNEKLYLYYLQNGRDMYVDQELDINRLSDYDVDHIVPQSFLKDDSIDNKVLTRSDKARGKSDNVPSEEVVKKMKNYWRQLLNAKLITQRKFDNLTKAERGGLSELDKAGFIKRQLVETRQITKHVAQILDSRMNTKYDENDKLIREVKVITLKSKLVSDFRKDFQFYKVREINNYHHAHDAYLNAVVGTALIKKYPKLESEFVYGDYKVYDVRKMIAKSEQEIGKATAKYFFYSNIMNFFKTEITLANGEIRKRPLIETNGETGEIVWDKGRDFATVRKVLSMPQVNIVKKTEVQTGGFSKESILPKRNSDKLIARKKDWDPKKYGGFDSPTVAYSVLVVAKVEKGKSKKLKSVKELLGITIMERSSFEKNPIDFLEAKGYKEVKKDLIIKLPKYSLFELENGRKRMLASAGELQKGNELALPSKYVNFLYLASHYEKLKGSPEDNEQKQLFVEQHKHYLDEIIEQISEFSKRVILADANLDKVLSAYNKHRDKPIREQAENIIHLFTLTNLGAPAAFKYFDTTIDRKRYTSTKEVLDATLIHQSITGLYETRIDLSQLGGDGGGGGGGTAPLEEEYRLFLEAPIQNVTLLEQWKREIPKVWAEINPPGLASTQAPIHVQLLSTALPVRVRQYPITLEAKRSLRETIRKFRAAGILRPVHSPWNTPLLPVRKSGTSEYRMVQDLREVNKRVETIHPTVPNPYTLLSLLPPDRIWYSVLDLKDAFFCIPLAPESQLIFAFEWADAEEGESGQLTWTRLPQGFKNSPTLFNEALNRDLQGFRLDHPSVSLLQYVDDLLIAADTQAACLSATRDLLMTLAELGYRVSGKKAQLCQEEVTYLGFKIHKGSRSLSNSRTQAILQIPVPKTKRQVREFLGKIGYCRLFIPGFAELAQPLYAATRPGNDPLVWGEKEEEAFQSLKLALTQPPALALPSLDKPFQLFVEETSGAAKGVLTQALGPWKRPVAYLSKRLDPVAAGWPRCLRAIAAAALLTREASKLTFGQDIEITSSHNLESLLRSPPDKWLTNARITQYQVLLLDPPRVRFKQTAALNPATLLPETDDTLPIHHCLDTLDSLTSTRPDLTDQPLAQAEATLFTDGSSYIRDGKRYAGAAVVTLDSVIWAEPLPIGTSAQKAELIALTKALEWSKDKSVNIYTDSRYAFATLHVHGMIYRERGWLTAGGKAIKNAPEILALLTAVWLPKRVAVMHCKGHQKDDAPTSTGNRRADEVAREVAIRPLSTQATISAGKRTADGSEFEKRTADGSEFESPKKKAKVE

SEQ ID NO: 1390 - protein, 2098 aa, synthetic construct
MPAAKRVKLDGGDKKYSIGLDIGTNSVGWAVITDEYKVPSKKFKVLGNTDRHSIKKNLIGALLFDSGETAEATRLKRTARRRYTRRKNRICYLQEIFSNEMAKVDDSFFHRLEESFLVEEDKKHERHPIFGNIVDEVAYHEKYPTIYHLRKKLVDSTDKADLRLIYLALAHMIKFRGHFLIEGDLNPDNSDVDKLFIQLVQTYNQLFEENPINASGVDAKAILSARLSKSRRLENLIAQLPGEKKNGLFGNLIALSLGLTPNFKSNFDLAEDAKLQLSKDTYDDDLDNLLAQIGDQYADLFLAAKNLSDAILLSDILRVNTEITKAPLSASMIKRYDEHHQDLTLLKALVRQQLPEKYKEIFFDQSKNGYAGYIDGGASQEEFYKFIKPILEKMDGTEELLVKLNREDLLRKQRTFDNGSIPHQIHLGELHAILRRQEDFYPFLKDNREKIEKILTFRIPYYVGPLARGNSRFAWMTRKSEETITPWNFEEVVDKGASAQSFIERMTNFDKNLPNEKVLPKHSLLYEYFTVYNELTKVKYVTEGMRKPAFLSGEQKKAIVDLLFKTNRKVTVKQLKEDYFKKIECFDSVEISGVEDRFNASLGTYHDLLKIIKDKDFLDNEENEDILEDIVLTLTLFEDREMIEERLKTYAHLFDDKVMKQLKRRRYTGWGRLSRKLINGIRDKQSGKTILDFLKSDGFANRNFMQLIHDDSLTFKEDIQKAQVSGQGDSLHEHIANLAGSPAIKKGILQTVKVVDELVKVMGRHKPENIVIEMARENQTTQKGQKNSRERMKRIEEGIKELGSQILKEHPVENTQLQNEKLYLYYLQNGRDMYVDQELDINRLSDYDVDHIVPQSFLKDDSIDNKVLTRSDKARGKSDNVPSEEVVKKMKNYWRQLLNAKLITQRKFDNLTKAERGGLSELDKAGFIKRQLVETRQITKHVAQILDSRMNTKYDENDKLIREVKVITLKSKLVSDFRKDFQFYKVREINNYHHAHDAYLNAVVGTALIKKYPKLESEFVYGDYKVYDVRKMIAKSEQEIGKATAKYFFYSNIMNFFKTEITLANGEIRKRPLIETNGETGEIVWDKGRDFATVRKVLSMPQVNIVKKTEVQTGGFSKESILPKRNSDKLIARKKDWDPKKYGGFDSPTVAYSVLVVAKVEKGKSKKLKSVKELLGITIMERSSFEKNPIDFLEAKGYKEVKKDLIIKLPKYSLFELENGRKRMLASAGELQKGNELALPSKYVNFLYLASHYEKLKGSPEDNEQKQLFVEQHKHYLDEIIEQISEFSKRVILADANLDKVLSAYNKHRDKPIREQAENIIHLFTLTNLGAPAAFKYFDTTIDRKRYTSTKEVLDATLIHQSITGLYETRIDLSQLGGDGGEAAAKGGGGGSGGTAPLEEEYRLFLEAPIQNVTLLEQWKREIPKVWAEINPPGLASTQAPIHVQLLSTALPVRVRQYPITLEAKRSLRETIRKFRAAGILRPVHSPWNTPLLPVRKSGTSEYRMVQDLREVNKRVETIHPTVPNPYTLLSLLPPDRIWYSVLDLKDAFFCIPLAPESQLIFAFEWADAEEGESGQLTWTRLPQGFKNSPTLFNEALNRDLQGFRLDHPSVSLLQYVDDLLIAADTQAACLSATRDLLMTLAELGYRVSGKKAQLCQEEVTYLGFKIHKGSRSLSNSRTQAILQIPVPKTKRQVREFLGKIGYCRLFIPGFAELAQPLYAATRPGNDPLVWGEKEEEAFQSLKLALTQPPALALPSLDKPFQLFVEETSGAAKGVLTQALGPWKRPVAYLSKRLDPVAAGWPRCLRAIAAAALLTREASKLTFGQDIEITSSHNLESLLRSPPDKWLTNARITQYQVLLLDPPRVRFKQTAALNPATLLPETDDTLPIHHCLDTLDSLTSTRPDLTDQPLAQAEATLFTDGSSYIRDGKRYAGAAVVTLDSVIWAEPLPIGTSAQKAELIALTKALEWSKDKSVNIYTDSRYAFATLHVHGMIYRERGWLTAGGKAIKNAPEILALLTAVWLPKRVAVMHCKGHQKDDAPTSTGNRRADEVAREVAIRPLSTQATISAGKRTADGSEFEKRTADGSEFESPKKKAKVE

SEQ ID NO: 1391 - protein, 2093 aa, synthetic construct
MPAAKRVKLDGGDKKYSIGLDIGTNSVGWAVITDEYKVPSKKFKVLGNTDRHSIKKNLIGALLFDSGETAEATRLKRTARRRYTRRKNRICYLQEIFSNEMAKVDDSFFHRLEESFLVEEDKKHERHPIFGNIVDEVAYHEKYPTIYHLRKKLVDSTDKADLRLIYLALAHMIKFRGHFLIEGDLNPDNSDVDKLFIQLVQTYNQLFEENPINASGVDAKAILSARLSKSRRLENLIAQLPGEKKNGLFGNLIALSLGLTPNFKSNFDLAEDAKLQLSKDTYDDDLDNLLAQIGDQYADLFLAAKNLSDAILLSDILRVNTEITKAPLSASMIKRYDEHHQDLTLLKALVRQQLPEKYKEIFFDQSKNGYAGYIDGGASQEEFYKFIKPILEKMDGTEELLVKLNREDLLRKQRTFDNGSIPHQIHLGELHAILRRQEDFYPFLKDNREKIEKILTFRIPYYVGPLARGNSRFAWMTRKSEETITPWNFEEVVDKGASAQSFIERMTNFDKNLPNEKVLPKHSLLYEYFTVYNELTKVKYVTEGMRKPAFLSGEQKKAIVDLLFKTNRKVTVKQLKEDYFKKIECFDSVEISGVEDRFNASLGTYHDLLKIIKDKDFLDNEENEDILEDIVLTLTLFEDREMIEERLKTYAHLFDDKVMKQLKRRRYTGWGRLSRKLINGIRDKQSGKTILDFLKSDGFANRNFMQLIHDDSLTFKEDIQKAQVSGQGDSLHEHIANLAGSPAIKKGILQTVKVVDELVKVMGRHKPENIVIEMARENQTTQKGQKNSRERMKRIEEGIKELGSQILKEHPVENTQLQNEKLYLYYLQNGRDMYVDQELDINRLSDYDVDHIVPQSFLKDDSIDNKVLTRSDKARGKSDNVPSEEVVKKMKNYWRQLLNAKLITQRKFDNLTKAERGGLSELDKAGFIKRQLVETRQITKHVAQILDSRMNTKYDENDKLIREVKVITLKSKLVSDFRKDFQFYKVREINNYHHAHDAYLNAVVGTALIKKYPKLESEFVYGDYKVYDVRKMIAKSEQEIGKATAKYFFYSNIMNFFKTEITLANGEIRKRPLIETNGETGEIVWDKGRDFATVRKVLSMPQVNIVKKTEVQTGGFSKESILPKRNSDKLIARKKDWDPKKYGGFDSPTVAYSVLVVAKVEKGKSKKLKSVKELLGITIMERSSFEKNPIDFLEAKGYKEVKKDLIIKLPKYSLFELENGRKRMLASAGELQKGNELALPSKYVNFLYLASHYEKLKGSPEDNEQKQLFVEQHKHYLDEIIEQISEFSKRVILADANLDKVLSAYNKHRDKPIREQAENIIHLFTLTNLGAPAAFKYFDTTIDRKRYTSTKEVLDATLIHQSITGLYETRIDLSQLGGDGGGGSGGGGGTAPLEEEYRLFLEAPIQNVTLLEQWKREIPKVWAEINPPGLASTQAPIHVQLLSTALPVRVRQYPITLEAKRSLRETIRKFRAAGILRPVHSPWNTPLLPVRKSGTSEYRMVQDLREVNKRVETIHPTVPNPYTLLSLLPPDRIWYSVLDLKDAFFCIPLAPESQLIFAFEWADAEEGESGQLTWTRLPQGFKNSPTLFNEALNRDLQGFRLDHPSVSLLQYVDDLLIAADTQAACLSATRDLLMTLAELGYRVSGKKAQLCQEEVTYLGFKIHKGSRSLSNSRTQAILQIPVPKTKRQVREFLGKIGYCRLFIPGFAELAQPLYAATRPGNDPLVWGEKEEEAFQSLKLALTQPPALALPSLDKPFQLFVEETSGAAKGVLTQALGPWKRPVAYLSKRLDPVAAGWPRCLRAIAAAALLTREASKLTFGQDIEITSSHNLESLLRSPPDKWLTNARITQYQVLLLDPPRVRFKQTAALNPATLLPETDDTLPIHHCLDTLDSLTSTRPDLTDQPLAQAEATLFTDGSSYIRDGKRYAGAAVVTLDSVIWAEPLPIGTSAQKAELIALTKALEWSKDKSVNIYTDSRYAFATLHVHGMIYRERGWLTAGGKAIKNAPEILALLTAVWLPKRVAVMHCKGHQKDDAPTSTGNRRADEVAREVAIRPLSTQATISAGKRTADGSEFEKRTADGSEFESPKKKAKVE

SEQ ID NO: 1392 - protein, 2093 aa, synthetic construct
MPAAKRVKLDGGDKKYSIGLDIGTNSVGWAVITDEYKVPSKKFKVLGNTDRHSIKKNLIGALLFDSGETAEATRLKRTARRRYTRRKNRICYLQEIFSNEMAKVDDSFFHRLEESFLVEEDKKHERHPIFGNIVDEVAYHEKYPTIYHLRKKLVDSTDKADLRLIYLALAHMIKFRGHFLIEGDLNPDNSDVDKLFIQLVQTYNQLFEENPINASGVDAKAILSARLSKSRRLENLIAQLPGEKKNGLFGNLIALSLGLTPNFKSNFDLAEDAKLQLSKDTYDDDLDNLLAQIGDQYADLFLAAKNLSDAILLSDILRVNTEITKAPLSASMIKRYDEHHQDLTLLKALVRQQLPEKYKEIFFDQSKNGYAGYIDGGASQEEFYKFIKPILEKMDGTEELLVKLNREDLLRKQRTFDNGSIPHQIHLGELHAILRRQEDFYPFLKDNREKIEKILTFRIPYYVGPLARGNSRFAWMTRKSEETITPWNFEEVVDKGASAQSFIERMTNFDKNLPNEKVLPKHSLLYEYFTVYNELTKVKYVTEGMRKPAFLSGEQKKAIVDLLFKTNRKVTVKQLKEDYFKKIECFDSVEISGVEDRFNASLGTYHDLLKIIKDKDFLDNEENEDILEDIVLTLTLFEDREMIEERLKTYAHLFDDKVMKQLKRRRYTGWGRLSRKLINGIRDKQSGKTILDFLKSDGFANRNFMQLIHDDSLTFKEDIQKAQVSGQGDSLHEHIANLAGSPAIKKGILQTVKVVDELVKVMGRHKPENIVIEMARENQTTQKGQKNSRERMKRIEEGIKELGSQILKEHPVENTQLQNEKLYLYYLQNGRDMYVDQELDINRLSDYDVDHIVPQSFLKDDSIDNKVLTRSDKARGKSDNVPSEEVVKKMKNYWRQLLNAKLITQRKFDNLTKAERGGLSELDKAGFIKRQLVETRQITKHVAQILDSRMNTKYDENDKLIREVKVITLKSKLVSDFRKDFQFYKVREINNYHHAHDAYLNAVVGTALIKKYPKLESEFVYGDYKVYDVRKMIAKSEQEIGKATAKYFFYSNIMNFFKTEITLANGEIRKRPLIETNGETGEIVWDKGRDFATVRKVLSMPQVNIVKKTEVQTGGFSKESILPKRNSDKLIARKKDWDPKKYGGFDSPTVAYSVLVVAKVEKGKSKKLKSVKELLGITIMERSSFEKNPIDFLEAKGYKEVKKDLIIKLPKYSLFELENGRKRMLASAGELQKGNELALPSKYVNFLYLASHYEKLKGSPEDNEQKQLFVEQHKHYLDEIIEQISEFSKRVILADANLDKVLSAYNKHRDKPIREQAENIIHLFTLTNLGAPAAFKYFDTTIDRKRYTSTKEVLDATLIHQSITGLYETRIDLSQLGGDGGGGSPAPGGTAPLEEEYRLFLEAPIQNVTLLEQWKREIPKVWAEINPPGLASTQAPIHVQLLSTALPVRVRQYPITLEAKRSLRETIRKFRAAGILRPVHSPWNTPLLPVRKSGTSEYRMVQDLREVNKRVETIHPTVPNPYTLLSLLPPDRIWYSVLDLKDAFFCIPLAPESQLIFAFEWADAEEGESGQLTWTRLPQGFKNSPTLFNEALNRDLQGFRLDHPSVSLLQYVDDLLIAADTQAACLSATRDLLMTLAELGYRVSGKKAQLCQEEVTYLGFKIHKGSRSLSNSRTQAILQIPVPKTKRQVREFLGKIGYCRLFIPGFAELAQPLYAATRPGNDPLVWGEKEEEAFQSLKLALTQPPALALPSLDKPFQLFVEETSGAAKGVLTQALGPWKRPVAYLSKRLDPVAAGWPRCLRAIAAAALLTREASKLTFGQDIEITSSHNLESLLRSPPDKWLTNARITQYQVLLLDPPRVRFKQTAALNPATLLPETDDTLPIHHCLDTLDSLTSTRPDLTDQPLAQAEATLFTDGSSYIRDGKRYAGAAVVTLDSVIWAEPLPIGTSAQKAELIALTKALEWSKDKSVNIYTDSRYAFATLHVHGMIYRERGWLTAGGKAIKNAPEILALLTAVWLPKRVAVMHCKGHQKDDAPTSTGNRRADEVAREVAIRPLSTQATISAGKRTADGSEFEKRTADGSEFESPKKKAKVE

SEQ ID NO: 1393 - protein, 2102 aa, synthetic construct
MPAAKRVKLDGGDKKYSIGLDIGTNSVGWAVITDEYKVPSKKFKVLGNTDRHSIKKNLIGALLFDSGETAEATRLKRTARRRYTRRKNRICYLQEIFSNEMAKVDDSFFHRLEESFLVEEDKKHERHPIFGNIVDEVAYHEKYPTIYHLRKKLVDSTDKADLRLIYLALAHMIKFRGHFLIEGDLNPDNSDVDKLFIQLVQTYNQLFEENPINASGVDAKAILSARLSKSRRLENLIAQLPGEKKNGLFGNLIALSLGLTPNFKSNFDLAEDAKLQLSKDTYDDDLDNLLAQIGDQYADLFLAAKNLSDAILLSDILRVNTEITKAPLSASMIKRYDEHHQDLTLLKALVRQQLPEKYKEIFFDQSKNGYAGYIDGGASQEEFYKFIKPILEKMDGTEELLVKLNREDLLRKQRTFDNGSIPHQIHLGELHAILRRQEDFYPFLKDNREKIEKILTFRIPYYVGPLARGNSRFAWMTRKSEETITPWNFEEVVDKGASAQSFIERMTNFDKNLPNEKVLPKHSLLYEYFTVYNELTKVKYVTEGMRKPAFLSGEQKKAIVDLLFKTNRKVTVKQLKEDYFKKIECFDSVEISGVEDRFNASLGTYHDLLKIIKDKDFLDNEENEDILEDIVLTLTLFEDREMIEERLKTYAHLFDDKVMKQLKRRRYTGWGRLSRKLINGIRDKQSGKTILDFLKSDGFANRNFMQLIHDDSLTFKEDIQKAQVSGQGDSLHEHIANLAGSPAIKKGILQTVKVVDELVKVMGRHKPENIVIEMARENQTTQKGQKNSRERMKRIEEGIKELGSQILKEHPVENTQLQNEKLYLYYLQNGRDMYVDQELDINRLSDYDVDHIVPQSFLKDDSIDNKVLTRSDKARGKSDNVPSEEVVKKMKNYWRQLLNAKLITQRKFDNLTKAERGGLSELDKAGFIKRQLVETRQITKHVAQILDSRMNTKYDENDKLIREVKVITLKSKLVSDFRKDFQFYKVREINNYHHAHDAYLNAVVGTALIKKYPKLESEFVYGDYKVYDVRKMIAKSEQEIGKATAKYFFYSNIMNFFKTEITLANGEIRKRPLIETNGETGEIVWDKGRDFATVRKVLSMPQVNIVKKTEVQTGGFSKESILPKRNSDKLIARKKDWDPKKYGGFDSPTVAYSVLVVAKVEKGKSKKLKSVKELLGITIMERSSFEKNPIDFLEAKGYKEVKKDLIIKLPKYSLFELENGRKRMLASAGELQKGNELALPSKYVNFLYLASHYEKLKGSPEDNEQKQLFVEQHKHYLDEIIEQISEFSKRVILADANLDKVLSAYNKHRDKPIREQAENIIHLFTLTNLGAPAAFKYFDTTIDRKRYTSTKEVLDATLIHQSITGLYETRIDLSQLGGDGGGGGGSEAAAKGGGGSGGTAPLEEEYRLFLEAPIQNVTLLEQWKREIPKVWAEINPPGLASTQAPIHVQLLSTALPVRVRQYPITLEAKRSLRETIRKFRAAGILRPVHSPWNTPLLPVRKSGTSEYRMVQDLREVNKRVETIHPTVPNPYTLLSLLPPDRIWYSVLDLKDAFFCIPLAPESQLIFAFEWADAEEGESGQLTWTRLPQGFKNSPTLFNEALNRDLQGFRLDHPSVSLLQYVDDLLIAADTQAACLSATRDLLMTLAELGYRVSGKKAQLCQEEVTYLGFKIHKGSRSLSNSRTQAILQIPVPKTKRQVREFLGKIGYCRLFIPGFAELAQPLYAATRPGNDPLVWGEKEEEAFQSLKLALTQPPALALPSLDKPFQLFVEETSGAAKGVLTQALGPWKRPVAYLSKRLDPVAAGWPRCLRAIAAAALLTREASKLTFGQDIEITSSHNLESLLRSPPDKWLTNARITQYQVLLLDPPRVRFKQTAALNPATLLPETDDTLPIHHCLDTLDSLTSTRPDLTDQPLAQAEATLFTDGSSYIRDGKRYAGAAVVTLDSVIWAEPLPIGTSAQKAELIALTKALEWSKDKSVNIYTDSRYAFATLHVHGMIYRERGWLTAGGKAIKNAPEILALLTAVWLPKRVAVMHCKGHQKDDAPTSTGNRRADEVAREVAIRPLSTQATISAGKRTADGSEFEKRTADGSEFESPKKKAKVE

SEQ ID NO: 1394 - protein, 2098 aa, synthetic construct
MPAAKRVKLDGGDKKYSIGLDIGTNSVGWAVITDEYKVPSKKFKVLGNTDRHSIKKNLIGALLFDSGETAEATRLKRTARRRYTRRKNRICYLQEIFSNEMAKVDDSFFHRLEESFLVEEDKKHERHPIFGNIVDEVAYHEKYPTIYHLRKKLVDSTDKADLRLIYLALAHMIKFRGHFLIEGDLNPDNSDVDKLFIQLVQTYNQLFEENPINASGVDAKAILSARLSKSRRLENLIAQLPGEKKNGLFGNLIALSLGLTPNFKSNFDLAEDAKLQLSKDTYDDDLDNLLAQIGDQYADLFLAAKNLSDAILLSDILRVNTEITKAPLSASMIKRYDEHHQDLTLLKALVRQQLPEKYKEIFFDQSKNGYAGYIDGGASQEEFYKFIKPILEKMDGTEELLVKLNREDLLRKQRTFDNGSIPHQIHLGELHAILRRQEDFYPFLKDNREKIEKILTFRIPYYVGPLARGNSRFAWMTRKSEETITPWNFEEVVDKGASAQSFIERMTNFDKNLPNEKVLPKHSLLYEYFTVYNELTKVKYVTEGMRKPAFLSGEQKKAIVDLLFKTNRKVTVKQLKEDYFKKIECFDSVEISGVEDRFNASLGTYHDLLKIIKDKDFLDNEENEDILEDIVLTLTLFEDREMIEERLKTYAHLFDDKVMKQLKRRRYTGWGRLSRKLINGIRDKQSGKTILDFLKSDGFANRNFMQLIHDDSLTFKEDIQKAQVSGQGDSLHEHIANLAGSPAIKKGILQTVKVVDELVKVMGRHKPENIVIEMARENQTTQKGQKNSRERMKRIEEGIKELGSQILKEHPVENTQLQNEKLYLYYLQNGRDMYVDQELDINRLSDYDVDHIVPQSFLKDDSIDNKVLTRSDKARGKSDNVPSEEVVKKMKNYWRQLLNAKLITQRKFDNLTKAERGGLSELDKAGFIKRQLVETRQITKHVAQILDSRMNTKYDENDKLIREVKVITLKSKLVSDFRKDFQFYKVREINNYHHAHDAYLNAVVGTALIKKYPKLESEFVYGDYKVYDVRKMIAKSEQEIGKATAKYFFYSNIMNFFKTEITLANGEIRKRPLIETNGETGEIVWDKGRDFATVRKVLSMPQVNIVKKTEVQTGGFSKESILPKRNSDKLIARKKDWDPKKYGGFDSPTVAYSVLVVAKVEKGKSKKLKSVKELLGITIMERSSFEKNPIDFLEAKGYKEVKKDLIIKLPKYSLFELENGRKRMLASAGELQKGNELALPSKYVNFLYLASHYEKLKGSPEDNEQKQLFVEQHKHYLDEIIEQISEFSKRVILADANLDKVLSAYNKHRDKPIREQAENIIHLFTLTNLGAPAAFKYFDTTIDRKRYTSTKEVLDATLIHQSITGLYETRIDLSQLGGDGGGSSEAAAKGGGGGTAPLEEEYRLFLEAPIQNVTLLEQWKREIPKVWAEINPPGLASTQAPIHVQLLSTALPVRVRQYPITLEAKRSLRETIRKFRAAGILRPVHSPWNTPLLPVRKSGTSEYRMVQDLREVNKRVETIHPTVPNPYTLLSLLPPDRIWYSVLDLKDAFFCIPLAPESQLIFAFEWADAEEGESGQLTWTRLPQGFKNSPTLFNEALNRDLQGFRLDHPSVSLLQYVDDLLIAADTQAACLSATRDLLMTLAELGYRVSGKKAQLCQEEVTYLGFKIHKGSRSLSNSRTQAILQIPVPKTKRQVREFLGKIGYCRLFIPGFAELAQPLYAATRPGNDPLVWGEKEEEAFQSLKLALTQPPALALPSLDKPFQLFVEETSGAAKGVLTQALGPWKRPVAYLSKRLDPVAAGWPRCLRAIAAAALLTREASKLTFGQDIEITSSHNLESLLRSPPDKWLTNARITQYQVLLLDPPRVRFKQTAALNPATLLPETDDTLPIHHCLDTLDSLTSTRPDLTDQPLAQAEATLFTDGSSYIRDGKRYAGAAVVTLDSVIWAEPLPIGTSAQKAELIALTKALEWSKDKSVNIYTDSRYAFATLHVHGMIYRERGWLTAGGKAIKNAPEILALLTAVWLPKRVAVMHCKGHQKDDAPTSTGNRRADEVAREVAIRPLSTQATISAGKRTADGSEFEKRTADGSEFESPKKKAKVE

SEQ ID NO: 1395 - protein, 2098 aa, synthetic construct
MPAAKRVKLDGGDKKYSIGLDIGTNSVGWAVITDEYKVPSKKFKVLGNTDRHSIKKNLIGALLFDSGETAEATRLKRTARRRYTRRKNRICYLQEIFSNEMAKVDDSFFHRLEESFLVEEDKKHERHPIFGNIVDEVAYHEKYPTIYHLRKKLVDSTDKADLRLIYLALAHMIKFRGHFLIEGDLNPDNSDVDKLFIQLVQTYNQLFEENPINASGVDAKAILSARLSKSRRLENLIAQLPGEKKNGLFGNLIALSLGLTPNFKSNFDLAEDAKLQLSKDTYDDDLDNLLAQIGDQYADLFLAAKNLSDAILLSDILRVNTEITKAPLSASMIKRYDEHHQDLTLLKALVRQQLPEKYKEIFFDQSKNGYAGYIDGGASQEEFYKFIKPILEKMDGTEELLVKLNREDLLRKQRTFDNGSIPHQIHLGELHAILRRQEDFYPFLKDNREKIEKILTFRIPYYVGPLARGNSRFAWMTRKSEETITPWNFEEVVDKGASAQSFIERMTNFDKNLPNEKVLPKHSLLYEYFTVYNELTKVKYVTEGMRKPAFLSGEQKKAIVDLLFKTNRKVTVKQLKEDYFKKIECFDSVEISGVEDRFNASLGTYHDLLKIIKDKDFLDNEENEDILEDIVLTLTLFEDREMIEERLKTYAHLFDDKVMKQLKRRRYTGWGRLSRKLINGIRDKQSGKTILDFLKSDGFANRNFMQLIHDDSLTFKEDIQKAQVSGQGDSLHEHIANLAGSPAIKKGILQTVKVVDELVKVMGRHKPENIVIEMARENQTTQKGQKNSRERMKRIEEGIKELGSQILKEHPVENTQLQNEKLYLYYLQNGRDMYVDQELDINRLSDYDVDHIVPQSFLKDDSIDNKVLTRSDKARGKSDNVPSEEVVKKMKNYWRQLLNAKLITQRKFDNLTKAERGGLSELDKAGFIKRQLVETRQITKHVAQILDSRMNTKYDENDKLIREVKVITLKSKLVSDFRKDFQFYKVREINNYHHAHDAYLNAVVGTALIKKYPKLESEFVYGDYKVYDVRKMIAKSEQEIGKATAKYFFYSNIMNFFKTEITLANGEIRKRPLIETNGETGEIVWDKGRDFATVRKVLSMPQVNIVKKTEVQTGGFSKESILPKRNSDKLIARKKDWDPKKYGGFDSPTVAYSVLVVAKVEKGKSKKLKSVKELLGITIMERSSFEKNPIDFLEAKGYKEVKKDLIIKLPKYSLFELENGRKRMLASAGELQKGNELALPSKYVNFLYLASHYEKLKGSPEDNEQKQLFVEQHKHYLDEIIEQISEFSKRVILADANLDKVLSAYNKHRDKPIREQAENIIHLFTLTNLGAPAAFKYFDTTIDRKRYTSTKEVLDATLIHQSITGLYETRIDLSQLGGDGGGGGEAAAKGSSGGTAPLEEEYRLFLEAPIQNVTLLEQWKREIPKVWAEINPPGLASTQAPIHVQLLSTALPVRVRQYPITLEAKRSLRETIRKFRAAGILRPVHSPWNTPLLPVRKSGTSEYRMVQDLREVNKRVETIHPTVPNPYTLLSLLPPDRIWYSVLDLKDAFFCIPLAPESQLIFAFEWADAEEGESGQLTWTRLPQGFKNSPTLFNEALNRDLQGFRLDHPSVSLLQYVDDLLIAADTQAACLSATRDLLMTLAELGYRVSGKKAQLCQEEVTYLGFKIHKGSRSLSNSRTQAILQIPVPKTKRQVREFLGKIGYCRLFIPGFAELAQPLYAATRPGNDPLVWGEKEEEAFQSLKLALTQPPALALPSLDKPFQLFVEETSGAAKGVLTQALGPWKRPVAYLSKRLDPVAAGWPRCLRAIAAAALLTREASKLTFGQDIEITSSHNLESLLRSPPDKWLTNARITQYQVLLLDPPRVRFKQTAALNPATLLPETDDTLPIHHCLDTLDSLTSTRPDLTDQPLAQAEATLFTDGSSYIRDGKRYAGAAVVTLDSVIWAEPLPIGTSAQKAELIALTKALEWSKDKSVNIYTDSRYAFATLHVHGMIYRERGWLTAGGKAIKNAPEILALLTAVWLPKRVAVMHCKGHQKDDAPTSTGNRRADEVAREVAIRPLSTQATISAGKRTADGSEFEKRTADGSEFESPKKKAKVE

SEQ ID NO: 1396 - protein, 2093 aa, synthetic construct
MPAAKRVKLDGGDKKYSIGLDIGTNSVGWAVITDEYKVPSKKFKVLGNTDRHSIKKNLIGALLFDSGETAEATRLKRTARRRYTRRKNRICYLQEIFSNEMAKVDDSFFHRLEESFLVEEDKKHERHPIFGNIVDEVAYHEKYPTIYHLRKKLVDSTDKADLRLIYLALAHMIKFRGHFLIEGDLNPDNSDVDKLFIQLVQTYNQLFEENPINASGVDAKAILSARLSKSRRLENLIAQLPGEKKNGLFGNLIALSLGLTPNFKSNFDLAEDAKLQLSKDTYDDDLDNLLAQIGDQYADLFLAAKNLSDAILLSDILRVNTEITKAPLSASMIKRYDEHHQDLTLLKALVRQQLPEKYKEIFFDQSKNGYAGYIDGGASQEEFYKFIKPILEKMDGTEELLVKLNREDLLRKQRTFDNGSIPHQIHLGELHAILRRQEDFYPFLKDNREKIEKILTFRIPYYVGPLARGNSRFAWMTRKSEETITPWNFEEVVDKGASAQSFIERMTNFDKNLPNEKVLPKHSLLYEYFTVYNELTKVKYVTEGMRKPAFLSGEQKKAIVDLLFKTNRKVTVKQLKEDYFKKIECFDSVEISGVEDRFNASLGTYHDLLKIIKDKDFLDNEENEDILEDIVLTLTLFEDREMIEERLKTYAHLFDDKVMKQLKRRRYTGWGRLSRKLINGIRDKQSGKTILDFLKSDGFANRNFMQLIHDDSLTFKEDIQKAQVSGQGDSLHEHIANLAGSPAIKKGILQTVKVVDELVKVMGRHKPENIVIEMARENQTTQKGQKNSRERMKRIEEGIKELGSQILKEHPVENTQLQNEKLYLYYLQNGRDMYVDQELDINRLSDYDVDHIVPQSFLKDDSIDNKVLTRSDKARGKSDNVPSEEVVKKMKNYWRQLLNAKLITQRKFDNLTKAERGGLSELDKAGFIKRQLVETRQITKHVAQILDSRMNTKYDENDKLIREVKVITLKSKLVSDFRKDFQFYKVREINNYHHAHDAYLNAVVGTALIKKYPKLESEFVYGDYKVYDVRKMIAKSEQEIGKATAKYFFYSNIMNFFKTEITLANGEIRKRPLIETNGETGEIVWDKGRDFATVRKVLSMPQVNIVKKTEVQTGGFSKESILPKRNSDKLIARKKDWDPKKYGGFDSPTVAYSVLVVAKVEKGKSKKLKSVKELLGITIMERSSFEKNPIDFLEAKGYKEVKKDLIIKLPKYSLFELENGRKRMLASAGELQKGNELALPSKYVNFLYLASHYEKLKGSPEDNEQKQLFVEQHKHYLDEIIEQISEFSKRVILADANLDKVLSAYNKHRDKPIREQAENIIHLFTLTNLGAPAAFKYFDTTIDRKRYTSTKEVLDATLIHQSITGLYETRIDLSQLGGDGGGGGGGGGGTAPLEEEYRLFLEAPIQNVTLLEQWKREIPKVWAEINPPGLASTQAPIHVQLLSTALPVRVRQYPITLEAKRSLRETIRKFRAAGILRPVHSPWNTPLLPVRKSGTSEYRMVQDLREVNKRVETIHPTVPNPYTLLSLLPPDRIWYSVLDLKDAFFCIPLAPESQLIFAFEWADAEEGESGQLTWTRLPQGFKNSPTLFNEALNRDLQGFRLDHPSVSLLQYVDDLLIAADTQAACLSATRDLLMTLAELGYRVSGKKAQLCQEEVTYLGFKIHKGSRSLSNSRTQAILQIPVPKTKRQVREFLGKIGYCRLFIPGFAELAQPLYAATRPGNDPLVWGEKEEEAFQSLKLALTQPPALALPSLDKPFQLFVEETSGAAKGVLTQALGPWKRPVAYLSKRLDPVAAGWPRCLRAIAAAALLTREASKLTFGQDIEITSSHNLESLLRSPPDKWLTNARITQYQVLLLDPPRVRFKQTAALNPATLLPETDDTLPIHHCLDTLDSLTSTRPDLTDQPLAQAEATLFTDGSSYIRDGKRYAGAAVVTLDSVIWAEPLPIGTSAQKAELIALTKALEWSKDKSVNIYTDSRYAFATLHVHGMIYRERGWLTAGGKAIKNAPEILALLTAVWLPKRVAVMHCKGHQKDDAPTSTGNRRADEVAREVAIRPLSTQATISAGKRTADGSEFEKRTADGSEFESPKKKAKVE

SEQ ID NO: 1397 - protein, 2093 aa, synthetic construct
MPAAKRVKLDGGDKKYSIGLDIGTNSVGWAVITDEYKVPSKKFKVLGNTDRHSIKKNLIGALLFDSGETAEATRLKRTARRRYTRRKNRICYLQEIFSNEMAKVDDSFFHRLEESFLVEEDKKHERHPIFGNIVDEVAYHEKYPTIYHLRKKLVDSTDKADLRLIYLALAHMIKFRGHFLIEGDLNPDNSDVDKLFIQLVQTYNQLFEENPINASGVDAKAILSARLSKSRRLENLIAQLPGEKKNGLFGNLIALSLGLTPNFKSNFDLAEDAKLQLSKDTYDDDLDNLLAQIGDQYADLFLAAKNLSDAILLSDILRVNTEITKAPLSASMIKRYDEHHQDLTLLKALVRQQLPEKYKEIFFDQSKNGYAGYIDGGASQEEFYKFIKPILEKMDGTEELLVKLNREDLLRKQRTFDNGSIPHQIHLGELHAILRRQEDFYPFLKDNREKIEKILTFRIPYYVGPLARGNSRFAWMTRKSEETITPWNFEEVVDKGASAQSFIERMTNFDKNLPNEKVLPKHSLLYEYFTVYNELTKVKYVTEGMRKPAFLSGEQKKAIVDLLFKTNRKVTVKQLKEDYFKKIECFDSVEISGVEDRFNASLGTYHDLLKIIKDKDFLDNEENEDILEDIVLTLTLFEDREMIEERLKTYAHLFDDKVMKQLKRRRYTGWGRLSRKLINGIRDKQSGKTILDFLKSDGFANRNFMQLIHDDSLTFKEDIQKAQVSGQGDSLHEHIANLAGSPAIKKGILQTVKVVDELVKVMGRHKPENIVIEMARENQTTQKGQKNSRERMKRIEEGIKELGSQILKEHPVENTQLQNEKLYLYYLQNGRDMYVDQELDINRLSDYDVDHIVPQSFLKDDSIDNKVLTRSDKARGKSDNVPSEEVVKKMKNYWRQLLNAKLITQRKFDNLTKAERGGLSELDKAGFIKRQLVETRQITKHVAQILDSRMNTKYDENDKLIREVKVITLKSKLVSDFRKDFQFYKVREINNYHHAHDAYLNAVVGTALIKKYPKLESEFVYGDYKVYDVRKMIAKSEQEIGKATAKYFFYSNIMNFFKTEITLANGEIRKRPLIETNGETGEIVWDKGRDFATVRKVLSMPQVNIVKKTEVQTGGFSKESILPKRNSDKLIARKKDWDPKKYGGFDSPTVAYSVLVVAKVEKGKSKKLKSVKELLGITIMERSSFEKNPIDFLEAKGYKEVKKDLIIKLPKYSLFELENGRKRMLASAGELQKGNELALPSKYVNFLYLASHYEKLKGSPEDNEQKQLFVEQHKHYLDEIIEQISEFSKRVILADANLDKVLSAYNKHRDKPIREQAENIIHLFTLTNLGAPAAFKYFDTTIDRKRYTSTKEVLDATLIHQSITGLYETRIDLSQLGGDGGGGGPAPGGTAPLEEEYRLFLEAPIQNVTLLEQWKREIPKVWAEINPPGLASTQAPIHVQLLSTALPVRVRQYPITLEAKRSLRETIRKFRAAGILRPVHSPWNTPLLPVRKSGTSEYRMVQDLREVNKRVETIHPTVPNPYTLLSLLPPDRIWYSVLDLKDAFFCIPLAPESQLIFAFEWADAEEGESGQLTWTRLPQGFKNSPTLFNEALNRDLQGFRLDHPSVSLLQYVDDLLIAADTQAACLSATRDLLMTLAELGYRVSGKKAQLCQEEVTYLGFKIHKGSRSLSNSRTQAILQIPVPKTKRQVREFLGKIGYCRLFIPGFAELAQPLYAATRPGNDPLVWGEKEEEAFQSLKLALTQPPALALPSLDKPFQLFVEETSGAAKGVLTQALGPWKRPVAYLSKRLDPVAAGWPRCLRAIAAAALLTREASKLTFGQDIEITSSHNLESLLRSPPDKWLTNARITQYQVLLLDPPRVRFKQTAALNPATLLPETDDTLPIHHCLDTLDSLTSTRPDLTDQPLAQAEATLFTDGSSYIRDGKRYAGAAVVTLDSVIWAEPLPIGTSAQKAELIALTKALEWSKDKSVNIYTDSRYAFATLHVHGMIYRERGWLTAGGKAIKNAPEILALLTAVWLPKRVAVMHCKGHQKDDAPTSTGNRRADEVAREVAIRPLSTQATISAGKRTADGSEFEKRTADGSEFESPKKKAKVE

SEQ ID NO: 1398 - protein, 2099 aa, synthetic construct
MPAAKRVKLDGGDKKYSIGLDIGTNSVGWAVITDEYKVPSKKFKVLGNTDRHSIKKNLIGALLFDSGETAEATRLKRTARRRYTRRKNRICYLQEIFSNEMAKVDDSFFHRLEESFLVEEDKKHERHPIFGNIVDEVAYHEKYPTIYHLRKKLVDSTDKADLRLIYLALAHMIKFRGHFLIEGDLNPDNSDVDKLFIQLVQTYNQLFEENPINASGVDAKAILSARLSKSRRLENLIAQLPGEKKNGLFGNLIALSLGLTPNFKSNFDLAEDAKLQLSKDTYDDDLDNLLAQIGDQYADLFLAAKNLSDAILLSDILRVNTEITKAPLSASMIKRYDEHHQDLTLLKALVRQQLPEKYKEIFFDQSKNGYAGYIDGGASQEEFYKFIKPILEKMDGTEELLVKLNREDLLRKQRTFDNGSIPHQIHLGELHAILRRQEDFYPFLKDNREKIEKILTFRIPYYVGPLARGNSRFAWMTRKSEETITPWNFEEVVDKGASAQSFIERMTNFDKNLPNEKVLPKHSLLYEYFTVYNELTKVKYVTEGMRKPAFLSGEQKKAIVDLLFKTNRKVTVKQLKEDYFKKIECFDSVEISGVEDRFNASLGTYHDLLKIIKDKDFLDNEENEDILEDIVLTLTLFEDREMIEERLKTYAHLFDDKVMKQLKRRRYTGWGRLSRKLINGIRDKQSGKTILDFLKSDGFANRNFMQLIHDDSLTFKEDIQKAQVSGQGDSLHEHIANLAGSPAIKKGILQTVKVVDELVKVMGRHKPENIVIEMARENQTTQKGQKNSRERMKRIEEGIKELGSQILKEHPVENTQLQNEKLYLYYLQNGRDMYVDQELDINRLSDYDVDHIVPQSFLKDDSIDNKVLTRSDKARGKSDNVPSEEVVKKMKNYWRQLLNAKLITQRKFDNLTKAERGGLSELDKAGFIKRQLVETRQITKHVAQILDSRMNTKYDENDKLIREVKVITLKSKLVSDFRKDFQFYKVREINNYHHAHDAYLNAVVGTALIKKYPKLESEFVYGDYKVYDVRKMIAKSEQEIGKATAKYFFYSNIMNFFKTEITLANGEIRKRPLIETNGETGEIVWDKGRDFATVRKVLSMPQVNIVKKTEVQTGGFSKESILPKRNSDKLIARKKDWDPKKYGGFDSPTVAYSVLVVAKVEKGKSKKLKSVKELLGITIMERSSFEKNPIDFLEAKGYKEVKKDLIIKLPKYSLFELENGRKRMLASAGELQKGNELALPSKYVNFLYLASHYEKLKGSPEDNEQKQLFVEQHKHYLDEIIEQISEFSKRVILADANLDKVLSAYNKHRDKPIREQAENIIHLFTLTNLGAPAAFKYFDTTIDRKRYTSTKEVLDATLIHQSITGLYETRIDLSQLGGDGGGGSGGSGGSGGSGGTAPLEEEYRLFLEAPIQNVTLLEQWKREIPKVWAEINPPGLASTQAPIHVQLLSTALPVRVRQYPITLEAKRSLRETIRKFRAAGILRPVHSPWNTPLLPVRKSGTSEYRMVQDLREVNKRVETIHPTVPNPYTLLSLLPPDRIWYSVLDLKDAFFCIPLAPESQLIFAFEWADAEEGESGQLTWTRLPQGFKNSPTLFNEALNRDLQGFRLDHPSVSLLQYVDDLLIAADTQAACLSATRDLLMTLAELGYRVSGKKAQLCQEEVTYLGFKIHKGSRSLSNSRTQAILQIPVPKTKRQVREFLGKIGYCRLFIPGFAELAQPLYAATRPGNDPLVWGEKEEEAFQSLKLALTQPPALALPSLDKPFQLFVEETSGAAKGVLTQALGPWKRPVAYLSKRLDPVAAGWPRCLRAIAAAALLTREASKLTFGQDIEITSSHNLESLLRSPPDKWLTNARITQYQVLLLDPPRVRFKQTAALNPATLLPETDDTLPIHHCLDTLDSLTSTRPDLTDQPLAQAEATLFTDGSSYIRDGKRYAGAAVVTLDSVIWAEPLPIGTSAQKAELIALTKALEWSKDKSVNIYTDSRYAFATLHVHGMIYRERGWLTAGGKAIKNAPEILALLTAVWLPKRVAVMHCKGHQKDDAPTSTGNRRADEVAREVAIRPLSTQATISAGKRTADGSEFEKRTADGSEFESPKKKAKVE

SEQ ID NO: 1399 - protein, 2102 aa, synthetic construct
MPAAKRVKLDGGDKKYSIGLDIGTNSVGWAVITDEYKVPSKKFKVLGNTDRHSIKKNLIGALLFDSGETAEATRLKRTARRRYTRRKNRICYLQEIFSNEMAKVDDSFFHRLEESFLVEEDKKHERHPIFGNIVDEVAYHEKYPTIYHLRKKLVDSTDKADLRLIYLALAHMIKFRGHFLIEGDLNPDNSDVDKLFIQLVQTYNQLFEENPINASGVDAKAILSARLSKSRRLENLIAQLPGEKKNGLFGNLIALSLGLTPNFKSNFDLAEDAKLQLSKDTYDDDLDNLLAQIGDQYADLFLAAKNLSDAILLSDILRVNTEITKAPLSASMIKRYDEHHQDLTLLKALVRQQLPEKYKEIFFDQSKNGYAGYIDGGASQEEFYKFIKPILEKMDGTEELLVKLNREDLLRKQRTFDNGSIPHQIHLGELHAILRRQEDFYPFLKDNREKIEKILTFRIPYYVGPLARGNSRFAWMTRKSEETITPWNFEEVVDKGASAQSFIERMTNFDKNLPNEKVLPKHSLLYEYFTVYNELTKVKYVTEGMRKPAFLSGEQKKAIVDLLFKTNRKVTVKQLKEDYFKKIECFDSVEISGVEDRFNASLGTYHDLLKIIKDKDFLDNEENEDILEDIVLTLTLFEDREMIEERLKTYAHLFDDKVMKQLKRRRYTGWGRLSRKLINGIRDKQSGKTILDFLKSDGFANRNFMQLIHDDSLTFKEDIQKAQVSGQGDSLHEHIANLAGSPAIKKGILQTVKVVDELVKVMGRHKPENIVIEMARENQTTQKGQKNSRERMKRIEEGIKELGSQILKEHPVENTQLQNEKLYLYYLQNGRDMYVDQELDINRLSDYDVDHIVPQSFLKDDSIDNKVLTRSDKARGKSDNVPSEEVVKKMKNYWRQLLNAKLITQRKFDNLTKAERGGLSELDKAGFIKRQLVETRQITKHVAQILDSRMNTKYDENDKLIREVKVITLKSKLVSDFRKDFQFYKVREINNYHHAHDAYLNAVVGTALIKKYPKLESEFVYGDYKVYDVRKMIAKSEQEIGKATAKYFFYSNIMNFFKTEITLANGEIRKRPLIETNGETGEIVWDKGRDFATVRKVLSMPQVNIVKKTEVQTGGFSKESILPKRNSDKLIARKKDWDPKKYGGFDSPTVAYSVLVVAKVEKGKSKKLKSVKELLGITIMERSSFEKNPIDFLEAKGYKEVKKDLIIKLPKYSLFELENGRKRMLASAGELQKGNELALPSKYVNFLYLASHYEKLKGSPEDNEQKQLFVEQHKHYLDEIIEQISEFSKRVILADANLDKVLSAYNKHRDKPIREQAENIIHLFTLTNLGAPAAFKYFDTTIDRKRYTSTKEVLDATLIHQSITGLYETRIDLSQLGGDGGEAAAKGGGGSEAAAKGGTAPLEEEYRLFLEAPIQNVTLLEQWKREIPKVWAEINPPGLASTQAPIHVQLLSTALPVRVRQYPITLEAKRSLRETIRKFRAAGILRPVHSPWNTPLLPVRKSGTSEYRMVQDLREVNKRVETIHPTVPNPYTLLSLLPPDRIWYSVLDLKDAFFCIPLAPESQLIFAFEWADAEEGESGQLTWTRLPQGFKNSPTLFNEALNRDLQGFRLDHPSVSLLQYVDDLLIAADTQAACLSATRDLLMTLAELGYRVSGKKAQLCQEEVTYLGFKIHKGSRSLSNSRTQAILQIPVPKTKRQVREFLGKIGYCRLFIPGFAELAQPLYAATRPGNDPLVWGEKEEEAFQSLKLALTQPPALALPSLDKPFQLFVEETSGAAKGVLTQALGPWKRPVAYLSKRLDPVAAGWPRCLRAIAAAALLTREASKLTFGQDIEITSSHNLESLLRSPPDKWLTNARITQYQVLLLDPPRVRFKQTAALNPATLLPETDDTLPIHHCLDTLDSLTSTRPDLTDQPLAQAEATLFTDGSSYIRDGKRYAGAAVVTLDSVIWAEPLPIGTSAQKAELIALTKALEWSKDKSVNIYTDSRYAFATLHVHGMIYRERGWLTAGGKAIKNAPEILALLTAVWLPKRVAVMHCKGHQKDDAPTSTGNRRADEVAREVAIRPLSTQATISAGKRTADGSEFEKRTADGSEFESPKKKAKVE

SEQ ID NO: 1400 - protein, 2112 aa, synthetic construct
MPAAKRVKLDGGDKKYSIGLDIGTNSVGWAVITDEYKVPSKKFKVLGNTDRHSIKKNLIGALLFDSGETAEATRLKRTARRRYTRRKNRICYLQEIFSNEMAKVDDSFFHRLEESFLVEEDKKHERHPIFGNIVDEVAYHEKYPTIYHLRKKLVDSTDKADLRLIYLALAHMIKFRGHFLIEGDLNPDNSDVDKLFIQLVQTYNQLFEENPINASGVDAKAILSARLSKSRRLENLIAQLPGEKKNGLFGNLIALSLGLTPNFKSNFDLAEDAKLQLSKDTYDDDLDNLLAQIGDQYADLFLAAKNLSDAILLSDILRVNTEITKAPLSASMIKRYDEHHQDLTLLKALVRQQLPEKYKEIFFDQSKNGYAGYIDGGASQEEFYKFIKPILEKMDGTEELLVKLNREDLLRKQRTFDNGSIPHQIHLGELHAILRRQEDFYPFLKDNREKIEKILTFRIPYYVGPLARGNSRFAWMTRKSEETITPWNFEEVVDKGASAQSFIERMTNFDKNLPNEKVLPKHSLLYEYFTVYNELTKVKYVTEGMRKPAFLSGEQKKAIVDLLFKTNRKVTVKQLKEDYFKKIECFDSVEISGVEDRFNASLGTYHDLLKIIKDKDFLDNEENEDILEDIVLTLTLFEDREMIEERLKTYAHLFDDKVMKQLKRRRYTGWGRLSRKLINGIRDKQSGKTILDFLKSDGFANRNFMQLIHDDSLTFKEDIQKAQVSGQGDSLHEHIANLAGSPAIKKGILQTVKVVDELVKVMGRHKPENIVIEMARENQTTQKGQKNSRERMKRIEEGIKELGSQILKEHPVENTQLQNEKLYLYYLQNGRDMYVDQELDINRLSDYDVDHIVPQSFLKDDSIDNKVLTRSDKARGKSDNVPSEEVVKKMKNYWRQLLNAKLITQRKFDNLTKAERGGLSELDKAGFIKRQLVETRQITKHVAQILDSRMNTKYDENDKLIREVKVITLKSKLVSDFRKDFQFYKVREINNYHHAHDAYLNAVVGTALIKKYPKLESEFVYGDYKVYDVRKMIAKSEQEIGKATAKYFFYSNIMNFFKTEITLANGEIRKRPLIETNGETGEIVWDKGRDFATVRKVLSMPQVNIVKKTEVQTGGFSKESILPKRNSDKLIARKKDWDPKKYGGFDSPTVAYSVLVVAKVEKGKSKKLKSVKELLGITIMERSSFEKNPIDFLEAKGYKEVKKDLIIKLPKYSLFELENGRKRMLASAGELQKGNELALPSKYVNFLYLASHYEKLKGSPEDNEQKQLFVEQHKHYLDEIIEQISEFSKRVILADANLDKVLSAYNKHRDKPIREQAENIIHLFTLTNLGAPAAFKYFDTTIDRKRYTSTKEVLDATLIHQSITGLYETRIDLSQLGGDGGEAAAKEAAAKEAAAKEAAAKEAAAKGGTAPLEEEYRLFLEAPIQNVTLLEQWKREIPKVWAEINPPGLASTQAPIHVQLLSTALPVRVRQYPITLEAKRSLRETIRKFRAAGILRPVHSPWNTPLLPVRKSGTSEYRMVQDLREVNKRVETIHPTVPNPYTLLSLLPPDRIWYSVLDLKDAFFCIPLAPESQLIFAFEWADAEEGESGQLTWTRLPQGFKNSPTLFNEALNRDLQGFRLDHPSVSLLQYVDDLLIAADTQAACLSATRDLLMTLAELGYRVSGKKAQLCQEEVTYLGFKIHKGSRSLSNSRTQAILQIPVPKTKRQVREFLGKIGYCRLFIPGFAELAQPLYAATRPGNDPLVWGEKEEEAFQSLKLALTQPPALALPSLDKPFQLFVEETSGAAKGVLTQALGPWKRPVAYLSKRLDPVAAGWPRCLRAIAAAALLTREASKLTFGQDIEITSSHNLESLLRSPPDKWLTNARITQYQVLLLDPPRVRFKQTAALNPATLLPETDDTLPIHHCLDTLDSLTSTRPDLTDQPLAQAEATLFTDGSSYIRDGKRYAGAAVVTLDSVIWAEPLPIGTSAQKAELIALTKALEWSKDKSVNIYTDSRYAFATLHVHGMIYRERGWLTAGGKAIKNAPEILALLTAVWLPKRVAVMHCKGHQKDDAPTSTGNRRADEVAREVAIRPLSTQATISAGKRTADGSEFEKRTADGSEFESPKKKAKVE

SEQ ID NO: 1401 - protein, 2096 aa, synthetic construct
MPAAKRVKLDGGDKKYSIGLDIGTNSVGWAVITDEYKVPSKKFKVLGNTDRHSIKKNLIGALLFDSGETAEATRLKRTARRRYTRRKNRICYLQEIFSNEMAKVDDSFFHRLEESFLVEEDKKHERHPIFGNIVDEVAYHEKYPTIYHLRKKLVDSTDKADLRLIYLALAHMIKFRGHFLIEGDLNPDNSDVDKLFIQLVQTYNQLFEENPINASGVDAKAILSARLSKSRRLENLIAQLPGEKKNGLFGNLIALSLGLTPNFKSNFDLAEDAKLQLSKDTYDDDLDNLLAQIGDQYADLFLAAKNLSDAILLSDILRVNTEITKAPLSASMIKRYDEHHQDLTLLKALVRQQLPEKYKEIFFDQSKNGYAGYIDGGASQEEFYKFIKPILEKMDGTEELLVKLNREDLLRKQRTFDNGSIPHQIHLGELHAILRRQEDFYPFLKDNREKIEKILTFRIPYYVGPLARGNSRFAWMTRKSEETITPWNFEEVVDKGASAQSFIERMTNFDKNLPNEKVLPKHSLLYEYFTVYNELTKVKYVTEGMRKPAFLSGEQKKAIVDLLFKTNRKVTVKQLKEDYFKKIECFDSVEISGVEDRFNASLGTYHDLLKIIKDKDFLDNEENEDILEDIVLTLTLFEDREMIEERLKTYAHLFDDKVMKQLKRRRYTGWGRLSRKLINGIRDKQSGKTILDFLKSDGFANRNFMQLIHDDSLTFKEDIQKAQVSGQGDSLHEHIANLAGSPAIKKGILQTVKVVDELVKVMGRHKPENIVIEMARENQTTQKGQKNSRERMKRIEEGIKELGSQILKEHPVENTQLQNEKLYLYYLQNGRDMYVDQELDINRLSDYDVDHIVPQSFLKDDSIDNKVLTRSDKARGKSDNVPSEEVVKKMKNYWRQLLNAKLITQRKFDNLTKAERGGLSELDKAGFIKRQLVETRQITKHVAQILDSRMNTKYDENDKLIREVKVITLKSKLVSDFRKDFQFYKVREINNYHHAHDAYLNAVVGTALIKKYPKLESEFVYGDYKVYDVRKMIAKSEQEIGKATAKYFFYSNIMNFFKTEITLANGEIRKRPLIETNGETGEIVWDKGRDFATVRKVLSMPQVNIVKKTEVQTGGFSKESILPKRNSDKLIARKKDWDPKKYGGFDSPTVAYSVLVVAKVEKGKSKKLKSVKELLGITIMERSSFEKNPIDFLEAKGYKEVKKDLIIKLPKYSLFELENGRKRMLASAGELQKGNELALPSKYVNFLYLASHYEKLKGSPEDNEQKQLFVEQHKHYLDEIIEQISEFSKRVILADANLDKVLSAYNKHRDKPIREQAENIIHLFTLTNLGAPAAFKYFDTTIDRKRYTSTKEVLDATLIHQSITGLYETRIDLSQLGGDGGPAPGSSGGSGGTAPLEEEYRLFLEAPIQNVTLLEQWKREIPKVWAEINPPGLASTQAPIHVQLLSTALPVRVRQYPITLEAKRSLRETIRKFRAAGILRPVHSPWNTPLLPVRKSGTSEYRMVQDLREVNKRVETIHPTVPNPYTLLSLLPPDRIWYSVLDLKDAFFCIPLAPESQLIFAFEWADAEEGESGQLTWTRLPQGFKNSPTLFNEALNRDLQGFRLDHPSVSLLQYVDDLLIAADTQAACLSATRDLLMTLAELGYRVSGKKAQLCQEEVTYLGFKIHKGSRSLSNSRTQAILQIPVPKTKRQVREFLGKIGYCRLFIPGFAELAQPLYAATRPGNDPLVWGEKEEEAFQSLKLALTQPPALALPSLDKPFQLFVEETSGAAKGVLTQALGPWKRPVAYLSKRLDPVAAGWPRCLRAIAAAALLTREASKLTFGQDIEITSSHNLESLLRSPPDKWLTNARITQYQVLLLDPPRVRFKQTAALNPATLLPETDDTLPIHHCLDTLDSLTSTRPDLTDQPLAQAEATLFTDGSSYIRDGKRYAGAAVVTLDSVIWAEPLPIGTSAQKAELIALTKALEWSKDKSVNIYTDSRYAFATLHVHGMIYRERGWLTAGGKAIKNAPEILALLTAVWLPKRVAVMHCKGHQKDDAPTSTGNRRADEVAREVAIRPLSTQATISAGKRTADGSEFEKRTADGSEFESPKKKAKVE

SEQ ID NO: 1402 - protein, 2096 aa, synthetic construct
MPAAKRVKLDGGDKKYSIGLDIGTNSVGWAVITDEYKVPSKKFKVLGNTDRHSIKKNLIGALLFDSGETAEATRLKRTARRRYTRRKNRICYLQEIFSNEMAKVDDSFFHRLEESFLVEEDKKHERHPIFGNIVDEVAYHEKYPTIYHLRKKLVDSTDKADLRLIYLALAHMIKFRGHFLIEGDLNPDNSDVDKLFIQLVQTYNQLFEENPINASGVDAKAILSARLSKSRRLENLIAQLPGEKKNGLFGNLIALSLGLTPNFKSNFDLAEDAKLQLSKDTYDDDLDNLLAQIGDQYADLFLAAKNLSDAILLSDILRVNTEITKAPLSASMIKRYDEHHQDLTLLKALVRQQLPEKYKEIFFDQSKNGYAGYIDGGASQEEFYKFIKPILEKMDGTEELLVKLNREDLLRKQRTFDNGSIPHQIHLGELHAILRRQEDFYPFLKDNREKIEKILTFRIPYYVGPLARGNSRFAWMTRKSEETITPWNFEEVVDKGASAQSFIERMTNFDKNLPNEKVLPKHSLLYEYFTVYNELTKVKYVTEGMRKPAFLSGEQKKAIVDLLFKTNRKVTVKQLKEDYFKKIECFDSVEISGVEDRFNASLGTYHDLLKIIKDKDFLDNEENEDILEDIVLTLTLFEDREMIEERLKTYAHLFDDKVMKQLKRRRYTGWGRLSRKLINGIRDKQSGKTILDFLKSDGFANRNFMQLIHDDSLTFKEDIQKAQVSGQGDSLHEHIANLAGSPAIKKGILQTVKVVDELVKVMGRHKPENIVIEMARENQTTQKGQKNSRERMKRIEEGIKELGSQILKEHPVENTQLQNEKLYLYYLQNGRDMYVDQELDINRLSDYDVDHIVPQSFLKDDSIDNKVLTRSDKARGKSDNVPSEEVVKKMKNYWRQLLNAKLITQRKFDNLTKAERGGLSELDKAGFIKRQLVETRQITKHVAQILDSRMNTKYDENDKLIREVKVITLKSKLVSDFRKDFQFYKVREINNYHHAHDAYLNAVVGTALIKKYPKLESEFVYGDYKVYDVRKMIAKSEQEIGKATAKYFFYSNIMNFFKTEITLANGEIRKRPLIETNGETGEIVWDKGRDFATVRKVLSMPQVNIVKKTEVQTGGFSKESILPKRNSDKLIARKKDWDPKKYGGFDSPTVAYSVLVVAKVEKGKSKKLKSVKELLGITIMERSSFEKNPIDFLEAKGYKEVKKDLIIKLPKYSLFELENGRKRMLASAGELQKGNELALPSKYVNFLYLASHYEKLKGSPEDNEQKQLFVEQHKHYLDEIIEQISEFSKRVILADANLDKVLSAYNKHRDKPIREQAENIIHLFTLTNLGAPAAFKYFDTTIDRKRYTSTKEVLDATLIHQSITGLYETRIDLSQLGGDGGGGGPAPGGSGGTAPLEEEYRLFLEAPIQNVTLLEQWKREIPKVWAEINPPGLASTQAPIHVQLLSTALPVRVRQYPITLEAKRSLRETIRKFRAAGILRPVHSPWNTPLLPVRKSGTSEYRMVQDLREVNKRVETIHPTVPNPYTLLSLLPPDRIWYSVLDLKDAFFCIPLAPESQLIFAFEWADAEEGESGQLTWTRLPQGFKNSPTLFNEALNRDLQGFRLDHPSVSLLQYVDDLLIAADTQAACLSATRDLLMTLAELGYRVSGKKAQLCQEEVTYLGFKIHKGSRSLSNSRTQAILQIPVPKTKRQVREFLGKIGYCRLFIPGFAELAQPLYAATRPGNDPLVWGEKEEEAFQSLKLALTQPPALALPSLDKPFQLFVEETSGAAKGVLTQALGPWKRPVAYLSKRLDPVAAGWPRCLRAIAAAALLTREASKLTFGQDIEITSSHNLESLLRSPPDKWLTNARITQYQVLLLDPPRVRFKQTAALNPATLLPETDDTLPIHHCLDTLDSLTSTRPDLTDQPLAQAEATLFTDGSSYIRDGKRYAGAAVVTLDSVIWAEPLPIGTSAQKAELIALTKALEWSKDKSVNIYTDSRYAFATLHVHGMIYRERGWLTAGGKAIKNAPEILALLTAVWLPKRVAVMHCKGHQKDDAPTSTGNRRADEVAREVAIRPLSTQATISAGKRTADGSEFEKRTADGSEFESPKKKAKVE

SEQ ID NO: 1403 - protein, 2096 aa, synthetic construct
MPAAKRVKLDGGDKKYSIGLDIGTNSVGWAVITDEYKVPSKKFKVLGNTDRHSIKKNLIGALLFDSGETAEATRLKRTARRRYTRRKNRICYLQEIFSNEMAKVDDSFFHRLEESFLVEEDKKHERHPIFGNIVDEVAYHEKYPTIYHLRKKLVDSTDKADLRLIYLALAHMIKFRGHFLIEGDLNPDNSDVDKLFIQLVQTYNQLFEENPINASGVDAKAILSARLSKSRRLENLIAQLPGEKKNGLFGNLIALSLGLTPNFKSNFDLAEDAKLQLSKDTYDDDLDNLLAQIGDQYADLFLAAKNLSDAILLSDILRVNTEITKAPLSASMIKRYDEHHQDLTLLKALVRQQLPEKYKEIFFDQSKNGYAGYIDGGASQEEFYKFIKPILEKMDGTEELLVKLNREDLLRKQRTFDNGSIPHQIHLGELHAILRRQEDFYPFLKDNREKIEKILTFRIPYYVGPLARGNSRFAWMTRKSEETITPWNFEEVVDKGASAQSFIERMTNFDKNLPNEKVLPKHSLLYEYFTVYNELTKVKYVTEGMRKPAFLSGEQKKAIVDLLFKTNRKVTVKQLKEDYFKKIECFDSVEISGVEDRFNASLGTYHDLLKIIKDKDFLDNEENEDILEDIVLTLTLFEDREMIEERLKTYAHLFDDKVMKQLKRRRYTGWGRLSRKLINGIRDKQSGKTILDFLKSDGFANRNFMQLIHDDSLTFKEDIQKAQVSGQGDSLHEHIANLAGSPAIKKGILQTVKVVDELVKVMGRHKPENIVIEMARENQTTQKGQKNSRERMKRIEEGIKELGSQILKEHPVENTQLQNEKLYLYYLQNGRDMYVDQELDINRLSDYDVDHIVPQSFLKDDSIDNKVLTRSDKARGKSDNVPSEEVVKKMKNYWRQLLNAKLITQRKFDNLTKAERGGLSELDKAGFIKRQLVETRQITKHVAQILDSRMNTKYDENDKLIREVKVITLKSKLVSDFRKDFQFYKVREINNYHHAHDAYLNAVVGTALIKKYPKLESEFVYGDYKVYDVRKMIAKSEQEIGKATAKYFFYSNIMNFFKTEITLANGEIRKRPLIETNGETGEIVWDKGRDFATVRKVLSMPQVNIVKKTEVQTGGFSKESILPKRNSDKLIARKKDWDPKKYGGFDSPTVAYSVLVVAKVEKGKSKKLKSVKELLGITIMERSSFEKNPIDFLEAKGYKEVKKDLIIKLPKYSLFELENGRKRMLASAGELQKGNELALPSKYVNFLYLASHYEKLKGSPEDNEQKQLFVEQHKHYLDEIIEQISEFSKRVILADANLDKVLSAYNKHRDKPIREQAENIIHLFTLTNLGAPAAFKYFDTTIDRKRYTSTKEVLDATLIHQSITGLYETRIDLSQLGGDGGPAPGGSGGGGGTAPLEEEYRLFLEAPIQNVTLLEQWKREIPKVWAEINPPGLASTQAPIHVQLLSTALPVRVRQYPITLEAKRSLRETIRKFRAAGILRPVHSPWNTPLLPVRKSGTSEYRMVQDLREVNKRVETIHPTVPNPYTLLSLLPPDRIWYSVLDLKDAFFCIPLAPESQLIFAFEWADAEEGESGQLTWTRLPQGFKNSPTLFNEALNRDLQGFRLDHPSVSLLQYVDDLLIAADTQAACLSATRDLLMTLAELGYRVSGKKAQLCQEEVTYLGFKIHKGSRSLSNSRTQAILQIPVPKTKRQVREFLGKIGYCRLFIPGFAELAQPLYAATRPGNDPLVWGEKEEEAFQSLKLALTQPPALALPSLDKPFQLFVEETSGAAKGVLTQALGPWKRPVAYLSKRLDPVAAGWPRCLRAIAAAALLTREASKLTFGQDIEITSSHNLESLLRSPPDKWLTNARITQYQVLLLDPPRVRFKQTAALNPATLLPETDDTLPIHHCLDTLDSLTSTRPDLTDQPLAQAEATLFTDGSSYIRDGKRYAGAAVVTLDSVIWAEPLPIGTSAQKAELIALTKALEWSKDKSVNIYTDSRYAFATLHVHGMIYRERGWLTAGGKAIKNAPEILALLTAVWLPKRVAVMHCKGHQKDDAPTSTGNRRADEVAREVAIRPLSTQATISAGKRTADGSEFEKRTADGSEFESPKKKAKVE

SEQ ID NO: 1404 - protein, 2098 aa, synthetic construct
MPAAKRVKLDGGDKKYSIGLDIGTNSVGWAVITDEYKVPSKKFKVLGNTDRHSIKKNLIGALLFDSGETAEATRLKRTARRRYTRRKNRICYLQEIFSNEMAKVDDSFFHRLEESFLVEEDKKHERHPIFGNIVDEVAYHEKYPTIYHLRKKLVDSTDKADLRLIYLALAHMIKFRGHFLIEGDLNPDNSDVDKLFIQLVQTYNQLFEENPINASGVDAKAILSARLSKSRRLENLIAQLPGEKKNGLFGNLIALSLGLTPNFKSNFDLAEDAKLQLSKDTYDDDLDNLLAQIGDQYADLFLAAKNLSDAILLSDILRVNTEITKAPLSASMIKRYDEHHQDLTLLKALVRQQLPEKYKEIFFDQSKNGYAGYIDGGASQEEFYKFIKPILEKMDGTEELLVKLNREDLLRKQRTFDNGSIPHQIHLGELHAILRRQEDFYPFLKDNREKIEKILTFRIPYYVGPLARGNSRFAWMTRKSEETITPWNFEEVVDKGASAQSFIERMTNFDKNLPNEKVLPKHSLLYEYFTVYNELTKVKYVTEGMRKPAFLSGEQKKAIVDLLFKTNRKVTVKQLKEDYFKKIECFDSVEISGVEDRFNASLGTYHDLLKIIKDKDFLDNEENEDILEDIVLTLTLFEDREMIEERLKTYAHLFDDKVMKQLKRRRYTGWGRLSRKLINGIRDKQSGKTILDFLKSDGFANRNFMQLIHDDSLTFKEDIQKAQVSGQGDSLHEHIANLAGSPAIKKGILQTVKVVDELVKVMGRHKPENIVIEMARENQTTQKGQKNSRERMKRIEEGIKELGSQILKEHPVENTQLQNEKLYLYYLQNGRDMYVDQELDINRLSDYDVDHIVPQSFLKDDSIDNKVLTRSDKARGKSDNVPSEEVVKKMKNYWRQLLNAKLITQRKFDNLTKAERGGLSELDKAGFIKRQLVETRQITKHVAQILDSRMNTKYDENDKLIREVKVITLKSKLVSDFRKDFQFYKVREINNYHHAHDAYLNAVVGTALIKKYPKLESEFVYGDYKVYDVRKMIAKSEQEIGKATAKYFFYSNIMNFFKTEITLANGEIRKRPLIETNGETGEIVWDKGRDFATVRKVLSMPQVNIVKKTEVQTGGFSKESILPKRNSDKLIARKKDWDPKKYGGFDSPTVAYSVLVVAKVEKGKSKKLKSVKELLGITIMERSSFEKNPIDFLEAKGYKEVKKDLIIKLPKYSLFELENGRKRMLASAGELQKGNELALPSKYVNFLYLASHYEKLKGSPEDNEQKQLFVEQHKHYLDEIIEQISEFSKRVILADANLDKVLSAYNKHRDKPIREQAENIIHLFTLTNLGAPAAFKYFDTTIDRKRYTSTKEVLDATLIHQSITGLYETRIDLSQLGGDGGGGGGSSEAAAKGGTAPLEEEYRLFLEAPIQNVTLLEQWKREIPKVWAEINPPGLASTQAPIHVQLLSTALPVRVRQYPITLEAKRSLRETIRKFRAAGILRPVHSPWNTPLLPVRKSGTSEYRMVQDLREVNKRVETIHPTVPNPYTLLSLLPPDRIWYSVLDLKDAFFCIPLAPESQLIFAFEWADAEEGESGQLTWTRLPQGFKNSPTLFNEALNRDLQGFRLDHPSVSLLQYVDDLLIAADTQAACLSATRDLLMTLAELGYRVSGKKAQLCQEEVTYLGFKIHKGSRSLSNSRTQAILQIPVPKTKRQVREFLGKIGYCRLFIPGFAELAQPLYAATRPGNDPLVWGEKEEEAFQSLKLALTQPPALALPSLDKPFQLFVEETSGAAKGVLTQALGPWKRPVAYLSKRLDPVAAGWPRCLRAIAAAALLTREASKLTFGQDIEITSSHNLESLLRSPPDKWLTNARITQYQVLLLDPPRVRFKQTAALNPATLLPETDDTLPIHHCLDTLDSLTSTRPDLTDQPLAQAEATLFTDGSSYIRDGKRYAGAAVVTLDSVIWAEPLPIGTSAQKAELIALTKALEWSKDKSVNIYTDSRYAFATLHVHGMIYRERGWLTAGGKAIKNAPEILALLTAVWLPKRVAVMHCKGHQKDDAPTSTGNRRADEVAREVAIRPLSTQATISAGKRTADGSEFEKRTADGSEFESPKKKAKVE

SEQ ID NO: 1405 - protein, 2095 aa, synthetic construct
MPAAKRVKLDGGDKKYSIGLDIGTNSVGWAVITDEYKVPSKKFKVLGNTDRHSIKKNLIGALLFDSGETAEATRLKRTARRRYTRRKNRICYLQEIFSNEMAKVDDSFFHRLEESFLVEEDKKHERHPIFGNIVDEVAYHEKYPTIYHLRKKLVDSTDKADLRLIYLALAHMIKFRGHFLIEGDLNPDNSDVDKLFIQLVQTYNQLFEENPINASGVDAKAILSARLSKSRRLENLIAQLPGEKKNGLFGNLIALSLGLTPNFKSNFDLAEDAKLQLSKDTYDDDLDNLLAQIGDQYADLFLAAKNLSDAILLSDILRVNTEITKAPLSASMIKRYDEHHQDLTLLKALVRQQLPEKYKEIFFDQSKNGYAGYIDGGASQEEFYKFIKPILEKMDGTEELLVKLNREDLLRKQRTFDNGSIPHQIHLGELHAILRRQEDFYPFLKDNREKIEKILTFRIPYYVGPLARGNSRFAWMTRKSEETITPWNFEEVVDKGASAQSFIERMTNFDKNLPNEKVLPKHSLLYEYFTVYNELTKVKYVTEGMRKPAFLSGEQKKAIVDLLFKTNRKVTVKQLKEDYFKKIECFDSVEISGVEDRFNASLGTYHDLLKIIKDKDFLDNEENEDILEDIVLTLTLFEDREMIEERLKTYAHLFDDKVMKQLKRRRYTGWGRLSRKLINGIRDKQSGKTILDFLKSDGFANRNFMQLIHDDSLTFKEDIQKAQVSGQGDSLHEHIANLAGSPAIKKGILQTVKVVDELVKVMGRHKPENIVIEMARENQTTQKGQKNSRERMKRIEEGIKELGSQILKEHPVENTQLQNEKLYLYYLQNGRDMYVDQELDINRLSDYDVDHIVPQSFLKDDSIDNKVLTRSDKARGKSDNVPSEEVVKKMKNYWRQLLNAKLITQRKFDNLTKAERGGLSELDKAGFIKRQLVETRQITKHVAQILDSRMNTKYDENDKLIREVKVITLKSKLVSDFRKDFQFYKVREINNYHHAHDAYLNAVVGTALIKKYPKLESEFVYGDYKVYDVRKMIAKSEQEIGKATAKYFFYSNIMNFFKTEITLANGEIRKRPLIETNGETGEIVWDKGRDFATVRKVLSMPQVNIVKKTEVQTGGFSKESILPKRNSDKLIARKKDWDPKKYGGFDSPTVAYSVLVVAKVEKGKSKKLKSVKELLGITIMERSSFEKNPIDFLEAKGYKEVKKDLIIKLPKYSLFELENGRKRMLASAGELQKGNELALPSKYVNFLYLASHYEKLKGSPEDNEQKQLFVEQHKHYLDEIIEQISEFSKRVILADANLDKVLSAYNKHRDKPIREQAENIIHLFTLTNLGAPAAFKYFDTTIDRKRYTSTKEVLDATLIHQSITGLYETRIDLSQLGGDGGGSSEAAAKGGTAPLEEEYRLFLEAPIQNVTLLEQWKREIPKVWAEINPPGLASTQAPIHVQLLSTALPVRVRQYPITLEAKRSLRETIRKFRAAGILRPVHSPWNTPLLPVRKSGTSEYRMVQDLREVNKRVETIHPTVPNPYTLLSLLPPDRIWYSVLDLKDAFFCIPLAPESQLIFAFEWADAEEGESGQLTWTRLPQGFKNSPTLFNEALNRDLQGFRLDHPSVSLLQYVDDLLIAADTQAACLSATRDLLMTLAELGYRVSGKKAQLCQEEVTYLGFKIHKGSRSLSNSRTQAILQIPVPKTKRQVREFLGKIGYCRLFIPGFAELAQPLYAATRPGNDPLVWGEKEEEAFQSLKLALTQPPALALPSLDKPFQLFVEETSGAAKGVLTQALGPWKRPVAYLSKRLDPVAAGWPRCLRAIAAAALLTREASKLTFGQDIEITSSHNLESLLRSPPDKWLTNARITQYQVLLLDPPRVRFKQTAALNPATLLPETDDTLPIHHCLDTLDSLTSTRPDLTDQPLAQAEATLFTDGSSYIRDGKRYAGAAVVTLDSVIWAEPLPIGTSAQKAELIALTKALEWSKDKSVNIYTDSRYAFATLHVHGMIYRERGWLTAGGKAIKNAPEILALLTAVWLPKRVAVMHCKGHQKDDAPTSTGNRRADEVAREVAIRPLSTQATISAGKRTADGSEFEKRTADGSEFESPKKKAKVE

SEQ ID NO: 1406 - protein, 2098 aa, synthetic construct
MPAAKRVKLDGGDKKYSIGLDIGTNSVGWAVITDEYKVPSKKFKVLGNTDRHSIKKNLIGALLFDSGETAEATRLKRTARRRYTRRKNRICYLQEIFSNEMAKVDDSFFHRLEESFLVEEDKKHERHPIFGNIVDEVAYHEKYPTIYHLRKKLVDSTDKADLRLIYLALAHMIKFRGHFLIEGDLNPDNSDVDKLFIQLVQTYNQLFEENPINASGVDAKAILSARLSKSRRLENLIAQLPGEKKNGLFGNLIALSLGLTPNFKSNFDLAEDAKLQLSKDTYDDDLDNLLAQIGDQYADLFLAAKNLSDAILLSDILRVNTEITKAPLSASMIKRYDEHHQDLTLLKALVRQQLPEKYKEIFFDQSKNGYAGYIDGGASQEEFYKFIKPILEKMDGTEELLVKLNREDLLRKQRTFDNGSIPHQIHLGELHAILRRQEDFYPFLKDNREKIEKILTFRIPYYVGPLARGNSRFAWMTRKSEETITPWNFEEVVDKGASAQSFIERMTNFDKNLPNEKVLPKHSLLYEYFTVYNELTKVKYVTEGMRKPAFLSGEQKKAIVDLLFKTNRKVTVKQLKEDYFKKIECFDSVEISGVEDRFNASLGTYHDLLKIIKDKDFLDNEENEDILEDIVLTLTLFEDREMIEERLKTYAHLFDDKVMKQLKRRRYTGWGRLSRKLINGIRDKQSGKTILDFLKSDGFANRNFMQLIHDDSLTFKEDIQKAQVSGQGDSLHEHIANLAGSPAIKKGILQTVKVVDELVKVMGRHKPENIVIEMARENQTTQKGQKNSRERMKRIEEGIKELGSQILKEHPVENTQLQNEKLYLYYLQNGRDMYVDQELDINRLSDYDVDHIVPQSFLKDDSIDNKVLTRSDKARGKSDNVPSEEVVKKMKNYWRQLLNAKLITQRKFDNLTKAERGGLSELDKAGFIKRQLVETRQITKHVAQILDSRMNTKYDENDKLIREVKVITLKSKLVSDFRKDFQFYKVREINNYHHAHDAYLNAVVGTALIKKYPKLESEFVYGDYKVYDVRKMIAKSEQEIGKATAKYFFYSNIMNFFKTEITLANGEIRKRPLIETNGETGEIVWDKGRDFATVRKVLSMPQVNIVKKTEVQTGGFSKESILPKRNSDKLIARKKDWDPKKYGGFDSPTVAYSVLVVAKVEKGKSKKLKSVKELLGITIMERSSFEKNPIDFLEAKGYKEVKKDLIIKLPKYSLFELENGRKRMLASAGELQKGNELALPSKYVNFLYLASHYEKLKGSPEDNEQKQLFVEQHKHYLDEIIEQISEFSKRVILADANLDKVLSAYNKHRDKPIREQAENIIHLFTLTNLGAPAAFKYFDTTIDRKRYTSTKEVLDATLIHQSITGLYETRIDLSQLGGDGGEAAAKGGSGSSGGTAPLEEEYRLFLEAPIQNVTLLEQWKREIPKVWAEINPPGLASTQAPIHVQLLSTALPVRVRQYPITLEAKRSLRETIRKFRAAGILRPVHSPWNTPLLPVRKSGTSEYRMVQDLREVNKRVETIHPTVPNPYTLLSLLPPDRIWYSVLDLKDAFFCIPLAPESQLIFAFEWADAEEGESGQLTWTRLPQGFKNSPTLFNEALNRDLQGFRLDHPSVSLLQYVDDLLIAADTQAACLSATRDLLMTLAELGYRVSGKKAQLCQEEVTYLGFKIHKGSRSLSNSRTQAILQIPVPKTKRQVREFLGKIGYCRLFIPGFAELAQPLYAATRPGNDPLVWGEKEEEAFQSLKLALTQPPALALPSLDKPFQLFVEETSGAAKGVLTQALGPWKRPVAYLSKRLDPVAAGWPRCLRAIAAAALLTREASKLTFGQDIEITSSHNLESLLRSPPDKWLTNARITQYQVLLLDPPRVRFKQTAALNPATLLPETDDTLPIHHCLDTLDSLTSTRPDLTDQPLAQAEATLFTDGSSYIRDGKRYAGAAVVTLDSVIWAEPLPIGTSAQKAELIALTKALEWSKDKSVNIYTDSRYAFATLHVHGMIYRERGWLTAGGKAIKNAPEILALLTAVWLPKRVAVMHCKGHQKDDAPTSTGNRRADEVAREVAIRPLSTQATISAGKRTADGSEFEKRTADGSEFESPKKKAKVE

SEQ ID NO: 1407 - protein, 2095 aa, synthetic construct
MPAAKRVKLDGGDKKYSIGLDIGTNSVGWAVITDEYKVPSKKFKVLGNTDRHSIKKNLIGALLFDSGETAEATRLKRTARRRYTRRKNRICYLQEIFSNEMAKVDDSFFHRLEESFLVEEDKKHERHPIFGNIVDEVAYHEKYPTIYHLRKKLVDSTDKADLRLIYLALAHMIKFRGHFLIEGDLNPDNSDVDKLFIQLVQTYNQLFEENPINASGVDAKAILSARLSKSRRLENLIAQLPGEKKNGLFGNLIALSLGLTPNFKSNFDLAEDAKLQLSKDTYDDDLDNLLAQIGDQYADLFLAAKNLSDAILLSDILRVNTEITKAPLSASMIKRYDEHHQDLTLLKALVRQQLPEKYKEIFFDQSKNGYAGYIDGGASQEEFYKFIKPILEKMDGTEELLVKLNREDLLRKQRTFDNGSIPHQIHLGELHAILRRQEDFYPFLKDNREKIEKILTFRIPYYVGPLARGNSRFAWMTRKSEETITPWNFEEVVDKGASAQSFIERMTNFDKNLPNEKVLPKHSLLYEYFTVYNELTKVKYVTEGMRKPAFLSGEQKKAIVDLLFKTNRKVTVKQLKEDYFKKIECFDSVEISGVEDRFNASLGTYHDLLKIIKDKDFLDNEENEDILEDIVLTLTLFEDREMIEERLKTYAHLFDDKVMKQLKRRRYTGWGRLSRKLINGIRDKQSGKTILDFLKSDGFANRNFMQLIHDDSLTFKEDIQKAQVSGQGDSLHEHIANLAGSPAIKKGILQTVKVVDELVKVMGRHKPENIVIEMARENQTTQKGQKNSRERMKRIEEGIKELGSQILKEHPVENTQLQNEKLYLYYLQNGRDMYVDQELDINRLSDYDVDHIVPQSFLKDDSIDNKVLTRSDKARGKSDNVPSEEVVKKMKNYWRQLLNAKLITQRKFDNLTKAERGGLSELDKAGFIKRQLVETRQITKHVAQILDSRMNTKYDENDKLIREVKVITLKSKLVSDFRKDFQFYKVREINNYHHAHDAYLNAVVGTALIKKYPKLESEFVYGDYKVYDVRKMIAKSEQEIGKATAKYFFYSNIMNFFKTEITLANGEIRKRPLIETNGETGEIVWDKGRDFATVRKVLSMPQVNIVKKTEVQTGGFSKESILPKRNSDKLIARKKDWDPKKYGGFDSPTVAYSVLVVAKVEKGKSKKLKSVKELLGITIMERSSFEKNPIDFLEAKGYKEVKKDLIIKLPKYSLFELENGRKRMLASAGELQKGNELALPSKYVNFLYLASHYEKLKGSPEDNEQKQLFVEQHKHYLDEIIEQISEFSKRVILADANLDKVLSAYNKHRDKPIREQAENIIHLFTLTNLGAPAAFKYFDTTIDRKRYTSTKEVLDATLIHQSITGLYETRIDLSQLGGDGGPAPEAAAKGGTAPLEEEYRLFLEAPIQNVTLLEQWKREIPKVWAEINPPGLASTQAPIHVQLLSTALPVRVRQYPITLEAKRSLRETIRKFRAAGILRPVHSPWNTPLLPVRKSGTSEYRMVQDLREVNKRVETIHPTVPNPYTLLSLLPPDRIWYSVLDLKDAFFCIPLAPESQLIFAFEWADAEEGESGQLTWTRLPQGFKNSPTLFNEALNRDLQGFRLDHPSVSLLQYVDDLLIAADTQAACLSATRDLLMTLAELGYRVSGKKAQLCQEEVTYLGFKIHKGSRSLSNSRTQAILQIPVPKTKRQVREFLGKIGYCRLFIPGFAELAQPLYAATRPGNDPLVWGEKEEEAFQSLKLALTQPPALALPSLDKPFQLFVEETSGAAKGVLTQALGPWKRPVAYLSKRLDPVAAGWPRCLRAIAAAALLTREASKLTFGQDIEITSSHNLESLLRSPPDKWLTNARITQYQVLLLDPPRVRFKQTAALNPATLLPETDDTLPIHHCLDTLDSLTSTRPDLTDQPLAQAEATLFTDGSSYIRDGKRYAGAAVVTLDSVIWAEPLPIGTSAQKAELIALTKALEWSKDKSVNIYTDSRYAFATLHVHGMIYRERGWLTAGGKAIKNAPEILALLTAVWLPKRVAVMHCKGHQKDDAPTSTGNRRADEVAREVAIRPLSTQATISAGKRTADGSEFEKRTADGSEFESPKKKAKVE

SEQ ID NO: 1408 - protein, 2099 aa, synthetic construct
MPAAKRVKLDGGDKKYSIGLDIGTNSVGWAVITDEYKVPSKKFKVLGNTDRHSIKKNLIGALLFDSGETAEATRLKRTARRRYTRRKNRICYLQEIFSNEMAKVDDSFFHRLEESFLVEEDKKHERHPIFGNIVDEVAYHEKYPTIYHLRKKLVDSTDKADLRLIYLALAHMIKFRGHFLIEGDLNPDNSDVDKLFIQLVQTYNQLFEENPINASGVDAKAILSARLSKSRRLENLIAQLPGEKKNGLFGNLIALSLGLTPNFKSNFDLAEDAKLQLSKDTYDDDLDNLLAQIGDQYADLFLAAKNLSDAILLSDILRVNTEITKAPLSASMIKRYDEHHQDLTLLKALVRQQLPEKYKEIFFDQSKNGYAGYIDGGASQEEFYKFIKPILEKMDGTEELLVKLNREDLLRKQRTFDNGSIPHQIHLGELHAILRRQEDFYPFLKDNREKIEKILTFRIPYYVGPLARGNSRFAWMTRKSEETITPWNFEEVVDKGASAQSFIERMTNFDKNLPNEKVLPKHSLLYEYFTVYNELTKVKYVTEGMRKPAFLSGEQKKAIVDLLFKTNRKVTVKQLKEDYFKKIECFDSVEISGVEDRFNASLGTYHDLLKIIKDKDFLDNEENEDILEDIVLTLTLFEDREMIEERLKTYAHLFDDKVMKQLKRRRYTGWGRLSRKLINGIRDKQSGKTILDFLKSDGFANRNFMQLIHDDSLTFKEDIQKAQVSGQGDSLHEHIANLAGSPAIKKGILQTVKVVDELVKVMGRHKPENIVIEMARENQTTQKGQKNSRERMKRIEEGIKELGSQILKEHPVENTQLQNEKLYLYYLQNGRDMYVDQELDINRLSDYDVDHIVPQSFLKDDSIDNKVLTRSDKARGKSDNVPSEEVVKKMKNYWRQLLNAKLITQRKFDNLTKAERGGLSELDKAGFIKRQLVETRQITKHVAQILDSRMNTKYDENDKLIREVKVITLKSKLVSDFRKDFQFYKVREINNYHHAHDAYLNAVVGTALIKKYPKLESEFVYGDYKVYDVRKMIAKSEQEIGKATAKYFFYSNIMNFFKTEITLANGEIRKRPLIETNGETGEIVWDKGRDFATVRKVLSMPQVNIVKKTEVQTGGFSKESILPKRNSDKLIARKKDWDPKKYGGFDSPTVAYSVLVVAKVEKGKSKKLKSVKELLGITIMERSSFEKNPIDFLEAKGYKEVKKDLIIKLPKYSLFELENGRKRMLASAGELQKGNELALPSKYVNFLYLASHYEKLKGSPEDNEQKQLFVEQHKHYLDEIIEQISEFSKRVILADANLDKVLSAYNKHRDKPIREQAENIIHLFTLTNLGAPAAFKYFDTTIDRKRYTSTKEVLDATLIHQSITGLYETRIDLSQLGGDGGGSAGSAAGSGEFGGTAPLEEEYRLFLEAPIQNVTLLEQWKREIPKVWAEINPPGLASTQAPIHVQLLSTALPVRVRQYPITLEAKRSLRETIRKFRAAGILRPVHSPWNTPLLPVRKSGTSEYRMVQDLREVNKRVETIHPTVPNPYTLLSLLPPDRIWYSVLDLKDAFFCIPLAPESQLIFAFEWADAEEGESGQLTWTRLPQGFKNSPTLFNEALNRDLQGFRLDHPSVSLLQYVDDLLIAADTQAACLSATRDLLMTLAELGYRVSGKKAQLCQEEVTYLGFKIHKGSRSLSNSRTQAILQIPVPKTKRQVREFLGKIGYCRLFIPGFAELAQPLYAATRPGNDPLVWGEKEEEAFQSLKLALTQPPALALPSLDKPFQLFVEETSGAAKGVLTQALGPWKRPVAYLSKRLDPVAAGWPRCLRAIAAAALLTREASKLTFGQDIEITSSHNLESLLRSPPDKWLTNARITQYQVLLLDPPRVRFKQTAALNPATLLPETDDTLPIHHCLDTLDSLTSTRPDLTDQPLAQAEATLFTDGSSYIRDGKRYAGAAVVTLDSVIWAEPLPIGTSAQKAELIALTKALEWSKDKSVNIYTDSRYAFATLHVHGMIYRERGWLTAGGKAIKNAPEILALLTAVWLPKRVAVMHCKGHQKDDAPTSTGNRRADEVAREVAIRPLSTQATISAGKRTADGSEFEKRTADGSEFESPKKKAKVE

SEQ ID NO: 1409 - protein, 2096 aa, synthetic construct
MPAAKRVKLDGGDKKYSIGLDIGTNSVGWAVITDEYKVPSKKFKVLGNTDRHSIKKNLIGALLFDSGETAEATRLKRTARRRYTRRKNRICYLQEIFSNEMAKVDDSFFHRLEESFLVEEDKKHERHPIFGNIVDEVAYHEKYPTIYHLRKKLVDSTDKADLRLIYLALAHMIKFRGHFLIEGDLNPDNSDVDKLFIQLVQTYNQLFEENPINASGVDAKAILSARLSKSRRLENLIAQLPGEKKNGLFGNLIALSLGLTPNFKSNFDLAEDAKLQLSKDTYDDDLDNLLAQIGDQYADLFLAAKNLSDAILLSDILRVNTEITKAPLSASMIKRYDEHHQDLTLLKALVRQQLPEKYKEIFFDQSKNGYAGYIDGGASQEEFYKFIKPILEKMDGTEELLVKLNREDLLRKQRTFDNGSIPHQIHLGELHAILRRQEDFYPFLKDNREKIEKILTFRIPYYVGPLARGNSRFAWMTRKSEETITPWNFEEVVDKGASAQSFIERMTNFDKNLPNEKVLPKHSLLYEYFTVYNELTKVKYVTEGMRKPAFLSGEQKKAIVDLLFKTNRKVTVKQLKEDYFKKIECFDSVEISGVEDRFNASLGTYHDLLKIIKDKDFLDNEENEDILEDIVLTLTLFEDREMIEERLKTYAHLFDDKVMKQLKRRRYTGWGRLSRKLINGIRDKQSGKTILDFLKSDGFANRNFMQLIHDDSLTFKEDIQKAQVSGQGDSLHEHIANLAGSPAIKKGILQTVKVVDELVKVMGRHKPENIVIEMARENQTTQKGQKNSRERMKRIEEGIKELGSQILKEHPVENTQLQNEKLYLYYLQNGRDMYVDQELDINRLSDYDVDHIVPQSFLKDDSIDNKVLTRSDKARGKSDNVPSEEVVKKMKNYWRQLLNAKLITQRKFDNLTKAERGGLSELDKAGFIKRQLVETRQITKHVAQILDSRMNTKYDENDKLIREVKVITLKSKLVSDFRKDFQFYKVREINNYHHAHDAYLNAVVGTALIKKYPKLESEFVYGDYKVYDVRKMIAKSEQEIGKATAKYFFYSNIMNFFKTEITLANGEIRKRPLIETNGETGEIVWDKGRDFATVRKVLSMPQVNIVKKTEVQTGGFSKESILPKRNSDKLIARKKDWDPKKYGGFDSPTVAYSVLVVAKVEKGKSKKLKSVKELLGITIMERSSFEKNPIDFLEAKGYKEVKKDLIIKLPKYSLFELENGRKRMLASAGELQKGNELALPSKYVNFLYLASHYEKLKGSPEDNEQKQLFVEQHKHYLDEIIEQISEFSKRVILADANLDKVLSAYNKHRDKPIREQAENIIHLFTLTNLGAPAAFKYFDTTIDRKRYTSTKEVLDATLIHQSITGLYETRIDLSQLGGDGGGGSPAPGSSGGTAPLEEEYRLFLEAPIQNVTLLEQWKREIPKVWAEINPPGLASTQAPIHVQLLSTALPVRVRQYPITLEAKRSLRETIRKFRAAGILRPVHSPWNTPLLPVRKSGTSEYRMVQDLREVNKRVETIHPTVPNPYTLLSLLPPDRIWYSVLDLKDAFFCIPLAPESQLIFAFEWADAEEGESGQLTWTRLPQGFKNSPTLFNEALNRDLQGFRLDHPSVSLLQYVDDLLIAADTQAACLSATRDLLMTLAELGYRVSGKKAQLCQEEVTYLGFKIHKGSRSLSNSRTQAILQIPVPKTKRQVREFLGKIGYCRLFIPGFAELAQPLYAATRPGNDPLVWGEKEEEAFQSLKLALTQPPALALPSLDKPFQLFVEETSGAAKGVLTQALGPWKRPVAYLSKRLDPVAAGWPRCLRAIAAAALLTREASKLTFGQDIEITSSHNLESLLRSPPDKWLTNARITQYQVLLLDPPRVRFKQTAALNPATLLPETDDTLPIHHCLDTLDSLTSTRPDLTDQPLAQAEATLFTDGSSYIRDGKRYAGAAVVTLDSVIWAEPLPIGTSAQKAELIALTKALEWSKDKSVNIYTDSRYAFATLHVHGMIYRERGWLTAGGKAIKNAPEILALLTAVWLPKRVAVMHCKGHQKDDAPTSTGNRRADEVAREVAIRPLSTQATISAGKRTADGSEFEKRTADGSEFESPKKKAKVE

SEQ ID NO: 1410 - protein, 2093 aa, synthetic construct
MPAAKRVKLDGGDKKYSIGLDIGTNSVGWAVITDEYKVPSKKFKVLGNTDRHSIKKNLIGALLFDSGETAEATRLKRTARRRYTRRKNRICYLQEIFSNEMAKVDDSFFHRLEESFLVEEDKKHERHPIFGNIVDEVAYHEKYPTIYHLRKKLVDSTDKADLRLIYLALAHMIKFRGHFLIEGDLNPDNSDVDKLFIQLVQTYNQLFEENPINASGVDAKAILSARLSKSRRLENLIAQLPGEKKNGLFGNLIALSLGLTPNFKSNFDLAEDAKLQLSKDTYDDDLDNLLAQIGDQYADLFLAAKNLSDAILLSDILRVNTEITKAPLSASMIKRYDEHHQDLTLLKALVRQQLPEKYKEIFFDQSKNGYAGYIDGGASQEEFYKFIKPILEKMDGTEELLVKLNREDLLRKQRTFDNGSIPHQIHLGELHAILRRQEDFYPFLKDNREKIEKILTFRIPYYVGPLARGNSRFAWMTRKSEETITPWNFEEVVDKGASAQSFIERMTNFDKNLPNEKVLPKHSLLYEYFTVYNELTKVKYVTEGMRKPAFLSGEQKKAIVDLLFKTNRKVTVKQLKEDYFKKIECFDSVEISGVEDRFNASLGTYHDLLKIIKDKDFLDNEENEDILEDIVLTLTLFEDREMIEERLKTYAHLFDDKVMKQLKRRRYTGWGRLSRKLINGIRDKQSGKTILDFLKSDGFANRNFMQLIHDDSLTFKEDIQKAQVSGQGDSLHEHIANLAGSPAIKKGILQTVKVVDELVKVMGRHKPENIVIEMARENQTTQKGQKNSRERMKRIEEGIKELGSQILKEHPVENTQLQNEKLYLYYLQNGRDMYVDQELDINRLSDYDVDHIVPQSFLKDDSIDNKVLTRSDKARGKSDNVPSEEVVKKMKNYWRQLLNAKLITQRKFDNLTKAERGGLSELDKAGFIKRQLVETRQITKHVAQILDSRMNTKYDENDKLIREVKVITLKSKLVSDFRKDFQFYKVREINNYHHAHDAYLNAVVGTALIKKYPKLESEFVYGDYKVYDVRKMIAKSEQEIGKATAKYFFYSNIMNFFKTEITLANGEIRKRPLIETNGETGEIVWDKGRDFATVRKVLSMPQVNIVKKTEVQTGGFSKESILPKRNSDKLIARKKDWDPKKYGGFDSPTVAYSVLVVAKVEKGKSKKLKSVKELLGITIMERSSFEKNPIDFLEAKGYKEVKKDLIIKLPKYSLFELENGRKRMLASAGELQKGNELALPSKYVNFLYLASHYEKLKGSPEDNEQKQLFVEQHKHYLDEIIEQISEFSKRVILADANLDKVLSAYNKHRDKPIREQAENIIHLFTLTNLGAPAAFKYFDTTIDRKRYTSTKEVLDATLIHQSITGLYETRIDLSQLGGDGGPAPGGGGGTAPLEEEYRLFLEAPIQNVTLLEQWKREIPKVWAEINPPGLASTQAPIHVQLLSTALPVRVRQYPITLEAKRSLRETIRKFRAAGILRPVHSPWNTPLLPVRKSGTSEYRMVQDLREVNKRVETIHPTVPNPYTLLSLLPPDRIWYSVLDLKDAFFCIPLAPESQLIFAFEWADAEEGESGQLTWTRLPQGFKNSPTLFNEALNRDLQGFRLDHPSVSLLQYVDDLLIAADTQAACLSATRDLLMTLAELGYRVSGKKAQLCQEEVTYLGFKIHKGSRSLSNSRTQAILQIPVPKTKRQVREFLGKIGYCRLFIPGFAELAQPLYAATRPGNDPLVWGEKEEEAFQSLKLALTQPPALALPSLDKPFQLFVEETSGAAKGVLTQALGPWKRPVAYLSKRLDPVAAGWPRCLRAIAAAALLTREASKLTFGQDIEITSSHNLESLLRSPPDKWLTNARITQYQVLLLDPPRVRFKQTAALNPATLLPETDDTLPIHHCLDTLDSLTSTRPDLTDQPLAQAEATLFTDGSSYIRDGKRYAGAAVVTLDSVIWAEPLPIGTSAQKAELIALTKALEWSKDKSVNIYTDSRYAFATLHVHGMIYRERGWLTAGGKAIKNAPEILALLTAVWLPKRVAVMHCKGHQKDDAPTSTGNRRADEVAREVAIRPLSTQATISAGKRTADGSEFEKRTADGSEFESPKKKAKVE

SEQ ID NO: 1411 - protein, 2096 aa, synthetic construct
MPAAKRVKLDGGDKKYSIGLDIGTNSVGWAVITDEYKVPSKKFKVLGNTDRHSIKKNLIGALLFDSGETAEATRLKRTARRRYTRRKNRICYLQEIFSNEMAKVDDSFFHRLEESFLVEEDKKHERHPIFGNIVDEVAYHEKYPTIYHLRKKLVDSTDKADLRLIYLALAHMIKFRGHFLIEGDLNPDNSDVDKLFIQLVQTYNQLFEENPINASGVDAKAILSARLSKSRRLENLIAQLPGEKKNGLFGNLIALSLGLTPNFKSNFDLAEDAKLQLSKDTYDDDLDNLLAQIGDQYADLFLAAKNLSDAILLSDILRVNTEITKAPLSASMIKRYDEHHQDLTLLKALVRQQLPEKYKEIFFDQSKNGYAGYIDGGASQEEFYKFIKPILEKMDGTEELLVKLNREDLLRKQRTFDNGSIPHQIHLGELHAILRRQEDFYPFLKDNREKIEKILTFRIPYYVGPLARGNSRFAWMTRKSEETITPWNFEEVVDKGASAQSFIERMTNFDKNLPNEKVLPKHSLLYEYFTVYNELTKVKYVTEGMRKPAFLSGEQKKAIVDLLFKTNRKVTVKQLKEDYFKKIECFDSVEISGVEDRFNASLGTYHDLLKIIKDKDFLDNEENEDILEDIVLTLTLFEDREMIEERLKTYAHLFDDKVMKQLKRRRYTGWGRLSRKLINGIRDKQSGKTILDFLKSDGFANRNFMQLIHDDSLTFKEDIQKAQVSGQGDSLHEHIANLAGSPAIKKGILQTVKVVDELVKVMGRHKPENIVIEMARENQTTQKGQKNSRERMKRIEEGIKELGSQILKEHPVENTQLQNEKLYLYYLQNGRDMYVDQELDINRLSDYDVDHIVPQSFLKDDSIDNKVLTRSDKARGKSDNVPSEEVVKKMKNYWRQLLNAKLITQRKFDNLTKAERGGLSELDKAGFIKRQLVETRQITKHVAQILDSRMNTKYDENDKLIREVKVITLKSKLVSDFRKDFQFYKVREINNYHHAHDAYLNAVVGTALIKKYPKLESEFVYGDYKVYDVRKMIAKSEQEIGKATAKYFFYSNIMNFFKTEITLANGEIRKRPLIETNGETGEIVWDKGRDFATVRKVLSMPQVNIVKKTEVQTGGFSKESILPKRNSDKLIARKKDWDPKKYGGFDSPTVAYSVLVVAKVEKGKSKKLKSVKELLGITIMERSSFEKNPIDFLEAKGYKEVKKDLIIKLPKYSLFELENGRKRMLASAGELQKGNELALPSKYVNFLYLASHYEKLKGSPEDNEQKQLFVEQHKHYLDEIIEQISEFSKRVILADANLDKVLSAYNKHRDKPIREQAENIIHLFTLTNLGAPAAFKYFDTTIDRKRYTSTKEVLDATLIHQSITGLYETRIDLSQLGGDGGGGGPAPGSSGGTAPLEEEYRLFLEAPIQNVTLLEQWKREIPKVWAEINPPGLASTQAPIHVQLLSTALPVRVRQYPITLEAKRSLRETIRKFRAAGILRPVHSPWNTPLLPVRKSGTSEYRMVQDLREVNKRVETIHPTVPNPYTLLSLLPPDRIWYSVLDLKDAFFCIPLAPESQLIFAFEWADAEEGESGQLTWTRLPQGFKNSPTLFNEALNRDLQGFRLDHPSVSLLQYVDDLLIAADTQAACLSATRDLLMTLAELGYRVSGKKAQLCQEEVTYLGFKIHKGSRSLSNSRTQAILQIPVPKTKRQVREFLGKIGYCRLFIPGFAELAQPLYAATRPGNDPLVWGEKEEEAFQSLKLALTQPPALALPSLDKPFQLFVEETSGAAKGVLTQALGPWKRPVAYLSKRLDPVAAGWPRCLRAIAAAALLTREASKLTFGQDIEITSSHNLESLLRSPPDKWLTNARITQYQVLLLDPPRVRFKQTAALNPATLLPETDDTLPIHHCLDTLDSLTSTRPDLTDQPLAQAEATLFTDGSSYIRDGKRYAGAAVVTLDSVIWAEPLPIGTSAQKAELIALTKALEWSKDKSVNIYTDSRYAFATLHVHGMIYRERGWLTAGGKAIKNAPEILALLTAVWLPKRVAVMHCKGHQKDDAPTSTGNRRADEVAREVAIRPLSTQATISAGKRTADGSEFEKRTADGSEFESPKKKAKVE

SEQ ID NO: 1412 - protein, 2093 aa, synthetic construct
MPAAKRVKLDGGDKKYSIGLDIGTNSVGWAVITDEYKVPSKKFKVLGNTDRHSIKKNLIGALLFDSGETAEATRLKRTARRRYTRRKNRICYLQEIFSNEMAKVDDSFFHRLEESFLVEEDKKHERHPIFGNIVDEVAYHEKYPTIYHLRKKLVDSTDKADLRLIYLALAHMIKFRGHFLIEGDLNPDNSDVDKLFIQLVQTYNQLFEENPINASGVDAKAILSARLSKSRRLENLIAQLPGEKKNGLFGNLIALSLGLTPNFKSNFDLAEDAKLQLSKDTYDDDLDNLLAQIGDQYADLFLAAKNLSDAILLSDILRVNTEITKAPLSASMIKRYDEHHQDLTLLKALVRQQLPEKYKEIFFDQSKNGYAGYIDGGASQEEFYKFIKPILEKMDGTEELLVKLNREDLLRKQRTFDNGSIPHQIHLGELHAILRRQEDFYPFLKDNREKIEKILTFRIPYYVGPLARGNSRFAWMTRKSEETITPWNFEEVVDKGASAQSFIERMTNFDKNLPNEKVLPKHSLLYEYFTVYNELTKVKYVTEGMRKPAFLSGEQKKAIVDLLFKTNRKVTVKQLKEDYFKKIECFDSVEISGVEDRFNASLGTYHDLLKIIKDKDFLDNEENEDILEDIVLTLTLFEDREMIEERLKTYAHLFDDKVMKQLKRRRYTGWGRLSRKLINGIRDKQSGKTILDFLKSDGFANRNFMQLIHDDSLTFKEDIQKAQVSGQGDSLHEHIANLAGSPAIKKGILQTVKVVDELVKVMGRHKPENIVIEMARENQTTQKGQKNSRERMKRIEEGIKELGSQILKEHPVENTQLQNEKLYLYYLQNGRDMYVDQELDINRLSDYDVDHIVPQSFLKDDSIDNKVLTRSDKARGKSDNVPSEEVVKKMKNYWRQLLNAKLITQRKFDNLTKAERGGLSELDKAGFIKRQLVETRQITKHVAQILDSRMNTKYDENDKLIREVKVITLKSKLVSDFRKDFQFYKVREINNYHHAHDAYLNAVVGTALIKKYPKLESEFVYGDYKVYDVRKMIAKSEQEIGKATAKYFFYSNIMNFFKTEITLANGEIRKRPLIETNGETGEIVWDKGRDFATVRKVLSMPQVNIVKKTEVQTGGFSKESILPKRNSDKLIARKKDWDPKKYGGFDSPTVAYSVLVVAKVEKGKSKKLKSVKELLGITIMERSSFEKNPIDFLEAKGYKEVKKDLIIKLPKYSLFELENGRKRMLASAGELQKGNELALPSKYVNFLYLASHYEKLKGSPEDNEQKQLFVEQHKHYLDEIIEQISEFSKRVILADANLDKVLSAYNKHRDKPIREQAENIIHLFTLTNLGAPAAFKYFDTTIDRKRYTSTKEVLDATLIHQSITGLYETRIDLSQLGGDGGGGSGSSGGTAPLEEEYRLFLEAPIQNVTLLEQWKREIPKVWAEINPPGLASTQAPIHVQLLSTALPVRVRQYPITLEAKRSLRETIRKFRAAGILRPVHSPWNTPLLPVRKSGTSEYRMVQDLREVNKRVETIHPTVPNPYTLLSLLPPDRIWYSVLDLKDAFFCIPLAPESQLIFAFEWADAEEGESGQLTWTRLPQGFKNSPTLFNEALNRDLQGFRLDHPSVSLLQYVDDLLIAADTQAACLSATRDLLMTLAELGYRVSGKKAQLCQEEVTYLGFKIHKGSRSLSNSRTQAILQIPVPKTKRQVREFLGKIGYCRLFIPGFAELAQPLYAATRPGNDPLVWGEKEEEAFQSLKLALTQPPALALPSLDKPFQLFVEETSGAAKGVLTQALGPWKRPVAYLSKRLDPVAAGWPRCLRAIAAAALLTREASKLTFGQDIEITSSHNLESLLRSPPDKWLTNARITQYQVLLLDPPRVRFKQTAALNPATLLPETDDTLPIHHCLDTLDSLTSTRPDLTDQPLAQAEATLFTDGSSYIRDGKRYAGAAVVTLDSVIWAEPLPIGTSAQKAELIALTKALEWSKDKSVNIYTDSRYAFATLHVHGMIYRERGWLTAGGKAIKNAPEILALLTAVWLPKRVAVMHCKGHQKDDAPTSTGNRRADEVAREVAIRPLSTQATISAGKRTADGSEFEKRTADGSEFESPKKKAKVE

SEQ ID NO: 1413 - protein, 2096 aa, synthetic construct
MPAAKRVKLDGGDKKYSIGLDIGTNSVGWAVITDEYKVPSKKFKVLGNTDRHSIKKNLIGALLFDSGETAEATRLKRTARRRYTRRKNRICYLQEIFSNEMAKVDDSFFHRLEESFLVEEDKKHERHPIFGNIVDEVAYHEKYPTIYHLRKKLVDSTDKADLRLIYLALAHMIKFRGHFLIEGDLNPDNSDVDKLFIQLVQTYNQLFEENPINASGVDAKAILSARLSKSRRLENLIAQLPGEKKNGLFGNLIALSLGLTPNFKSNFDLAEDAKLQLSKDTYDDDLDNLLAQIGDQYADLFLAAKNLSDAILLSDILRVNTEITKAPLSASMIKRYDEHHQDLTLLKALVRQQLPEKYKEIFFDQSKNGYAGYIDGGASQEEFYKFIKPILEKMDGTEELLVKLNREDLLRKQRTFDNGSIPHQIHLGELHAILRRQEDFYPFLKDNREKIEKILTFRIPYYVGPLARGNSRFAWMTRKSEETITPWNFEEVVDKGASAQSFIERMTNFDKNLPNEKVLPKHSLLYEYFTVYNELTKVKYVTEGMRKPAFLSGEQKKAIVDLLFKTNRKVTVKQLKEDYFKKIECFDSVEISGVEDRFNASLGTYHDLLKIIKDKDFLDNEENEDILEDIVLTLTLFEDREMIEERLKTYAHLFDDKVMKQLKRRRYTGWGRLSRKLINGIRDKQSGKTILDFLKSDGFANRNFMQLIHDDSLTFKEDIQKAQVSGQGDSLHEHIANLAGSPAIKKGILQTVKVVDELVKVMGRHKPENIVIEMARENQTTQKGQKNSRERMKRIEEGIKELGSQILKEHPVENTQLQNEKLYLYYLQNGRDMYVDQELDINRLSDYDVDHIVPQSFLKDDSIDNKVLTRSDKARGKSDNVPSEEVVKKMKNYWRQLLNAKLITQRKFDNLTKAERGGLSELDKAGFIKRQLVETRQITKHVAQILDSRMNTKYDENDKLIREVKVITLKSKLVSDFRKDFQFYKVREINNYHHAHDAYLNAVVGTALIKKYPKLESEFVYGDYKVYDVRKMIAKSEQEIGKATAKYFFYSNIMNFFKTEITLANGEIRKRPLIETNGETGEIVWDKGRDFATVRKVLSMPQVNIVKKTEVQTGGFSKESILPKRNSDKLIARKKDWDPKKYGGFDSPTVAYSVLVVAKVEKGKSKKLKSVKELLGITIMERSSFEKNPIDFLEAKGYKEVKKDLIIKLPKYSLFELENGRKRMLASAGELQKGNELALPSKYVNFLYLASHYEKLKGSPEDNEQKQLFVEQHKHYLDEIIEQISEFSKRVILADANLDKVLSAYNKHRDKPIREQAENIIHLFTLTNLGAPAAFKYFDTTIDRKRYTSTKEVLDATLIHQSITGLYETRIDLSQLGGDGGGSSGGGGGSGGTAPLEEEYRLFLEAPIQNVTLLEQWKREIPKVWAEINPPGLASTQAPIHVQLLSTALPVRVRQYPITLEAKRSLRETIRKFRAAGILRPVHSPWNTPLLPVRKSGTSEYRMVQDLREVNKRVETIHPTVPNPYTLLSLLPPDRIWYSVLDLKDAFFCIPLAPESQLIFAFEWADAEEGESGQLTWTRLPQGFKNSPTLFNEALNRDLQGFRLDHPSVSLLQYVDDLLIAADTQAACLSATRDLLMTLAELGYRVSGKKAQLCQEEVTYLGFKIHKGSRSLSNSRTQAILQIPVPKTKRQVREFLGKIGYCRLFIPGFAELAQPLYAATRPGNDPLVWGEKEEEAFQSLKLALTQPPALALPSLDKPFQLFVEETSGAAKGVLTQALGPWKRPVAYLSKRLDPVAAGWPRCLRAIAAAALLTREASKLTFGQDIEITSSHNLESLLRSPPDKWLTNARITQYQVLLLDPPRVRFKQTAALNPATLLPETDDTLPIHHCLDTLDSLTSTRPDLTDQPLAQAEATLFTDGSSYIRDGKRYAGAAVVTLDSVIWAEPLPIGTSAQKAELIALTKALEWSKDKSVNIYTDSRYAFATLHVHGMIYRERGWLTAGGKAIKNAPEILALLTAVWLPKRVAVMHCKGHQKDDAPTSTGNRRADEVAREVAIRPLSTQATISAGKRTADGSEFEKRTADGSEFESPKKKAKVE

SEQ ID NO: 1414 - protein, 2090 aa, synthetic construct
MPAAKRVKLDGGDKKYSIGLDIGTNSVGWAVITDEYKVPSKKFKVLGNTDRHSIKKNLIGALLFDSGETAEATRLKRTARRRYTRRKNRICYLQEIFSNEMAKVDDSFFHRLEESFLVEEDKKHERHPIFGNIVDEVAYHEKYPTIYHLRKKLVDSTDKADLRLIYLALAHMIKFRGHFLIEGDLNPDNSDVDKLFIQLVQTYNQLFEENPINASGVDAKAILSARLSKSRRLENLIAQLPGEKKNGLFGNLIALSLGLTPNFKSNFDLAEDAKLQLSKDTYDDDLDNLLAQIGDQYADLFLAAKNLSDAILLSDILRVNTEITKAPLSASMIKRYDEHHQDLTLLKALVRQQLPEKYKEIFFDQSKNGYAGYIDGGASQEEFYKFIKPILEKMDGTEELLVKLNREDLLRKQRTFDNGSIPHQIHLGELHAILRRQEDFYPFLKDNREKIEKILTFRIPYYVGPLARGNSRFAWMTRKSEETITPWNFEEVVDKGASAQSFIERMTNFDKNLPNEKVLPKHSLLYEYFTVYNELTKVKYVTEGMRKPAFLSGEQKKAIVDLLFKTNRKVTVKQLKEDYFKKIECFDSVEISGVEDRFNASLGTYHDLLKIIKDKDFLDNEENEDILEDIVLTLTLFEDREMIEERLKTYAHLFDDKVMKQLKRRRYTGWGRLSRKLINGIRDKQSGKTILDFLKSDGFANRNFMQLIHDDSLTFKEDIQKAQVSGQGDSLHEHIANLAGSPAIKKGILQTVKVVDELVKVMGRHKPENIVIEMARENQTTQKGQKNSRERMKRIEEGIKELGSQILKEHPVENTQLQNEKLYLYYLQNGRDMYVDQELDINRLSDYDVDHIVPQSFLKDDSIDNKVLTRSDKARGKSDNVPSEEVVKKMKNYWRQLLNAKLITQRKFDNLTKAERGGLSELDKAGFIKRQLVETRQITKHVAQILDSRMNTKYDENDKLIREVKVITLKSKLVSDFRKDFQFYKVREINNYHHAHDAYLNAVVGTALIKKYPKLESEFVYGDYKVYDVRKMIAKSEQEIGKATAKYFFYSNIMNFFKTEITLANGEIRKRPLIETNGETGEIVWDKGRDFATVRKVLSMPQVNIVKKTEVQTGGFSKESILPKRNSDKLIARKKDWDPKKYGGFDSPTVAYSVLVVAKVEKGKSKKLKSVKELLGITIMERSSFEKNPIDFLEAKGYKEVKKDLIIKLPKYSLFELENGRKRMLASAGELQKGNELALPSKYVNFLYLASHYEKLKGSPEDNEQKQLFVEQHKHYLDEIIEQISEFSKRVILADANLDKVLSAYNKHRDKPIREQAENIIHLFTLTNLGAPAAFKYFDTTIDRKRYTSTKEVLDATLIHQSITGLYETRIDLSQLGGDGGPAPGGTAPLEEEYRLFLEAPIQNVTLLEQWKREIPKVWAEINPPGLASTQAPIHVQLLSTALPVRVRQYPITLEAKRSLRETIRKFRAAGILRPVHSPWNTPLLPVRKSGTSEYRMVQDLREVNKRVETIHPTVPNPYTLLSLLPPDRIWYSVLDLKDAFFCIPLAPESQLIFAFEWADAEEGESGQLTWTRLPQGFKNSPTLFNEALNRDLQGFRLDHPSVSLLQYVDDLLIAADTQAACLSATRDLLMTLAELGYRVSGKKAQLCQEEVTYLGFKIHKGSRSLSNSRTQAILQIPVPKTKRQVREFLGKIGYCRLFIPGFAELAQPLYAATRPGNDPLVWGEKEEEAFQSLKLALTQPPALALPSLDKPFQLFVEETSGAAKGVLTQALGPWKRPVAYLSKRLDPVAAGWPRCLRAIAAAALLTREASKLTFGQDIEITSSHNLESLLRSPPDKWLTNARITQYQVLLLDPPRVRFKQTAALNPATLLPETDDTLPIHHCLDTLDSLTSTRPDLTDQPLAQAEATLFTDGSSYIRDGKRYAGAAVVTLDSVIWAEPLPIGTSAQKAELIALTKALEWSKDKSVNIYTDSRYAFATLHVHGMIYRERGWLTAGGKAIKNAPEILALLTAVWLPKRVAVMHCKGHQKDDAPTSTGNRRADEVAREVAIRPLSTQATISAGKRTADGSEFEKRTADGSEFESPKKKAKVE

SEQ ID NO: 1415 - protein, 2098 aa, synthetic construct
MPAAKRVKLDGGDKKYSIGLDIGTNSVGWAVITDEYKVPSKKFKVLGNTDRHSIKKNLIGALLFDSGETAEATRLKRTARRRYTRRKNRICYLQEIFSNEMAKVDDSFFHRLEESFLVEEDKKHERHPIFGNIVDEVAYHEKYPTIYHLRKKLVDSTDKADLRLIYLALAHMIKFRGHFLIEGDLNPDNSDVDKLFIQLVQTYNQLFEENPINASGVDAKAILSARLSKSRRLENLIAQLPGEKKNGLFGNLIALSLGLTPNFKSNFDLAEDAKLQLSKDTYDDDLDNLLAQIGDQYADLFLAAKNLSDAILLSDILRVNTEITKAPLSASMIKRYDEHHQDLTLLKALVRQQLPEKYKEIFFDQSKNGYAGYIDGGASQEEFYKFIKPILEKMDGTEELLVKLNREDLLRKQRTFDNGSIPHQIHLGELHAILRRQEDFYPFLKDNREKIEKILTFRIPYYVGPLARGNSRFAWMTRKSEETITPWNFEEVVDKGASAQSFIERMTNFDKNLPNEKVLPKHSLLYEYFTVYNELTKVKYVTEGMRKPAFLSGEQKKAIVDLLFKTNRKVTVKQLKEDYFKKIECFDSVEISGVEDRFNASLGTYHDLLKIIKDKDFLDNEENEDILEDIVLTLTLFEDREMIEERLKTYAHLFDDKVMKQLKRRRYTGWGRLSRKLINGIRDKQSGKTILDFLKSDGFANRNFMQLIHDDSLTFKEDIQKAQVSGQGDSLHEHIANLAGSPAIKKGILQTVKVVDELVKVMGRHKPENIVIEMARENQTTQKGQKNSRERMKRIEEGIKELGSQILKEHPVENTQLQNEKLYLYYLQNGRDMYVDQELDINRLSDYDVDHIVPQSFLKDDSIDNKVLTRSDKARGKSDNVPSEEVVKKMKNYWRQLLNAKLITQRKFDNLTKAERGGLSELDKAGFIKRQLVETRQITKHVAQILDSRMNTKYDENDKLIREVKVITLKSKLVSDFRKDFQFYKVREINNYHHAHDAYLNAVVGTALIKKYPKLESEFVYGDYKVYDVRKMIAKSEQEIGKATAKYFFYSNIMNFFKTEITLANGEIRKRPLIETNGETGEIVWDKGRDFATVRKVLSMPQVNIVKKTEVQTGGFSKESILPKRNSDKLIARKKDWDPKKYGGFDSPTVAYSVLVVAKVEKGKSKKLKSVKELLGITIMERSSFEKNPIDFLEAKGYKEVKKDLIIKLPKYSLFELENGRKRMLASAGELQKGNELALPSKYVNFLYLASHYEKLKGSPEDNEQKQLFVEQHKHYLDEIIEQISEFSKRVILADANLDKVLSAYNKHRDKPIREQAENIIHLFTLTNLGAPAAFKYFDTTIDRKRYTSTKEVLDATLIHQSITGLYETRIDLSQLGGDGGGGGPAPEAAAKGGTAPLEEEYRLFLEAPIQNVTLLEQWKREIPKVWAEINPPGLASTQAPIHVQLLSTALPVRVRQYPITLEAKRSLRETIRKFRAAGILRPVHSPWNTPLLPVRKSGTSEYRMVQDLREVNKRVETIHPTVPNPYTLLSLLPPDRIWYSVLDLKDAFFCIPLAPESQLIFAFEWADAEEGESGQLTWTRLPQGFKNSPTLFNEALNRDLQGFRLDHPSVSLLQYVDDLLIAADTQAACLSATRDLLMTLAELGYRVSGKKAQLCQEEVTYLGFKIHKGSRSLSNSRTQAILQIPVPKTKRQVREFLGKIGYCRLFIPGFAELAQPLYAATRPGNDPLVWGEKEEEAFQSLKLALTQPPALALPSLDKPFQLFVEETSGAAKGVLTQALGPWKRPVAYLSKRLDPVAAGWPRCLRAIAAAALLTREASKLTFGQDIEITSSHNLESLLRSPPDKWLTNARITQYQVLLLDPPRVRFKQTAALNPATLLPETDDTLPIHHCLDTLDSLTSTRPDLTDQPLAQAEATLFTDGSSYIRDGKRYAGAAVVTLDSVIWAEPLPIGTSAQKAELIALTKALEWSKDKSVNIYTDSRYAFATLHVHGMIYRERGWLTAGGKAIKNAPEILALLTAVWLPKRVAVMHCKGHQKDDAPTSTGNRRADEVAREVAIRPLSTQATISAGKRTADGSEFEKRTADGSEFESPKKKAKVE

SEQ ID NO: 1416 - protein, 2098 aa, synthetic construct
MPAAKRVKLDGGDKKYSIGLDIGTNSVGWAVITDEYKVPSKKFKVLGNTDRHSIKKNLIGALLFDSGETAEATRLKRTARRRYTRRKNRICYLQEIFSNEMAKVDDSFFHRLEESFLVEEDKKHERHPIFGNIVDEVAYHEKYPTIYHLRKKLVDSTDKADLRLIYLALAHMIKFRGHFLIEGDLNPDNSDVDKLFIQLVQTYNQLFEENPINASGVDAKAILSARLSKSRRLENLIAQLPGEKKNGLFGNLIALSLGLTPNFKSNFDLAEDAKLQLSKDTYDDDLDNLLAQIGDQYADLFLAAKNLSDAILLSDILRVNTEITKAPLSASMIKRYDEHHQDLTLLKALVRQQLPEKYKEIFFDQSKNGYAGYIDGGASQEEFYKFIKPILEKMDGTEELLVKLNREDLLRKQRTFDNGSIPHQIHLGELHAILRRQEDFYPFLKDNREKIEKILTFRIPYYVGPLARGNSRFAWMTRKSEETITPWNFEEVVDKGASAQSFIERMTNFDKNLPNEKVLPKHSLLYEYFTVYNELTKVKYVTEGMRKPAFLSGEQKKAIVDLLFKTNRKVTVKQLKEDYFKKIECFDSVEISGVEDRFNASLGTYHDLLKIIKDKDFLDNEENEDILEDIVLTLTLFEDREMIEERLKTYAHLFDDKVMKQLKRRRYTGWGRLSRKLINGIRDKQSGKTILDFLKSDGFANRNFMQLIHDDSLTFKEDIQKAQVSGQGDSLHEHIANLAGSPAIKKGILQTVKVVDELVKVMGRHKPENIVIEMARENQTTQKGQKNSRERMKRIEEGIKELGSQILKEHPVENTQLQNEKLYLYYLQNGRDMYVDQELDINRLSDYDVDHIVPQSFLKDDSIDNKVLTRSDKARGKSDNVPSEEVVKKMKNYWRQLLNAKLITQRKFDNLTKAERGGLSELDKAGFIKRQLVETRQITKHVAQILDSRMNTKYDENDKLIREVKVITLKSKLVSDFRKDFQFYKVREINNYHHAHDAYLNAVVGTALIKKYPKLESEFVYGDYKVYDVRKMIAKSEQEIGKATAKYFFYSNIMNFFKTEITLANGEIRKRPLIETNGETGEIVWDKGRDFATVRKVLSMPQVNIVKKTEVQTGGFSKESILPKRNSDKLIARKKDWDPKKYGGFDSPTVAYSVLVVAKVEKGKSKKLKSVKELLGITIMERSSFEKNPIDFLEAKGYKEVKKDLIIKLPKYSLFELENGRKRMLASAGELQKGNELALPSKYVNFLYLASHYEKLKGSPEDNEQKQLFVEQHKHYLDEIIEQISEFSKRVILADANLDKVLSAYNKHRDKPIREQAENIIHLFTLTNLGAPAAFKYFDTTIDRKRYTSTKEVLDATLIHQSITGLYETRIDLSQLGGDGGEAAAKGSSPAPGGTAPLEEEYRLFLEAPIQNVTLLEQWKREIPKVWAEINPPGLASTQAPIHVQLLSTALPVRVRQYPITLEAKRSLRETIRKFRAAGILRPVHSPWNTPLLPVRKSGTSEYRMVQDLREVNKRVETIHPTVPNPYTLLSLLPPDRIWYSVLDLKDAFFCIPLAPESQLIFAFEWADAEEGESGQLTWTRLPQGFKNSPTLFNEALNRDLQGFRLDHPSVSLLQYVDDLLIAADTQAACLSATRDLLMTLAELGYRVSGKKAQLCQEEVTYLGFKIHKGSRSLSNSRTQAILQIPVPKTKRQVREFLGKIGYCRLFIPGFAELAQPLYAATRPGNDPLVWGEKEEEAFQSLKLALTQPPALALPSLDKPFQLFVEETSGAAKGVLTQALGPWKRPVAYLSKRLDPVAAGWPRCLRAIAAAALLTREASKLTFGQDIEITSSHNLESLLRSPPDKWLTNARITQYQVLLLDPPRVRFKQTAALNPATLLPETDDTLPIHHCLDTLDSLTSTRPDLTDQPLAQAEATLFTDGSSYIRDGKRYAGAAVVTLDSVIWAEPLPIGTSAQKAELIALTKALEWSKDKSVNIYTDSRYAFATLHVHGMIYRERGWLTAGGKAIKNAPEILALLTAVWLPKRVAVMHCKGHQKDDAPTSTGNRRADEVAREVAIRPLSTQATISAGKRTADGSEFEKRTADGSEFESPKKKAKVE

SEQ ID NO: 1417 - protein, 2090 aa, synthetic construct
MPAAKRVKLDGGDKKYSIGLDIGTNSVGWAVITDEYKVPSKKFKVLGNTDRHSIKKNLIGALLFDSGETAEATRLKRTARRRYTRRKNRICYLQEIFSNEMAKVDDSFFHRLEESFLVEEDKKHERHPIFGNIVDEVAYHEKYPTIYHLRKKLVDSTDKADLRLIYLALAHMIKFRGHFLIEGDLNPDNSDVDKLFIQLVQTYNQLFEENPINASGVDAKAILSARLSKSRRLENLIAQLPGEKKNGLFGNLIALSLGLTPNFKSNFDLAEDAKLQLSKDTYDDDLDNLLAQIGDQYADLFLAAKNLSDAILLSDILRVNTEITKAPLSASMIKRYDEHHQDLTLLKALVRQQLPEKYKEIFFDQSKNGYAGYIDGGASQEEFYKFIKPILEKMDGTEELLVKLNREDLLRKQRTFDNGSIPHQIHLGELHAILRRQEDFYPFLKDNREKIEKILTFRIPYYVGPLARGNSRFAWMTRKSEETITPWNFEEVVDKGASAQSFIERMTNFDKNLPNEKVLPKHSLLYEYFTVYNELTKVKYVTEGMRKPAFLSGEQKKAIVDLLFKTNRKVTVKQLKEDYFKKIECFDSVEISGVEDRFNASLGTYHDLLKIIKDKDFLDNEENEDILEDIVLTLTLFEDREMIEERLKTYAHLFDDKVMKQLKRRRYTGWGRLSRKLINGIRDKQSGKTILDFLKSDGFANRNFMQLIHDDSLTFKEDIQKAQVSGQGDSLHEHIANLAGSPAIKKGILQTVKVVDELVKVMGRHKPENIVIEMARENQTTQKGQKNSRERMKRIEEGIKELGSQILKEHPVENTQLQNEKLYLYYLQNGRDMYVDQELDINRLSDYDVDHIVPQSFLKDDSIDNKVLTRSDKARGKSDNVPSEEVVKKMKNYWRQLLNAKLITQRKFDNLTKAERGGLSELDKAGFIKRQLVETRQITKHVAQILDSRMNTKYDENDKLIREVKVITLKSKLVSDFRKDFQFYKVREINNYHHAHDAYLNAVVGTALIKKYPKLESEFVYGDYKVYDVRKMIAKSEQEIGKATAKYFFYSNIMNFFKTEITLANGEIRKRPLIETNGETGEIVWDKGRDFATVRKVLSMPQVNIVKKTEVQTGGFSKESILPKRNSDKLIARKKDWDPKKYGGFDSPTVAYSVLVVAKVEKGKSKKLKSVKELLGITIMERSSFEKNPIDFLEAKGYKEVKKDLIIKLPKYSLFELENGRKRMLASAGELQKGNELALPSKYVNFLYLASHYEKLKGSPEDNEQKQLFVEQHKHYLDEIIEQISEFSKRVILADANLDKVLSAYNKHRDKPIREQAENIIHLFTLTNLGAPAAFKYFDTTIDRKRYTSTKEVLDATLIHQSITGLYETRIDLSQLGGDGGGSSGGTAPLEEEYRLFLEAPIQNVTLLEQWKREIPKVWAEINPPGLASTQAPIHVQLLSTALPVRVRQYPITLEAKRSLRETIRKFRAAGILRPVHSPWNTPLLPVRKSGTSEYRMVQDLREVNKRVETIHPTVPNPYTLLSLLPPDRIWYSVLDLKDAFFCIPLAPESQLIFAFEWADAEEGESGQLTWTRLPQGFKNSPTLFNEALNRDLQGFRLDHPSVSLLQYVDDLLIAADTQAACLSATRDLLMTLAELGYRVSGKKAQLCQEEVTYLGFKIHKGSRSLSNSRTQAILQIPVPKTKRQVREFLGKIGYCRLFIPGFAELAQPLYAATRPGNDPLVWGEKEEEAFQSLKLALTQPPALALPSLDKPFQLFVEETSGAAKGVLTQALGPWKRPVAYLSKRLDPVAAGWPRCLRAIAAAALLTREASKLTFGQDIEITSSHNLESLLRSPPDKWLTNARITQYQVLLLDPPRVRFKQTAALNPATLLPETDDTLPIHHCLDTLDSLTSTRPDLTDQPLAQAEATLFTDGSSYIRDGKRYAGAAVVTLDSVIWAEPLPIGTSAQKAELIALTKALEWSKDKSVNIYTDSRYAFATLHVHGMIYRERGWLTAGGKAIKNAPEILALLTAVWLPKRVAVMHCKGHQKDDAPTSTGNRRADEVAREVAIRPLSTQATISAGKRTADGSEFEKRTADGSEFESPKKKAKVE

SEQ ID NO: 1418 - protein, 2096 aa, synthetic construct
MPAAKRVKLDGGDKKYSIGLDIGTNSVGWAVITDEYKVPSKKFKVLGNTDRHSIKKNLIGALLFDSGETAEATRLKRTARRRYTRRKNRICYLQEIFSNEMAKVDDSFFHRLEESFLVEEDKKHERHPIFGNIVDEVAYHEKYPTIYHLRKKLVDSTDKADLRLIYLALAHMIKFRGHFLIEGDLNPDNSDVDKLFIQLVQTYNQLFEENPINASGVDAKAILSARLSKSRRLENLIAQLPGEKKNGLFGNLIALSLGLTPNFKSNFDLAEDAKLQLSKDTYDDDLDNLLAQIGDQYADLFLAAKNLSDAILLSDILRVNTEITKAPLSASMIKRYDEHHQDLTLLKALVRQQLPEKYKEIFFDQSKNGYAGYIDGGASQEEFYKFIKPILEKMDGTEELLVKLNREDLLRKQRTFDNGSIPHQIHLGELHAILRRQEDFYPFLKDNREKIEKILTFRIPYYVGPLARGNSRFAWMTRKSEETITPWNFEEVVDKGASAQSFIERMTNFDKNLPNEKVLPKHSLLYEYFTVYNELTKVKYVTEGMRKPAFLSGEQKKAIVDLLFKTNRKVTVKQLKEDYFKKIECFDSVEISGVEDRFNASLGTYHDLLKIIKDKDFLDNEENEDILEDIVLTLTLFEDREMIEERLKTYAHLFDDKVMKQLKRRRYTGWGRLSRKLINGIRDKQSGKTILDFLKSDGFANRNFMQLIHDDSLTFKEDIQKAQVSGQGDSLHEHIANLAGSPAIKKGILQTVKVVDELVKVMGRHKPENIVIEMARENQTTQKGQKNSRERMKRIEEGIKELGSQILKEHPVENTQLQNEKLYLYYLQNGRDMYVDQELDINRLSDYDVDHIVPQSFLKDDSIDNKVLTRSDKARGKSDNVPSEEVVKKMKNYWRQLLNAKLITQRKFDNLTKAERGGLSELDKAGFIKRQLVETRQITKHVAQILDSRMNTKYDENDKLIREVKVITLKSKLVSDFRKDFQFYKVREINNYHHAHDAYLNAVVGTALIKKYPKLESEFVYGDYKVYDVRKMIAKSEQEIGKATAKYFFYSNIMNFFKTEITLANGEIRKRPLIETNGETGEIVWDKGRDFATVRKVLSMPQVNIVKKTEVQTGGFSKESILPKRNSDKLIARKKDWDPKKYGGFDSPTVAYSVLVVAKVEKGKSKKLKSVKELLGITIMERSSFEKNPIDFLEAKGYKEVKKDLIIKLPKYSLFELENGRKRMLASAGELQKGNELALPSKYVNFLYLASHYEKLKGSPEDNEQKQLFVEQHKHYLDEIIEQISEFSKRVILADANLDKVLSAYNKHRDKPIREQAENIIHLFTLTNLGAPAAFKYFDTTIDRKRYTSTKEVLDATLIHQSITGLYETRIDLSQLGGDGGGGSGSSGGGGGTAPLEEEYRLFLEAPIQNVTLLEQWKREIPKVWAEINPPGLASTQAPIHVQLLSTALPVRVRQYPITLEAKRSLRETIRKFRAAGILRPVHSPWNTPLLPVRKSGTSEYRMVQDLREVNKRVETIHPTVPNPYTLLSLLPPDRIWYSVLDLKDAFFCIPLAPESQLIFAFEWADAEEGESGQLTWTRLPQGFKNSPTLFNEALNRDLQGFRLDHPSVSLLQYVDDLLIAADTQAACLSATRDLLMTLAELGYRVSGKKAQLCQEEVTYLGFKIHKGSRSLSNSRTQAILQIPVPKTKRQVREFLGKIGYCRLFIPGFAELAQPLYAATRPGNDPLVWGEKEEEAFQSLKLALTQPPALALPSLDKPFQLFVEETSGAAKGVLTQALGPWKRPVAYLSKRLDPVAAGWPRCLRAIAAAALLTREASKLTFGQDIEITSSHNLESLLRSPPDKWLTNARITQYQVLLLDPPRVRFKQTAALNPATLLPETDDTLPIHHCLDTLDSLTSTRPDLTDQPLAQAEATLFTDGSSYIRDGKRYAGAAVVTLDSVIWAEPLPIGTSAQKAELIALTKALEWSKDKSVNIYTDSRYAFATLHVHGMIYRERGWLTAGGKAIKNAPEILALLTAVWLPKRVAVMHCKGHQKDDAPTSTGNRRADEVAREVAIRPLSTQATISAGKRTADGSEFEKRTADGSEFESPKKKAKVE

SEQ ID NO: 1419 - protein, 2098 aa, synthetic construct
MPAAKRVKLDGGDKKYSIGLDIGTNSVGWAVITDEYKVPSKKFKVLGNTDRHSIKKNLIGALLFDSGETAEATRLKRTARRRYTRRKNRICYLQEIFSNEMAKVDDSFFHRLEESFLVEEDKKHERHPIFGNIVDEVAYHEKYPTIYHLRKKLVDSTDKADLRLIYLALAHMIKFRGHFLIEGDLNPDNSDVDKLFIQLVQTYNQLFEENPINASGVDAKAILSARLSKSRRLENLIAQLPGEKKNGLFGNLIALSLGLTPNFKSNFDLAEDAKLQLSKDTYDDDLDNLLAQIGDQYADLFLAAKNLSDAILLSDILRVNTEITKAPLSASMIKRYDEHHQDLTLLKALVRQQLPEKYKEIFFDQSKNGYAGYIDGGASQEEFYKFIKPILEKMDGTEELLVKLNREDLLRKQRTFDNGSIPHQIHLGELHAILRRQEDFYPFLKDNREKIEKILTFRIPYYVGPLARGNSRFAWMTRKSEETITPWNFEEVVDKGASAQSFIERMTNFDKNLPNEKVLPKHSLLYEYFTVYNELTKVKYVTEGMRKPAFLSGEQKKAIVDLLFKTNRKVTVKQLKEDYFKKIECFDSVEISGVEDRFNASLGTYHDLLKIIKDKDFLDNEENEDILEDIVLTLTLFEDREMIEERLKTYAHLFDDKVMKQLKRRRYTGWGRLSRKLINGIRDKQSGKTILDFLKSDGFANRNFMQLIHDDSLTFKEDIQKAQVSGQGDSLHEHIANLAGSPAIKKGILQTVKVVDELVKVMGRHKPENIVIEMARENQTTQKGQKNSRERMKRIEEGIKELGSQILKEHPVENTQLQNEKLYLYYLQNGRDMYVDQELDINRLSDYDVDHIVPQSFLKDDSIDNKVLTRSDKARGKSDNVPSEEVVKKMKNYWRQLLNAKLITQRKFDNLTKAERGGLSELDKAGFIKRQLVETRQITKHVAQILDSRMNTKYDENDKLIREVKVITLKSKLVSDFRKDFQFYKVREINNYHHAHDAYLNAVVGTALIKKYPKLESEFVYGDYKVYDVRKMIAKSEQEIGKATAKYFFYSNIMNFFKTEITLANGEIRKRPLIETNGETGEIVWDKGRDFATVRKVLSMPQVNIVKKTEVQTGGFSKESILPKRNSDKLIARKKDWDPKKYGGFDSPTVAYSVLVVAKVEKGKSKKLKSVKELLGITIMERSSFEKNPIDFLEAKGYKEVKKDLIIKLPKYSLFELENGRKRMLASAGELQKGNELALPSKYVNFLYLASHYEKLKGSPEDNEQKQLFVEQHKHYLDEIIEQISEFSKRVILADANLDKVLSAYNKHRDKPIREQAENIIHLFTLTNLGAPAAFKYFDTTIDRKRYTSTKEVLDATLIHQSITGLYETRIDLSQLGGDGGEAAAKGSSGGGGGTAPLEEEYRLFLEAPIQNVTLLEQWKREIPKVWAEINPPGLASTQAPIHVQLLSTALPVRVRQYPITLEAKRSLRETIRKFRAAGILRPVHSPWNTPLLPVRKSGTSEYRMVQDLREVNKRVETIHPTVPNPYTLLSLLPPDRIWYSVLDLKDAFFCIPLAPESQLIFAFEWADAEEGESGQLTWTRLPQGFKNSPTLFNEALNRDLQGFRLDHPSVSLLQYVDDLLIAADTQAACLSATRDLLMTLAELGYRVSGKKAQLCQEEVTYLGFKIHKGSRSLSNSRTQAILQIPVPKTKRQVREFLGKIGYCRLFIPGFAELAQPLYAATRPGNDPLVWGEKEEEAFQSLKLALTQPPALALPSLDKPFQLFVEETSGAAKGVLTQALGPWKRPVAYLSKRLDPVAAGWPRCLRAIAAAALLTREASKLTFGQDIEITSSHNLESLLRSPPDKWLTNARITQYQVLLLDPPRVRFKQTAALNPATLLPETDDTLPIHHCLDTLDSLTSTRPDLTDQPLAQAEATLFTDGSSYIRDGKRYAGAAVVTLDSVIWAEPLPIGTSAQKAELIALTKALEWSKDKSVNIYTDSRYAFATLHVHGMIYRERGWLTAGGKAIKNAPEILALLTAVWLPKRVAVMHCKGHQKDDAPTSTGNRRADEVAREVAIRPLSTQATISAGKRTADGSEFEKRTADGSEFESPKKKAKVE

SEQ ID NO: 1420 - protein, 2096 aa, synthetic construct
MPAAKRVKLDGGDKKYSIGLDIGTNSVGWAVITDEYKVPSKKFKVLGNTDRHSIKKNLIGALLFDSGETAEATRLKRTARRRYTRRKNRICYLQEIFSNEMAKVDDSFFHRLEESFLVEEDKKHERHPIFGNIVDEVAYHEKYPTIYHLRKKLVDSTDKADLRLIYLALAHMIKFRGHFLIEGDLNPDNSDVDKLFIQLVQTYNQLFEENPINASGVDAKAILSARLSKSRRLENLIAQLPGEKKNGLFGNLIALSLGLTPNFKSNFDLAEDAKLQLSKDTYDDDLDNLLAQIGDQYADLFLAAKNLSDAILLSDILRVNTEITKAPLSASMIKRYDEHHQDLTLLKALVRQQLPEKYKEIFFDQSKNGYAGYIDGGASQEEFYKFIKPILEKMDGTEELLVKLNREDLLRKQRTFDNGSIPHQIHLGELHAILRRQEDFYPFLKDNREKIEKILTFRIPYYVGPLARGNSRFAWMTRKSEETITPWNFEEVVDKGASAQSFIERMTNFDKNLPNEKVLPKHSLLYEYFTVYNELTKVKYVTEGMRKPAFLSGEQKKAIVDLLFKTNRKVTVKQLKEDYFKKIECFDSVEISGVEDRFNASLGTYHDLLKIIKDKDFLDNEENEDILEDIVLTLTLFEDREMIEERLKTYAHLFDDKVMKQLKRRRYTGWGRLSRKLINGIRDKQSGKTILDFLKSDGFANRNFMQLIHDDSLTFKEDIQKAQVSGQGDSLHEHIANLAGSPAIKKGILQTVKVVDELVKVMGRHKPENIVIEMARENQTTQKGQKNSRERMKRIEEGIKELGSQILKEHPVENTQLQNEKLYLYYLQNGRDMYVDQELDINRLSDYDVDHIVPQSFLKDDSIDNKVLTRSDKARGKSDNVPSEEVVKKMKNYWRQLLNAKLITQRKFDNLTKAERGGLSELDKAGFIKRQLVETRQITKHVAQILDSRMNTKYDENDKLIREVKVITLKSKLVSDFRKDFQFYKVREINNYHHAHDAYLNAVVGTALIKKYPKLESEFVYGDYKVYDVRKMIAKSEQEIGKATAKYFFYSNIMNFFKTEITLANGEIRKRPLIETNGETGEIVWDKGRDFATVRKVLSMPQVNIVKKTEVQTGGFSKESILPKRNSDKLIARKKDWDPKKYGGFDSPTVAYSVLVVAKVEKGKSKKLKSVKELLGITIMERSSFEKNPIDFLEAKGYKEVKKDLIIKLPKYSLFELENGRKRMLASAGELQKGNELALPSKYVNFLYLASHYEKLKGSPEDNEQKQLFVEQHKHYLDEIIEQISEFSKRVILADANLDKVLSAYNKHRDKPIREQAENIIHLFTLTNLGAPAAFKYFDTTIDRKRYTSTKEVLDATLIHQSITGLYETRIDLSQLGGDGGGGGGSSGGSGGTAPLEEEYRLFLEAPIQNVTLLEQWKREIPKVWAEINPPGLASTQAPIHVQLLSTALPVRVRQYPITLEAKRSLRETIRKFRAAGILRPVHSPWNTPLLPVRKSGTSEYRMVQDLREVNKRVETIHPTVPNPYTLLSLLPPDRIWYSVLDLKDAFFCIPLAPESQLIFAFEWADAEEGESGQLTWTRLPQGFKNSPTLFNEALNRDLQGFRLDHPSVSLLQYVDDLLIAADTQAACLSATRDLLMTLAELGYRVSGKKAQLCQEEVTYLGFKIHKGSRSLSNSRTQAILQIPVPKTKRQVREFLGKIGYCRLFIPGFAELAQPLYAATRPGNDPLVWGEKEEEAFQSLKLALTQPPALALPSLDKPFQLFVEETSGAAKGVLTQALGPWKRPVAYLSKRLDPVAAGWPRCLRAIAAAALLTREASKLTFGQDIEITSSHNLESLLRSPPDKWLTNARITQYQVLLLDPPRVRFKQTAALNPATLLPETDDTLPIHHCLDTLDSLTSTRPDLTDQPLAQAEATLFTDGSSYIRDGKRYAGAAVVTLDSVIWAEPLPIGTSAQKAELIALTKALEWSKDKSVNIYTDSRYAFATLHVHGMIYRERGWLTAGGKAIKNAPEILALLTAVWLPKRVAVMHCKGHQKDDAPTSTGNRRADEVAREVAIRPLSTQATISAGKRTADGSEFEKRTADGSEFESPKKKAKVE

SEQ ID NO: 1421 - protein, 2100 aa, synthetic construct
MPAAKRVKLDGGDKKYSIGLDIGTNSVGWAVITDEYKVPSKKFKVLGNTDRHSIKKNLIGALLFDSGETAEATRLKRTARRRYTRRKNRICYLQEIFSNEMAKVDDSFFHRLEESFLVEEDKKHERHPIFGNIVDEVAYHEKYPTIYHLRKKLVDSTDKADLRLIYLALAHMIKFRGHFLIEGDLNPDNSDVDKLFIQLVQTYNQLFEENPINASGVDAKAILSARLSKSRRLENLIAQLPGEKKNGLFGNLIALSLGLTPNFKSNFDLAEDAKLQLSKDTYDDDLDNLLAQIGDQYADLFLAAKNLSDAILLSDILRVNTEITKAPLSASMIKRYDEHHQDLTLLKALVRQQLPEKYKEIFFDQSKNGYAGYIDGGASQEEFYKFIKPILEKMDGTEELLVKLNREDLLRKQRTFDNGSIPHQIHLGELHAILRRQEDFYPFLKDNREKIEKILTFRIPYYVGPLARGNSRFAWMTRKSEETITPWNFEEVVDKGASAQSFIERMTNFDKNLPNEKVLPKHSLLYEYFTVYNELTKVKYVTEGMRKPAFLSGEQKKAIVDLLFKTNRKVTVKQLKEDYFKKIECFDSVEISGVEDRFNASLGTYHDLLKIIKDKDFLDNEENEDILEDIVLTLTLFEDREMIEERLKTYAHLFDDKVMKQLKRRRYTGWGRLSRKLINGIRDKQSGKTILDFLKSDGFANRNFMQLIHDDSLTFKEDIQKAQVSGQGDSLHEHIANLAGSPAIKKGILQTVKVVDELVKVMGRHKPENIVIEMARENQTTQKGQKNSRERMKRIEEGIKELGSQILKEHPVENTQLQNEKLYLYYLQNGRDMYVDQELDINRLSDYDVDHIVPQSFLKDDSIDNKVLTRSDKARGKSDNVPSEEVVKKMKNYWRQLLNAKLITQRKFDNLTKAERGGLSELDKAGFIKRQLVETRQITKHVAQILDSRMNTKYDENDKLIREVKVITLKSKLVSDFRKDFQFYKVREINNYHHAHDAYLNAVVGTALIKKYPKLESEFVYGDYKVYDVRKMIAKSEQEIGKATAKYFFYSNIMNFFKTEITLANGEIRKRPLIETNGETGEIVWDKGRDFATVRKVLSMPQVNIVKKTEVQTGGFSKESILPKRNSDKLIARKKDWDPKKYGGFDSPTVAYSVLVVAKVEKGKSKKLKSVKELLGITIMERSSFEKNPIDFLEAKGYKEVKKDLIIKLPKYSLFELENGRKRMLASAGELQKGNELALPSKYVNFLYLASHYEKLKGSPEDNEQKQLFVEQHKHYLDEIIEQISEFSKRVILADANLDKVLSAYNKHRDKPIREQAENIIHLFTLTNLGAPAAFKYFDTTIDRKRYTSTKEVLDATLIHQSITGLYETRIDLSQLGGDGGPAPAPAPAPAPAPGGTAPLEEEYRLFLEAPIQNVTLLEQWKREIPKVWAEINPPGLASTQAPIHVQLLSTALPVRVRQYPITLEAKRSLRETIRKFRAAGILRPVHSPWNTPLLPVRKSGTSEYRMVQDLREVNKRVETIHPTVPNPYTLLSLLPPDRIWYSVLDLKDAFFCIPLAPESQLIFAFEWADAEEGESGQLTWTRLPQGFKNSPTLFNEALNRDLQGFRLDHPSVSLLQYVDDLLIAADTQAACLSATRDLLMTLAELGYRVSGKKAQLCQEEVTYLGFKIHKGSRSLSNSRTQAILQIPVPKTKRQVREFLGKIGYCRLFIPGFAELAQPLYAATRPGNDPLVWGEKEEEAFQSLKLALTQPPALALPSLDKPFQLFVEETSGAAKGVLTQALGPWKRPVAYLSKRLDPVAAGWPRCLRAIAAAALLTREASKLTFGQDIEITSSHNLESLLRSPPDKWLTNARITQYQVLLLDPPRVRFKQTAALNPATLLPETDDTLPIHHCLDTLDSLTSTRPDLTDQPLAQAEATLFTDGSSYIRDGKRYAGAAVVTLDSVIWAEPLPIGTSAQKAELIALTKALEWSKDKSVNIYTDSRYAFATLHVHGMIYRERGWLTAGGKAIKNAPEILALLTAVWLPKRVAVMHCKGHQKDDAPTSTGNRRADEVAREVAIRPLSTQATISAGKRTADGSEFEKRTADGSEFESPKKKAKVE

SEQ ID NO: 1422 - protein, 2095 aa, synthetic construct
MPAAKRVKLDGGDKKYSIGLDIGTNSVGWAVITDEYKVPSKKFKVLGNTDRHSIKKNLIGALLFDSGETAEATRLKRTARRRYTRRKNRICYLQEIFSNEMAKVDDSFFHRLEESFLVEEDKKHERHPIFGNIVDEVAYHEKYPTIYHLRKKLVDSTDKADLRLIYLALAHMIKFRGHFLIEGDLNPDNSDVDKLFIQLVQTYNQLFEENPINASGVDAKAILSARLSKSRRLENLIAQLPGEKKNGLFGNLIALSLGLTPNFKSNFDLAEDAKLQLSKDTYDDDLDNLLAQIGDQYADLFLAAKNLSDAILLSDILRVNTEITKAPLSASMIKRYDEHHQDLTLLKALVRQQLPEKYKEIFFDQSKNGYAGYIDGGASQEEFYKFIKPILEKMDGTEELLVKLNREDLLRKQRTFDNGSIPHQIHLGELHAILRRQEDFYPFLKDNREKIEKILTFRIPYYVGPLARGNSRFAWMTRKSEETITPWNFEEVVDKGASAQSFIERMTNFDKNLPNEKVLPKHSLLYEYFTVYNELTKVKYVTEGMRKPAFLSGEQKKAIVDLLFKTNRKVTVKQLKEDYFKKIECFDSVEISGVEDRFNASLGTYHDLLKIIKDKDFLDNEENEDILEDIVLTLTLFEDREMIEERLKTYAHLFDDKVMKQLKRRRYTGWGRLSRKLINGIRDKQSGKTILDFLKSDGFANRNFMQLIHDDSLTFKEDIQKAQVSGQGDSLHEHIANLAGSPAIKKGILQTVKVVDELVKVMGRHKPENIVIEMARENQTTQKGQKNSRERMKRIEEGIKELGSQILKEHPVENTQLQNEKLYLYYLQNGRDMYVDQELDINRLSDYDVDHIVPQSFLKDDSIDNKVLTRSDKARGKSDNVPSEEVVKKMKNYWRQLLNAKLITQRKFDNLTKAERGGLSELDKAGFIKRQLVETRQITKHVAQILDSRMNTKYDENDKLIREVKVITLKSKLVSDFRKDFQFYKVREINNYHHAHDAYLNAVVGTALIKKYPKLESEFVYGDYKVYDVRKMIAKSEQEIGKATAKYFFYSNIMNFFKTEITLANGEIRKRPLIETNGETGEIVWDKGRDFATVRKVLSMPQVNIVKKTEVQTGGFSKESILPKRNSDKLIARKKDWDPKKYGGFDSPTVAYSVLVVAKVEKGKSKKLKSVKELLGITIMERSSFEKNPIDFLEAKGYKEVKKDLIIKLPKYSLFELENGRKRMLASAGELQKGNELALPSKYVNFLYLASHYEKLKGSPEDNEQKQLFVEQHKHYLDEIIEQISEFSKRVILADANLDKVLSAYNKHRDKPIREQAENIIHLFTLTNLGAPAAFKYFDTTIDRKRYTSTKEVLDATLIHQSITGLYETRIDLSQLGGDGGEAAAKGGGGGTAPLEEEYRLFLEAPIQNVTLLEQWKREIPKVWAEINPPGLASTQAPIHVQLLSTALPVRVRQYPITLEAKRSLRETIRKFRAAGILRPVHSPWNTPLLPVRKSGTSEYRMVQDLREVNKRVETIHPTVPNPYTLLSLLPPDRIWYSVLDLKDAFFCIPLAPESQLIFAFEWADAEEGESGQLTWTRLPQGFKNSPTLFNEALNRDLQGFRLDHPSVSLLQYVDDLLIAADTQAACLSATRDLLMTLAELGYRVSGKKAQLCQEEVTYLGFKIHKGSRSLSNSRTQAILQIPVPKTKRQVREFLGKIGYCRLFIPGFAELAQPLYAATRPGNDPLVWGEKEEEAFQSLKLALTQPPALALPSLDKPFQLFVEETSGAAKGVLTQALGPWKRPVAYLSKRLDPVAAGWPRCLRAIAAAALLTREASKLTFGQDIEITSSHNLESLLRSPPDKWLTNARITQYQVLLLDPPRVRFKQTAALNPATLLPETDDTLPIHHCLDTLDSLTSTRPDLTDQPLAQAEATLFTDGSSYIRDGKRYAGAAVVTLDSVIWAEPLPIGTSAQKAELIALTKALEWSKDKSVNIYTDSRYAFATLHVHGMIYRERGWLTAGGKAIKNAPEILALLTAVWLPKRVAVMHCKGHQKDDAPTSTGNRRADEVAREVAIRPLSTQATISAGKRTADGSEFEKRTADGSEFESPKKKAKVE

SEQ ID NO: 1423 - protein, 2097 aa, synthetic construct
MPAAKRVKLDGGDKKYSIGLDIGTNSVGWAVITDEYKVPSKKFKVLGNTDRHSIKKNLIGALLFDSGETAEATRLKRTARRRYTRRKNRICYLQEIFSNEMAKVDDSFFHRLEESFLVEEDKKHERHPIFGNIVDEVAYHEKYPTIYHLRKKLVDSTDKADLRLIYLALAHMIKFRGHFLIEGDLNPDNSDVDKLFIQLVQTYNQLFEENPINASGVDAKAILSARLSKSRRLENLIAQLPGEKKNGLFGNLIALSLGLTPNFKSNFDLAEDAKLQLSKDTYDDDLDNLLAQIGDQYADLFLAAKNLSDAILLSDILRVNTEITKAPLSASMIKRYDEHHQDLTLLKALVRQQLPEKYKEIFFDQSKNGYAGYIDGGASQEEFYKFIKPILEKMDGTEELLVKLNREDLLRKQRTFDNGSIPHQIHLGELHAILRRQEDFYPFLKDNREKIEKILTFRIPYYVGPLARGNSRFAWMTRKSEETITPWNFEEVVDKGASAQSFIERMTNFDKNLPNEKVLPKHSLLYEYFTVYNELTKVKYVTEGMRKPAFLSGEQKKAIVDLLFKTNRKVTVKQLKEDYFKKIECFDSVEISGVEDRFNASLGTYHDLLKIIKDKDFLDNEENEDILEDIVLTLTLFEDREMIEERLKTYAHLFDDKVMKQLKRRRYTGWGRLSRKLINGIRDKQSGKTILDFLKSDGFANRNFMQLIHDDSLTFKEDIQKAQVSGQGDSLHEHIANLAGSPAIKKGILQTVKVVDELVKVMGRHKPENIVIEMARENQTTQKGQKNSRERMKRIEEGIKELGSQILKEHPVENTQLQNEKLYLYYLQNGRDMYVDQELDINRLSDYDVDHIVPQSFLKDDSIDNKVLTRSDKARGKSDNVPSEEVVKKMKNYWRQLLNAKLITQRKFDNLTKAERGGLSELDKAGFIKRQLVETRQITKHVAQILDSRMNTKYDENDKLIREVKVITLKSKLVSDFRKDFQFYKVREINNYHHAHDAYLNAVVGTALIKKYPKLESEFVYGDYKVYDVRKMIAKSEQEIGKATAKYFFYSNIMNFFKTEITLANGEIRKRPLIETNGETGEIVWDKGRDFATVRKVLSMPQVNIVKKTEVQTGGFSKESILPKRNSDKLIARKKDWDPKKYGGFDSPTVAYSVLVVAKVEKGKSKKLKSVKELLGITIMERSSFEKNPIDFLEAKGYKEVKKDLIIKLPKYSLFELENGRKRMLASAGELQKGNELALPSKYVNFLYLASHYEKLKGSPEDNEQKQLFVEQHKHYLDEIIEQISEFSKRVILADANLDKVLSAYNKHRDKPIREQAENIIHLFTLTNLGAPAAFKYFDTTIDRKRYTSTKEVLDATLIHQSITGLYETRIDLSQLGGDGGGGGGSGGGGSGGTAPLEEEYRLFLEAPIQNVTLLEQWKREIPKVWAEINPPGLASTQAPIHVQLLSTALPVRVRQYPITLEAKRSLRETIRKFRAAGILRPVHSPWNTPLLPVRKSGTSEYRMVQDLREVNKRVETIHPTVPNPYTLLSLLPPDRIWYSVLDLKDAFFCIPLAPESQLIFAFEWADAEEGESGQLTWTRLPQGFKNSPTLFNEALNRDLQGFRLDHPSVSLLQYVDDLLIAADTQAACLSATRDLLMTLAELGYRVSGKKAQLCQEEVTYLGFKIHKGSRSLSNSRTQAILQIPVPKTKRQVREFLGKIGYCRLFIPGFAELAQPLYAATRPGNDPLVWGEKEEEAFQSLKLALTQPPALALPSLDKPFQLFVEETSGAAKGVLTQALGPWKRPVAYLSKRLDPVAAGWPRCLRAIAAAALLTREASKLTFGQDIEITSSHNLESLLRSPPDKWLTNARITQYQVLLLDPPRVRFKQTAALNPATLLPETDDTLPIHHCLDTLDSLTSTRPDLTDQPLAQAEATLFTDGSSYIRDGKRYAGAAVVTLDSVIWAEPLPIGTSAQKAELIALTKALEWSKDKSVNIYTDSRYAFATLHVHGMIYRERGWLTAGGKAIKNAPEILALLTAVWLPKRVAVMHCKGHQKDDAPTSTGNRRADEVAREVAIRPLSTQATISAGKRTADGSEFEKRTADGSEFESPKKKAKVE

SEQ ID NO: 1424 - protein, 2098 aa, synthetic construct
MPAAKRVKLDGGDKKYSIGLDIGTNSVGWAVITDEYKVPSKKFKVLGNTDRHSIKKNLIGALLFDSGETAEATRLKRTARRRYTRRKNRICYLQEIFSNEMAKVDDSFFHRLEESFLVEEDKKHERHPIFGNIVDEVAYHEKYPTIYHLRKKLVDSTDKADLRLIYLALAHMIKFRGHFLIEGDLNPDNSDVDKLFIQLVQTYNQLFEENPINASGVDAKAILSARLSKSRRLENLIAQLPGEKKNGLFGNLIALSLGLTPNFKSNFDLAEDAKLQLSKDTYDDDLDNLLAQIGDQYADLFLAAKNLSDAILLSDILRVNTEITKAPLSASMIKRYDEHHQDLTLLKALVRQQLPEKYKEIFFDQSKNGYAGYIDGGASQEEFYKFIKPILEKMDGTEELLVKLNREDLLRKQRTFDNGSIPHQIHLGELHAILRRQEDFYPFLKDNREKIEKILTFRIPYYVGPLARGNSRFAWMTRKSEETITPWNFEEVVDKGASAQSFIERMTNFDKNLPNEKVLPKHSLLYEYFTVYNELTKVKYVTEGMRKPAFLSGEQKKAIVDLLFKTNRKVTVKQLKEDYFKKIECFDSVEISGVEDRFNASLGTYHDLLKIIKDKDFLDNEENEDILEDIVLTLTLFEDREMIEERLKTYAHLFDDKVMKQLKRRRYTGWGRLSRKLINGIRDKQSGKTILDFLKSDGFANRNFMQLIHDDSLTFKEDIQKAQVSGQGDSLHEHIANLAGSPAIKKGILQTVKVVDELVKVMGRHKPENIVIEMARENQTTQKGQKNSRERMKRIEEGIKELGSQILKEHPVENTQLQNEKLYLYYLQNGRDMYVDQELDINRLSDYDVDHIVPQSFLKDDSIDNKVLTRSDKARGKSDNVPSEEVVKKMKNYWRQLLNAKLITQRKFDNLTKAERGGLSELDKAGFIKRQLVETRQITKHVAQILDSRMNTKYDENDKLIREVKVITLKSKLVSDFRKDFQFYKVREINNYHHAHDAYLNAVVGTALIKKYPKLESEFVYGDYKVYDVRKMIAKSEQEIGKATAKYFFYSNIMNFFKTEITLANGEIRKRPLIETNGETGEIVWDKGRDFATVRKVLSMPQVNIVKKTEVQTGGFSKESILPKRNSDKLIARKKDWDPKKYGGFDSPTVAYSVLVVAKVEKGKSKKLKSVKELLGITIMERSSFEKNPIDFLEAKGYKEVKKDLIIKLPKYSLFELENGRKRMLASAGELQKGNELALPSKYVNFLYLASHYEKLKGSPEDNEQKQLFVEQHKHYLDEIIEQISEFSKRVILADANLDKVLSAYNKHRDKPIREQAENIIHLFTLTNLGAPAAFKYFDTTIDRKRYTSTKEVLDATLIHQSITGLYETRIDLSQLGGDGGGSSGGGEAAAKGGTAPLEEEYRLFLEAPIQNVTLLEQWKREIPKVWAEINPPGLASTQAPIHVQLLSTALPVRVRQYPITLEAKRSLRETIRKFRAAGILRPVHSPWNTPLLPVRKSGTSEYRMVQDLREVNKRVETIHPTVPNPYTLLSLLPPDRIWYSVLDLKDAFFCIPLAPESQLIFAFEWADAEEGESGQLTWTRLPQGFKNSPTLFNEALNRDLQGFRLDHPSVSLLQYVDDLLIAADTQAACLSATRDLLMTLAELGYRVSGKKAQLCQEEVTYLGFKIHKGSRSLSNSRTQAILQIPVPKTKRQVREFLGKIGYCRLFIPGFAELAQPLYAATRPGNDPLVWGEKEEEAFQSLKLALTQPPALALPSLDKPFQLFVEETSGAAKGVLTQALGPWKRPVAYLSKRLDPVAAGWPRCLRAIAAAALLTREASKLTFGQDIEITSSHNLESLLRSPPDKWLTNARITQYQVLLLDPPRVRFKQTAALNPATLLPETDDTLPIHHCLDTLDSLTSTRPDLTDQPLAQAEATLFTDGSSYIRDGKRYAGAAVVTLDSVIWAEPLPIGTSAQKAELIALTKALEWSKDKSVNIYTDSRYAFATLHVHGMIYRERGWLTAGGKAIKNAPEILALLTAVWLPKRVAVMHCKGHQKDDAPTSTGNRRADEVAREVAIRPLSTQATISAGKRTADGSEFEKRTADGSEFESPKKKAKVE

SEQ ID NO: 1425 - protein, 2098 aa, synthetic construct
MPAAKRVKLDGGDKKYSIGLDIGTNSVGWAVITDEYKVPSKKFKVLGNTDRHSIKKNLIGALLFDSGETAEATRLKRTARRRYTRRKNRICYLQEIFSNEMAKVDDSFFHRLEESFLVEEDKKHERHPIFGNIVDEVAYHEKYPTIYHLRKKLVDSTDKADLRLIYLALAHMIKFRGHFLIEGDLNPDNSDVDKLFIQLVQTYNQLFEENPINASGVDAKAILSARLSKSRRLENLIAQLPGEKKNGLFGNLIALSLGLTPNFKSNFDLAEDAKLQLSKDTYDDDLDNLLAQIGDQYADLFLAAKNLSDAILLSDILRVNTEITKAPLSASMIKRYDEHHQDLTLLKALVRQQLPEKYKEIFFDQSKNGYAGYIDGGASQEEFYKFIKPILEKMDGTEELLVKLNREDLLRKQRTFDNGSIPHQIHLGELHAILRRQEDFYPFLKDNREKIEKILTFRIPYYVGPLARGNSRFAWMTRKSEETITPWNFEEVVDKGASAQSFIERMTNFDKNLPNEKVLPKHSLLYEYFTVYNELTKVKYVTEGMRKPAFLSGEQKKAIVDLLFKTNRKVTVKQLKEDYFKKIECFDSVEISGVEDRFNASLGTYHDLLKIIKDKDFLDNEENEDILEDIVLTLTLFEDREMIEERLKTYAHLFDDKVMKQLKRRRYTGWGRLSRKLINGIRDKQSGKTILDFLKSDGFANRNFMQLIHDDSLTFKEDIQKAQVSGQGDSLHEHIANLAGSPAIKKGILQTVKVVDELVKVMGRHKPENIVIEMARENQTTQKGQKNSRERMKRIEEGIKELGSQILKEHPVENTQLQNEKLYLYYLQNGRDMYVDQELDINRLSDYDVDHIVPQSFLKDDSIDNKVLTRSDKARGKSDNVPSEEVVKKMKNYWRQLLNAKLITQRKFDNLTKAERGGLSELDKAGFIKRQLVETRQITKHVAQILDSRMNTKYDENDKLIREVKVITLKSKLVSDFRKDFQFYKVREINNYHHAHDAYLNAVVGTALIKKYPKLESEFVYGDYKVYDVRKMIAKSEQEIGKATAKYFFYSNIMNFFKTEITLANGEIRKRPLIETNGETGEIVWDKGRDFATVRKVLSMPQVNIVKKTEVQTGGFSKESILPKRNSDKLIARKKDWDPKKYGGFDSPTVAYSVLVVAKVEKGKSKKLKSVKELLGITIMERSSFEKNPIDFLEAKGYKEVKKDLIIKLPKYSLFELENGRKRMLASAGELQKGNELALPSKYVNFLYLASHYEKLKGSPEDNEQKQLFVEQHKHYLDEIIEQISEFSKRVILADANLDKVLSAYNKHRDKPIREQAENIIHLFTLTNLGAPAAFKYFDTTIDRKRYTSTKEVLDATLIHQSITGLYETRIDLSQLGGDGGGGSEAAAKGGGGGTAPLEEEYRLFLEAPIQNVTLLEQWKREIPKVWAEINPPGLASTQAPIHVQLLSTALPVRVRQYPITLEAKRSLRETIRKFRAAGILRPVHSPWNTPLLPVRKSGTSEYRMVQDLREVNKRVETIHPTVPNPYTLLSLLPPDRIWYSVLDLKDAFFCIPLAPESQLIFAFEWADAEEGESGQLTWTRLPQGFKNSPTLFNEALNRDLQGFRLDHPSVSLLQYVDDLLIAADTQAACLSATRDLLMTLAELGYRVSGKKAQLCQEEVTYLGFKIHKGSRSLSNSRTQAILQIPVPKTKRQVREFLGKIGYCRLFIPGFAELAQPLYAATRPGNDPLVWGEKEEEAFQSLKLALTQPPALALPSLDKPFQLFVEETSGAAKGVLTQALGPWKRPVAYLSKRLDPVAAGWPRCLRAIAAAALLTREASKLTFGQDIEITSSHNLESLLRSPPDKWLTNARITQYQVLLLDPPRVRFKQTAALNPATLLPETDDTLPIHHCLDTLDSLTSTRPDLTDQPLAQAEATLFTDGSSYIRDGKRYAGAAVVTLDSVIWAEPLPIGTSAQKAELIALTKALEWSKDKSVNIYTDSRYAFATLHVHGMIYRERGWLTAGGKAIKNAPEILALLTAVWLPKRVAVMHCKGHQKDDAPTSTGNRRADEVAREVAIRPLSTQATISAGKRTADGSEFEKRTADGSEFESPKKKAKVE

SEQ ID NO: 1426 - protein, 2117 aa, synthetic construct
MPAAKRVKLDGGDKKYSIGLDIGTNSVGWAVITDEYKVPSKKFKVLGNTDRHSIKKNLIGALLFDSGETAEATRLKRTARRRYTRRKNRICYLQEIFSNEMAKVDDSFFHRLEESFLVEEDKKHERHPIFGNIVDEVAYHEKYPTIYHLRKKLVDSTDKADLRLIYLALAHMIKFRGHFLIEGDLNPDNSDVDKLFIQLVQTYNQLFEENPINASGVDAKAILSARLSKSRRLENLIAQLPGEKKNGLFGNLIALSLGLTPNFKSNFDLAEDAKLQLSKDTYDDDLDNLLAQIGDQYADLFLAAKNLSDAILLSDILRVNTEITKAPLSASMIKRYDEHHQDLTLLKALVRQQLPEKYKEIFFDQSKNGYAGYIDGGASQEEFYKFIKPILEKMDGTEELLVKLNREDLLRKQRTFDNGSIPHQIHLGELHAILRRQEDFYPFLKDNREKIEKILTFRIPYYVGPLARGNSRFAWMTRKSEETITPWNFEEVVDKGASAQSFIERMTNFDKNLPNEKVLPKHSLLYEYFTVYNELTKVKYVTEGMRKPAFLSGEQKKAIVDLLFKTNRKVTVKQLKEDYFKKIECFDSVEISGVEDRFNASLGTYHDLLKIIKDKDFLDNEENEDILEDIVLTLTLFEDREMIEERLKTYAHLFDDKVMKQLKRRRYTGWGRLSRKLINGIRDKQSGKTILDFLKSDGFANRNFMQLIHDDSLTFKEDIQKAQVSGQGDSLHEHIANLAGSPAIKKGILQTVKVVDELVKVMGRHKPENIVIEMARENQTTQKGQKNSRERMKRIEEGIKELGSQILKEHPVENTQLQNEKLYLYYLQNGRDMYVDQELDINRLSDYDVDHIVPQSFLKDDSIDNKVLTRSDKARGKSDNVPSEEVVKKMKNYWRQLLNAKLITQRKFDNLTKAERGGLSELDKAGFIKRQLVETRQITKHVAQILDSRMNTKYDENDKLIREVKVITLKSKLVSDFRKDFQFYKVREINNYHHAHDAYLNAVVGTALIKKYPKLESEFVYGDYKVYDVRKMIAKSEQEIGKATAKYFFYSNIMNFFKTEITLANGEIRKRPLIETNGETGEIVWDKGRDFATVRKVLSMPQVNIVKKTEVQTGGFSKESILPKRNSDKLIARKKDWDPKKYGGFDSPTVAYSVLVVAKVEKGKSKKLKSVKELLGITIMERSSFEKNPIDFLEAKGYKEVKKDLIIKLPKYSLFELENGRKRMLASAGELQKGNELALPSKYVNFLYLASHYEKLKGSPEDNEQKQLFVEQHKHYLDEIIEQISEFSKRVILADANLDKVLSAYNKHRDKPIREQAENIIHLFTLTNLGAPAAFKYFDTTIDRKRYTSTKEVLDATLIHQSITGLYETRIDLSQLGGDGGEAAAKEAAAKEAAAKEAAAKEAAAKEAAAKGGTAPLEEEYRLFLEAPIQNVTLLEQWKREIPKVWAEINPPGLASTQAPIHVQLLSTALPVRVRQYPITLEAKRSLRETIRKFRAAGILRPVHSPWNTPLLPVRKSGTSEYRMVQDLREVNKRVETIHPTVPNPYTLLSLLPPDRIWYSVLDLKDAFFCIPLAPESQLIFAFEWADAEEGESGQLTWTRLPQGFKNSPTLFNEALNRDLQGFRLDHPSVSLLQYVDDLLIAADTQAACLSATRDLLMTLAELGYRVSGKKAQLCQEEVTYLGFKIHKGSRSLSNSRTQAILQIPVPKTKRQVREFLGKIGYCRLFIPGFAELAQPLYAATRPGNDPLVWGEKEEEAFQSLKLALTQPPALALPSLDKPFQLFVEETSGAAKGVLTQALGPWKRPVAYLSKRLDPVAAGWPRCLRAIAAAALLTREASKLTFGQDIEITSSHNLESLLRSPPDKWLTNARITQYQVLLLDPPRVRFKQTAALNPATLLPETDDTLPIHHCLDTLDSLTSTRPDLTDQPLAQAEATLFTDGSSYIRDGKRYAGAAVVTLDSVIWAEPLPIGTSAQKAELIALTKALEWSKDKSVNIYTDSRYAFATLHVHGMIYRERGWLTAGGKAIKNAPEILALLTAVWLPKRVAVMHCKGHQKDDAPTSTGNRRADEVAREVAIRPLSTQATISAGKRTADGSEFEKRTADGSEFESPKKKAKVE

SEQ ID NO: 1427 - protein, 2098 aa, synthetic construct
MPAAKRVKLDGGDKKYSIGLDIGTNSVGWAVITDEYKVPSKKFKVLGNTDRHSIKKNLIGALLFDSGETAEATRLKRTARRRYTRRKNRICYLQEIFSNEMAKVDDSFFHRLEESFLVEEDKKHERHPIFGNIVDEVAYHEKYPTIYHLRKKLVDSTDKADLRLIYLALAHMIKFRGHFLIEGDLNPDNSDVDKLFIQLVQTYNQLFEENPINASGVDAKAILSARLSKSRRLENLIAQLPGEKKNGLFGNLIALSLGLTPNFKSNFDLAEDAKLQLSKDTYDDDLDNLLAQIGDQYADLFLAAKNLSDAILLSDILRVNTEITKAPLSASMIKRYDEHHQDLTLLKALVRQQLPEKYKEIFFDQSKNGYAGYIDGGASQEEFYKFIKPILEKMDGTEELLVKLNREDLLRKQRTFDNGSIPHQIHLGELHAILRRQEDFYPFLKDNREKIEKILTFRIPYYVGPLARGNSRFAWMTRKSEETITPWNFEEVVDKGASAQSFIERMTNFDKNLPNEKVLPKHSLLYEYFTVYNELTKVKYVTEGMRKPAFLSGEQKKAIVDLLFKTNRKVTVKQLKEDYFKKIECFDSVEISGVEDRFNASLGTYHDLLKIIKDKDFLDNEENEDILEDIVLTLTLFEDREMIEERLKTYAHLFDDKVMKQLKRRRYTGWGRLSRKLINGIRDKQSGKTILDFLKSDGFANRNFMQLIHDDSLTFKEDIQKAQVSGQGDSLHEHIANLAGSPAIKKGILQTVKVVDELVKVMGRHKPENIVIEMARENQTTQKGQKNSRERMKRIEEGIKELGSQILKEHPVENTQLQNEKLYLYYLQNGRDMYVDQELDINRLSDYDVDHIVPQSFLKDDSIDNKVLTRSDKARGKSDNVPSEEVVKKMKNYWRQLLNAKLITQRKFDNLTKAERGGLSELDKAGFIKRQLVETRQITKHVAQILDSRMNTKYDENDKLIREVKVITLKSKLVSDFRKDFQFYKVREINNYHHAHDAYLNAVVGTALIKKYPKLESEFVYGDYKVYDVRKMIAKSEQEIGKATAKYFFYSNIMNFFKTEITLANGEIRKRPLIETNGETGEIVWDKGRDFATVRKVLSMPQVNIVKKTEVQTGGFSKESILPKRNSDKLIARKKDWDPKKYGGFDSPTVAYSVLVVAKVEKGKSKKLKSVKELLGITIMERSSFEKNPIDFLEAKGYKEVKKDLIIKLPKYSLFELENGRKRMLASAGELQKGNELALPSKYVNFLYLASHYEKLKGSPEDNEQKQLFVEQHKHYLDEIIEQISEFSKRVILADANLDKVLSAYNKHRDKPIREQAENIIHLFTLTNLGAPAAFKYFDTTIDRKRYTSTKEVLDATLIHQSITGLYETRIDLSQLGGDGGGGGGGSEAAAKGGTAPLEEEYRLFLEAPIQNVTLLEQWKREIPKVWAEINPPGLASTQAPIHVQLLSTALPVRVRQYPITLEAKRSLRETIRKFRAAGILRPVHSPWNTPLLPVRKSGTSEYRMVQDLREVNKRVETIHPTVPNPYTLLSLLPPDRIWYSVLDLKDAFFCIPLAPESQLIFAFEWADAEEGESGQLTWTRLPQGFKNSPTLFNEALNRDLQGFRLDHPSVSLLQYVDDLLIAADTQAACLSATRDLLMTLAELGYRVSGKKAQLCQEEVTYLGFKIHKGSRSLSNSRTQAILQIPVPKTKRQVREFLGKIGYCRLFIPGFAELAQPLYAATRPGNDPLVWGEKEEEAFQSLKLALTQPPALALPSLDKPFQLFVEETSGAAKGVLTQALGPWKRPVAYLSKRLDPVAAGWPRCLRAIAAAALLTREASKLTFGQDIEITSSHNLESLLRSPPDKWLTNARITQYQVLLLDPPRVRFKQTAALNPATLLPETDDTLPIHHCLDTLDSLTSTRPDLTDQPLAQAEATLFTDGSSYIRDGKRYAGAAVVTLDSVIWAEPLPIGTSAQKAELIALTKALEWSKDKSVNIYTDSRYAFATLHVHGMIYRERGWLTAGGKAIKNAPEILALLTAVWLPKRVAVMHCKGHQKDDAPTSTGNRRADEVAREVAIRPLSTQATISAGKRTADGSEFEKRTADGSEFESPKKKAKVE

SEQ ID NO: 1428 - protein, 2095 aa, synthetic construct
MPAAKRVKLDGGDKKYSIGLDIGTNSVGWAVITDEYKVPSKKFKVLGNTDRHSIKKNLIGALLFDSGETAEATRLKRTARRRYTRRKNRICYLQEIFSNEMAKVDDSFFHRLEESFLVEEDKKHERHPIFGNIVDEVAYHEKYPTIYHLRKKLVDSTDKADLRLIYLALAHMIKFRGHFLIEGDLNPDNSDVDKLFIQLVQTYNQLFEENPINASGVDAKAILSARLSKSRRLENLIAQLPGEKKNGLFGNLIALSLGLTPNFKSNFDLAEDAKLQLSKDTYDDDLDNLLAQIGDQYADLFLAAKNLSDAILLSDILRVNTEITKAPLSASMIKRYDEHHQDLTLLKALVRQQLPEKYKEIFFDQSKNGYAGYIDGGASQEEFYKFIKPILEKMDGTEELLVKLNREDLLRKQRTFDNGSIPHQIHLGELHAILRRQEDFYPFLKDNREKIEKILTFRIPYYVGPLARGNSRFAWMTRKSEETITPWNFEEVVDKGASAQSFIERMTNFDKNLPNEKVLPKHSLLYEYFTVYNELTKVKYVTEGMRKPAFLSGEQKKAIVDLLFKTNRKVTVKQLKEDYFKKIECFDSVEISGVEDRFNASLGTYHDLLKIIKDKDFLDNEENEDILEDIVLTLTLFEDREMIEERLKTYAHLFDDKVMKQLKRRRYTGWGRLSRKLINGIRDKQSGKTILDFLKSDGFANRNFMQLIHDDSLTFKEDIQKAQVSGQGDSLHEHIANLAGSPAIKKGILQTVKVVDELVKVMGRHKPENIVIEMARENQTTQKGQKNSRERMKRIEEGIKELGSQILKEHPVENTQLQNEKLYLYYLQNGRDMYVDQELDINRLSDYDVDHIVPQSFLKDDSIDNKVLTRSDKARGKSDNVPSEEVVKKMKNYWRQLLNAKLITQRKFDNLTKAERGGLSELDKAGFIKRQLVETRQITKHVAQILDSRMNTKYDENDKLIREVKVITLKSKLVSDFRKDFQFYKVREINNYHHAHDAYLNAVVGTALIKKYPKLESEFVYGDYKVYDVRKMIAKSEQEIGKATAKYFFYSNIMNFFKTEITLANGEIRKRPLIETNGETGEIVWDKGRDFATVRKVLSMPQVNIVKKTEVQTGGFSKESILPKRNSDKLIARKKDWDPKKYGGFDSPTVAYSVLVVAKVEKGKSKKLKSVKELLGITIMERSSFEKNPIDFLEAKGYKEVKKDLIIKLPKYSLFELENGRKRMLASAGELQKGNELALPSKYVNFLYLASHYEKLKGSPEDNEQKQLFVEQHKHYLDEIIEQISEFSKRVILADANLDKVLSAYNKHRDKPIREQAENIIHLFTLTNLGAPAAFKYFDTTIDRKRYTSTKEVLDATLIHQSITGLYETRIDLSQLGGDGGEAAAKGGSGGTAPLEEEYRLFLEAPIQNVTLLEQWKREIPKVWAEINPPGLASTQAPIHVQLLSTALPVRVRQYPITLEAKRSLRETIRKFRAAGILRPVHSPWNTPLLPVRKSGTSEYRMVQDLREVNKRVETIHPTVPNPYTLLSLLPPDRIWYSVLDLKDAFFCIPLAPESQLIFAFEWADAEEGESGQLTWTRLPQGFKNSPTLFNEALNRDLQGFRLDHPSVSLLQYVDDLLIAADTQAACLSATRDLLMTLAELGYRVSGKKAQLCQEEVTYLGFKIHKGSRSLSNSRTQAILQIPVPKTKRQVREFLGKIGYCRLFIPGFAELAQPLYAATRPGNDPLVWGEKEEEAFQSLKLALTQPPALALPSLDKPFQLFVEETSGAAKGVLTQALGPWKRPVAYLSKRLDPVAAGWPRCLRAIAAAALLTREASKLTFGQDIEITSSHNLESLLRSPPDKWLTNARITQYQVLLLDPPRVRFKQTAALNPATLLPETDDTLPIHHCLDTLDSLTSTRPDLTDQPLAQAEATLFTDGSSYIRDGKRYAGAAVVTLDSVIWAEPLPIGTSAQKAELIALTKALEWSKDKSVNIYTDSRYAFATLHVHGMIYRERGWLTAGGKAIKNAPEILALLTAVWLPKRVAVMHCKGHQKDDAPTSTGNRRADEVAREVAIRPLSTQATISAGKRTADGSEFEKRTADGSEFESPKKKAKVE

SEQ ID NO: 1429 - protein, 2096 aa, synthetic construct
MPAAKRVKLDGGDKKYSIGLDIGTNSVGWAVITDEYKVPSKKFKVLGNTDRHSIKKNLIGALLFDSGETAEATRLKRTARRRYTRRKNRICYLQEIFSNEMAKVDDSFFHRLEESFLVEEDKKHERHPIFGNIVDEVAYHEKYPTIYHLRKKLVDSTDKADLRLIYLALAHMIKFRGHFLIEGDLNPDNSDVDKLFIQLVQTYNQLFEENPINASGVDAKAILSARLSKSRRLENLIAQLPGEKKNGLFGNLIALSLGLTPNFKSNFDLAEDAKLQLSKDTYDDDLDNLLAQIGDQYADLFLAAKNLSDAILLSDILRVNTEITKAPLSASMIKRYDEHHQDLTLLKALVRQQLPEKYKEIFFDQSKNGYAGYIDGGASQEEFYKFIKPILEKMDGTEELLVKLNREDLLRKQRTFDNGSIPHQIHLGELHAILRRQEDFYPFLKDNREKIEKILTFRIPYYVGPLARGNSRFAWMTRKSEETITPWNFEEVVDKGASAQSFIERMTNFDKNLPNEKVLPKHSLLYEYFTVYNELTKVKYVTEGMRKPAFLSGEQKKAIVDLLFKTNRKVTVKQLKEDYFKKIECFDSVEISGVEDRFNASLGTYHDLLKIIKDKDFLDNEENEDILEDIVLTLTLFEDREMIEERLKTYAHLFDDKVMKQLKRRRYTGWGRLSRKLINGIRDKQSGKTILDFLKSDGFANRNFMQLIHDDSLTFKEDIQKAQVSGQGDSLHEHIANLAGSPAIKKGILQTVKVVDELVKVMGRHKPENIVIEMARENQTTQKGQKNSRERMKRIEEGIKELGSQILKEHPVENTQLQNEKLYLYYLQNGRDMYVDQELDINRLSDYDVDHIVPQSFLKDDSIDNKVLTRSDKARGKSDNVPSEEVVKKMKNYWRQLLNAKLITQRKFDNLTKAERGGLSELDKAGFIKRQLVETRQITKHVAQILDSRMNTKYDENDKLIREVKVITLKSKLVSDFRKDFQFYKVREINNYHHAHDAYLNAVVGTALIKKYPKLESEFVYGDYKVYDVRKMIAKSEQEIGKATAKYFFYSNIMNFFKTEITLANGEIRKRPLIETNGETGEIVWDKGRDFATVRKVLSMPQVNIVKKTEVQTGGFSKESILPKRNSDKLIARKKDWDPKKYGGFDSPTVAYSVLVVAKVEKGKSKKLKSVKELLGITIMERSSFEKNPIDFLEAKGYKEVKKDLIIKLPKYSLFELENGRKRMLASAGELQKGNELALPSKYVNFLYLASHYEKLKGSPEDNEQKQLFVEQHKHYLDEIIEQISEFSKRVILADANLDKVLSAYNKHRDKPIREQAENIIHLFTLTNLGAPAAFKYFDTTIDRKRYTSTKEVLDATLIHQSITGLYETRIDLSQLGGDGGPAPAPAPAPGGTAPLEEEYRLFLEAPIQNVTLLEQWKREIPKVWAEINPPGLASTQAPIHVQLLSTALPVRVRQYPITLEAKRSLRETIRKFRAAGILRPVHSPWNTPLLPVRKSGTSEYRMVQDLREVNKRVETIHPTVPNPYTLLSLLPPDRIWYSVLDLKDAFFCIPLAPESQLIFAFEWADAEEGESGQLTWTRLPQGFKNSPTLFNEALNRDLQGFRLDHPSVSLLQYVDDLLIAADTQAACLSATRDLLMTLAELGYRVSGKKAQLCQEEVTYLGFKIHKGSRSLSNSRTQAILQIPVPKTKRQVREFLGKIGYCRLFIPGFAELAQPLYAATRPGNDPLVWGEKEEEAFQSLKLALTQPPALALPSLDKPFQLFVEETSGAAKGVLTQALGPWKRPVAYLSKRLDPVAAGWPRCLRAIAAAALLTREASKLTFGQDIEITSSHNLESLLRSPPDKWLTNARITQYQVLLLDPPRVRFKQTAALNPATLLPETDDTLPIHHCLDTLDSLTSTRPDLTDQPLAQAEATLFTDGSSYIRDGKRYAGAAVVTLDSVIWAEPLPIGTSAQKAELIALTKALEWSKDKSVNIYTDSRYAFATLHVHGMIYRERGWLTAGGKAIKNAPEILALLTAVWLPKRVAVMHCKGHQKDDAPTSTGNRRADEVAREVAIRPLSTQATISAGKRTADGSEFEKRTADGSEFESPKKKAKVE

SEQ ID NO: 1430 - protein, 2093 aa, synthetic construct
MPAAKRVKLDGGDKKYSIGLDIGTNSVGWAVITDEYKVPSKKFKVLGNTDRHSIKKNLIGALLFDSGETAEATRLKRTARRRYTRRKNRICYLQEIFSNEMAKVDDSFFHRLEESFLVEEDKKHERHPIFGNIVDEVAYHEKYPTIYHLRKKLVDSTDKADLRLIYLALAHMIKFRGHFLIEGDLNPDNSDVDKLFIQLVQTYNQLFEENPINASGVDAKAILSARLSKSRRLENLIAQLPGEKKNGLFGNLIALSLGLTPNFKSNFDLAEDAKLQLSKDTYDDDLDNLLAQIGDQYADLFLAAKNLSDAILLSDILRVNTEITKAPLSASMIKRYDEHHQDLTLLKALVRQQLPEKYKEIFFDQSKNGYAGYIDGGASQEEFYKFIKPILEKMDGTEELLVKLNREDLLRKQRTFDNGSIPHQIHLGELHAILRRQEDFYPFLKDNREKIEKILTFRIPYYVGPLARGNSRFAWMTRKSEETITPWNFEEVVDKGASAQSFIERMTNFDKNLPNEKVLPKHSLLYEYFTVYNELTKVKYVTEGMRKPAFLSGEQKKAIVDLLFKTNRKVTVKQLKEDYFKKIECFDSVEISGVEDRFNASLGTYHDLLKIIKDKDFLDNEENEDILEDIVLTLTLFEDREMIEERLKTYAHLFDDKVMKQLKRRRYTGWGRLSRKLINGIRDKQSGKTILDFLKSDGFANRNFMQLIHDDSLTFKEDIQKAQVSGQGDSLHEHIANLAGSPAIKKGILQTVKVVDELVKVMGRHKPENIVIEMARENQTTQKGQKNSRERMKRIEEGIKELGSQILKEHPVENTQLQNEKLYLYYLQNGRDMYVDQELDINRLSDYDVDHIVPQSFLKDDSIDNKVLTRSDKARGKSDNVPSEEVVKKMKNYWRQLLNAKLITQRKFDNLTKAERGGLSELDKAGFIKRQLVETRQITKHVAQILDSRMNTKYDENDKLIREVKVITLKSKLVSDFRKDFQFYKVREINNYHHAHDAYLNAVVGTALIKKYPKLESEFVYGDYKVYDVRKMIAKSEQEIGKATAKYFFYSNIMNFFKTEITLANGEIRKRPLIETNGETGEIVWDKGRDFATVRKVLSMPQVNIVKKTEVQTGGFSKESILPKRNSDKLIARKKDWDPKKYGGFDSPTVAYSVLVVAKVEKGKSKKLKSVKELLGITIMERSSFEKNPIDFLEAKGYKEVKKDLIIKLPKYSLFELENGRKRMLASAGELQKGNELALPSKYVNFLYLASHYEKLKGSPEDNEQKQLFVEQHKHYLDEIIEQISEFSKRVILADANLDKVLSAYNKHRDKPIREQAENIIHLFTLTNLGAPAAFKYFDTTIDRKRYTSTKEVLDATLIHQSITGLYETRIDLSQLGGDGGGSSGGGGGTAPLEEEYRLFLEAPIQNVTLLEQWKREIPKVWAEINPPGLASTQAPIHVQLLSTALPVRVRQYPITLEAKRSLRETIRKFRAAGILRPVHSPWNTPLLPVRKSGTSEYRMVQDLREVNKRVETIHPTVPNPYTLLSLLPPDRIWYSVLDLKDAFFCIPLAPESQLIFAFEWADAEEGESGQLTWTRLPQGFKNSPTLFNEALNRDLQGFRLDHPSVSLLQYVDDLLIAADTQAACLSATRDLLMTLAELGYRVSGKKAQLCQEEVTYLGFKIHKGSRSLSNSRTQAILQIPVPKTKRQVREFLGKIGYCRLFIPGFAELAQPLYAATRPGNDPLVWGEKEEEAFQSLKLALTQPPALALPSLDKPFQLFVEETSGAAKGVLTQALGPWKRPVAYLSKRLDPVAAGWPRCLRAIAAAALLTREASKLTFGQDIEITSSHNLESLLRSPPDKWLTNARITQYQVLLLDPPRVRFKQTAALNPATLLPETDDTLPIHHCLDTLDSLTSTRPDLTDQPLAQAEATLFTDGSSYIRDGKRYAGAAVVTLDSVIWAEPLPIGTSAQKAELIALTKALEWSKDKSVNIYTDSRYAFATLHVHGMIYRERGWLTAGGKAIKNAPEILALLTAVWLPKRVAVMHCKGHQKDDAPTSTGNRRADEVAREVAIRPLSTQATISAGKRTADGSEFEKRTADGSEFESPKKKAKVE

SEQ ID NO: 1431 - protein, 2098 aa, synthetic construct
MPAAKRVKLDGGDKKYSIGLDIGTNSVGWAVITDEYKVPSKKFKVLGNTDRHSIKKNLIGALLFDSGETAEATRLKRTARRRYTRRKNRICYLQEIFSNEMAKVDDSFFHRLEESFLVEEDKKHERHPIFGNIVDEVAYHEKYPTIYHLRKKLVDSTDKADLRLIYLALAHMIKFRGHFLIEGDLNPDNSDVDKLFIQLVQTYNQLFEENPINASGVDAKAILSARLSKSRRLENLIAQLPGEKKNGLFGNLIALSLGLTPNFKSNFDLAEDAKLQLSKDTYDDDLDNLLAQIGDQYADLFLAAKNLSDAILLSDILRVNTEITKAPLSASMIKRYDEHHQDLTLLKALVRQQLPEKYKEIFFDQSKNGYAGYIDGGASQEEFYKFIKPILEKMDGTEELLVKLNREDLLRKQRTFDNGSIPHQIHLGELHAILRRQEDFYPFLKDNREKIEKILTFRIPYYVGPLARGNSRFAWMTRKSEETITPWNFEEVVDKGASAQSFIERMTNFDKNLPNEKVLPKHSLLYEYFTVYNELTKVKYVTEGMRKPAFLSGEQKKAIVDLLFKTNRKVTVKQLKEDYFKKIECFDSVEISGVEDRFNASLGTYHDLLKIIKDKDFLDNEENEDILEDIVLTLTLFEDREMIEERLKTYAHLFDDKVMKQLKRRRYTGWGRLSRKLINGIRDKQSGKTILDFLKSDGFANRNFMQLIHDDSLTFKEDIQKAQVSGQGDSLHEHIANLAGSPAIKKGILQTVKVVDELVKVMGRHKPENIVIEMARENQTTQKGQKNSRERMKRIEEGIKELGSQILKEHPVENTQLQNEKLYLYYLQNGRDMYVDQELDINRLSDYDVDHIVPQSFLKDDSIDNKVLTRSDKARGKSDNVPSEEVVKKMKNYWRQLLNAKLITQRKFDNLTKAERGGLSELDKAGFIKRQLVETRQITKHVAQILDSRMNTKYDENDKLIREVKVITLKSKLVSDFRKDFQFYKVREINNYHHAHDAYLNAVVGTALIKKYPKLESEFVYGDYKVYDVRKMIAKSEQEIGKATAKYFFYSNIMNFFKTEITLANGEIRKRPLIETNGETGEIVWDKGRDFATVRKVLSMPQVNIVKKTEVQTGGFSKESILPKRNSDKLIARKKDWDPKKYGGFDSPTVAYSVLVVAKVEKGKSKKLKSVKELLGITIMERSSFEKNPIDFLEAKGYKEVKKDLIIKLPKYSLFELENGRKRMLASAGELQKGNELALPSKYVNFLYLASHYEKLKGSPEDNEQKQLFVEQHKHYLDEIIEQISEFSKRVILADANLDKVLSAYNKHRDKPIREQAENIIHLFTLTNLGAPAAFKYFDTTIDRKRYTSTKEVLDATLIHQSITGLYETRIDLSQLGGDGGEAAAKGGSPAPGGTAPLEEEYRLFLEAPIQNVTLLEQWKREIPKVWAEINPPGLASTQAPIHVQLLSTALPVRVRQYPITLEAKRSLRETIRKFRAAGILRPVHSPWNTPLLPVRKSGTSEYRMVQDLREVNKRVETIHPTVPNPYTLLSLLPPDRIWYSVLDLKDAFFCIPLAPESQLIFAFEWADAEEGESGQLTWTRLPQGFKNSPTLFNEALNRDLQGFRLDHPSVSLLQYVDDLLIAADTQAACLSATRDLLMTLAELGYRVSGKKAQLCQEEVTYLGFKIHKGSRSLSNSRTQAILQIPVPKTKRQVREFLGKIGYCRLFIPGFAELAQPLYAATRPGNDPLVWGEKEEEAFQSLKLALTQPPALALPSLDKPFQLFVEETSGAAKGVLTQALGPWKRPVAYLSKRLDPVAAGWPRCLRAIAAAALLTREASKLTFGQDIEITSSHNLESLLRSPPDKWLTNARITQYQVLLLDPPRVRFKQTAALNPATLLPETDDTLPIHHCLDTLDSLTSTRPDLTDQPLAQAEATLFTDGSSYIRDGKRYAGAAVVTLDSVIWAEPLPIGTSAQKAELIALTKALEWSKDKSVNIYTDSRYAFATLHVHGMIYRERGWLTAGGKAIKNAPEILALLTAVWLPKRVAVMHCKGHQKDDAPTSTGNRRADEVAREVAIRPLSTQATISAGKRTADGSEFEKRTADGSEFESPKKKAKVE

SEQ ID NO: 1432 - protein, 2096 aa, synthetic construct
MPAAKRVKLDGGDKKYSIGLDIGTNSVGWAVITDEYKVPSKKFKVLGNTDRHSIKKNLIGALLFDSGETAEATRLKRTARRRYTRRKNRICYLQEIFSNEMAKVDDSFFHRLEESFLVEEDKKHERHPIFGNIVDEVAYHEKYPTIYHLRKKLVDSTDKADLRLIYLALAHMIKFRGHFLIEGDLNPDNSDVDKLFIQLVQTYNQLFEENPINASGVDAKAILSARLSKSRRLENLIAQLPGEKKNGLFGNLIALSLGLTPNFKSNFDLAEDAKLQLSKDTYDDDLDNLLAQIGDQYADLFLAAKNLSDAILLSDILRVNTEITKAPLSASMIKRYDEHHQDLTLLKALVRQQLPEKYKEIFFDQSKNGYAGYIDGGASQEEFYKFIKPILEKMDGTEELLVKLNREDLLRKQRTFDNGSIPHQIHLGELHAILRRQEDFYPFLKDNREKIEKILTFRIPYYVGPLARGNSRFAWMTRKSEETITPWNFEEVVDKGASAQSFIERMTNFDKNLPNEKVLPKHSLLYEYFTVYNELTKVKYVTEGMRKPAFLSGEQKKAIVDLLFKTNRKVTVKQLKEDYFKKIECFDSVEISGVEDRFNASLGTYHDLLKIIKDKDFLDNEENEDILEDIVLTLTLFEDREMIEERLKTYAHLFDDKVMKQLKRRRYTGWGRLSRKLINGIRDKQSGKTILDFLKSDGFANRNFMQLIHDDSLTFKEDIQKAQVSGQGDSLHEHIANLAGSPAIKKGILQTVKVVDELVKVMGRHKPENIVIEMARENQTTQKGQKNSRERMKRIEEGIKELGSQILKEHPVENTQLQNEKLYLYYLQNGRDMYVDQELDINRLSDYDVDHIVPQSFLKDDSIDNKVLTRSDKARGKSDNVPSEEVVKKMKNYWRQLLNAKLITQRKFDNLTKAERGGLSELDKAGFIKRQLVETRQITKHVAQILDSRMNTKYDENDKLIREVKVITLKSKLVSDFRKDFQFYKVREINNYHHAHDAYLNAVVGTALIKKYPKLESEFVYGDYKVYDVRKMIAKSEQEIGKATAKYFFYSNIMNFFKTEITLANGEIRKRPLIETNGETGEIVWDKGRDFATVRKVLSMPQVNIVKKTEVQTGGFSKESILPKRNSDKLIARKKDWDPKKYGGFDSPTVAYSVLVVAKVEKGKSKKLKSVKELLGITIMERSSFEKNPIDFLEAKGYKEVKKDLIIKLPKYSLFELENGRKRMLASAGELQKGNELALPSKYVNFLYLASHYEKLKGSPEDNEQKQLFVEQHKHYLDEIIEQISEFSKRVILADANLDKVLSAYNKHRDKPIREQAENIIHLFTLTNLGAPAAFKYFDTTIDRKRYTSTKEVLDATLIHQSITGLYETRIDLSQLGGDGGGGGGGSPAPGGTAPLEEEYRLFLEAPIQNVTLLEQWKREIPKVWAEINPPGLASTQAPIHVQLLSTALPVRVRQYPITLEAKRSLRETIRKFRAAGILRPVHSPWNTPLLPVRKSGTSEYRMVQDLREVNKRVETIHPTVPNPYTLLSLLPPDRIWYSVLDLKDAFFCIPLAPESQLIFAFEWADAEEGESGQLTWTRLPQGFKNSPTLFNEALNRDLQGFRLDHPSVSLLQYVDDLLIAADTQAACLSATRDLLMTLAELGYRVSGKKAQLCQEEVTYLGFKIHKGSRSLSNSRTQAILQIPVPKTKRQVREFLGKIGYCRLFIPGFAELAQPLYAATRPGNDPLVWGEKEEEAFQSLKLALTQPPALALPSLDKPFQLFVEETSGAAKGVLTQALGPWKRPVAYLSKRLDPVAAGWPRCLRAIAAAALLTREASKLTFGQDIEITSSHNLESLLRSPPDKWLTNARITQYQVLLLDPPRVRFKQTAALNPATLLPETDDTLPIHHCLDTLDSLTSTRPDLTDQPLAQAEATLFTDGSSYIRDGKRYAGAAVVTLDSVIWAEPLPIGTSAQKAELIALTKALEWSKDKSVNIYTDSRYAFATLHVHGMIYRERGWLTAGGKAIKNAPEILALLTAVWLPKRVAVMHCKGHQKDDAPTSTGNRRADEVAREVAIRPLSTQATISAGKRTADGSEFEKRTADGSEFESPKKKAKVE

SEQ ID NO: 1433 - protein, 2098 aa, synthetic construct
MPAAKRVKLDGGDKKYSIGLDIGTNSVGWAVITDEYKVPSKKFKVLGNTDRHSIKKNLIGALLFDSGETAEATRLKRTARRRYTRRKNRICYLQEIFSNEMAKVDDSFFHRLEESFLVEEDKKHERHPIFGNIVDEVAYHEKYPTIYHLRKKLVDSTDKADLRLIYLALAHMIKFRGHFLIEGDLNPDNSDVDKLFIQLVQTYNQLFEENPINASGVDAKAILSARLSKSRRLENLIAQLPGEKKNGLFGNLIALSLGLTPNFKSNFDLAEDAKLQLSKDTYDDDLDNLLAQIGDQYADLFLAAKNLSDAILLSDILRVNTEITKAPLSASMIKRYDEHHQDLTLLKALVRQQLPEKYKEIFFDQSKNGYAGYIDGGASQEEFYKFIKPILEKMDGTEELLVKLNREDLLRKQRTFDNGSIPHQIHLGELHAILRRQEDFYPFLKDNREKIEKILTFRIPYYVGPLARGNSRFAWMTRKSEETITPWNFEEVVDKGASAQSFIERMTNFDKNLPNEKVLPKHSLLYEYFTVYNELTKVKYVTEGMRKPAFLSGEQKKAIVDLLFKTNRKVTVKQLKEDYFKKIECFDSVEISGVEDRFNASLGTYHDLLKIIKDKDFLDNEENEDILEDIVLTLTLFEDREMIEERLKTYAHLFDDKVMKQLKRRRYTGWGRLSRKLINGIRDKQSGKTILDFLKSDGFANRNFMQLIHDDSLTFKEDIQKAQVSGQGDSLHEHIANLAGSPAIKKGILQTVKVVDELVKVMGRHKPENIVIEMARENQTTQKGQKNSRERMKRIEEGIKELGSQILKEHPVENTQLQNEKLYLYYLQNGRDMYVDQELDINRLSDYDVDHIVPQSFLKDDSIDNKVLTRSDKARGKSDNVPSEEVVKKMKNYWRQLLNAKLITQRKFDNLTKAERGGLSELDKAGFIKRQLVETRQITKHVAQILDSRMNTKYDENDKLIREVKVITLKSKLVSDFRKDFQFYKVREINNYHHAHDAYLNAVVGTALIKKYPKLESEFVYGDYKVYDVRKMIAKSEQEIGKATAKYFFYSNIMNFFKTEITLANGEIRKRPLIETNGETGEIVWDKGRDFATVRKVLSMPQVNIVKKTEVQTGGFSKESILPKRNSDKLIARKKDWDPKKYGGFDSPTVAYSVLVVAKVEKGKSKKLKSVKELLGITIMERSSFEKNPIDFLEAKGYKEVKKDLIIKLPKYSLFELENGRKRMLASAGELQKGNELALPSKYVNFLYLASHYEKLKGSPEDNEQKQLFVEQHKHYLDEIIEQISEFSKRVILADANLDKVLSAYNKHRDKPIREQAENIIHLFTLTNLGAPAAFKYFDTTIDRKRYTSTKEVLDATLIHQSITGLYETRIDLSQLGGDGGGGSEAAAKPAPGGTAPLEEEYRLFLEAPIQNVTLLEQWKREIPKVWAEINPPGLASTQAPIHVQLLSTALPVRVRQYPITLEAKRSLRETIRKFRAAGILRPVHSPWNTPLLPVRKSGTSEYRMVQDLREVNKRVETIHPTVPNPYTLLSLLPPDRIWYSVLDLKDAFFCIPLAPESQLIFAFEWADAEEGESGQLTWTRLPQGFKNSPTLFNEALNRDLQGFRLDHPSVSLLQYVDDLLIAADTQAACLSATRDLLMTLAELGYRVSGKKAQLCQEEVTYLGFKIHKGSRSLSNSRTQAILQIPVPKTKRQVREFLGKIGYCRLFIPGFAELAQPLYAATRPGNDPLVWGEKEEEAFQSLKLALTQPPALALPSLDKPFQLFVEETSGAAKGVLTQALGPWKRPVAYLSKRLDPVAAGWPRCLRAIAAAALLTREASKLTFGQDIEITSSHNLESLLRSPPDKWLTNARITQYQVLLLDPPRVRFKQTAALNPATLLPETDDTLPIHHCLDTLDSLTSTRPDLTDQPLAQAEATLFTDGSSYIRDGKRYAGAAVVTLDSVIWAEPLPIGTSAQKAELIALTKALEWSKDKSVNIYTDSRYAFATLHVHGMIYRERGWLTAGGKAIKNAPEILALLTAVWLPKRVAVMHCKGHQKDDAPTSTGNRRADEVAREVAIRPLSTQATISAGKRTADGSEFEKRTADGSEFESPKKKAKVE

SEQ ID NO: 1434 - protein, 2093 aa, synthetic construct
MPAAKRVKLDGGDKKYSIGLDIGTNSVGWAVITDEYKVPSKKFKVLGNTDRHSIKKNLIGALLFDSGETAEATRLKRTARRRYTRRKNRICYLQEIFSNEMAKVDDSFFHRLEESFLVEEDKKHERHPIFGNIVDEVAYHEKYPTIYHLRKKLVDSTDKADLRLIYLALAHMIKFRGHFLIEGDLNPDNSDVDKLFIQLVQTYNQLFEENPINASGVDAKAILSARLSKSRRLENLIAQLPGEKKNGLFGNLIALSLGLTPNFKSNFDLAEDAKLQLSKDTYDDDLDNLLAQIGDQYADLFLAAKNLSDAILLSDILRVNTEITKAPLSASMIKRYDEHHQDLTLLKALVRQQLPEKYKEIFFDQSKNGYAGYIDGGASQEEFYKFIKPILEKMDGTEELLVKLNREDLLRKQRTFDNGSIPHQIHLGELHAILRRQEDFYPFLKDNREKIEKILTFRIPYYVGPLARGNSRFAWMTRKSEETITPWNFEEVVDKGASAQSFIERMTNFDKNLPNEKVLPKHSLLYEYFTVYNELTKVKYVTEGMRKPAFLSGEQKKAIVDLLFKTNRKVTVKQLKEDYFKKIECFDSVEISGVEDRFNASLGTYHDLLKIIKDKDFLDNEENEDILEDIVLTLTLFEDREMIEERLKTYAHLFDDKVMKQLKRRRYTGWGRLSRKLINGIRDKQSGKTILDFLKSDGFANRNFMQLIHDDSLTFKEDIQKAQVSGQGDSLHEHIANLAGSPAIKKGILQTVKVVDELVKVMGRHKPENIVIEMARENQTTQKGQKNSRERMKRIEEGIKELGSQILKEHPVENTQLQNEKLYLYYLQNGRDMYVDQELDINRLSDYDVDHIVPQSFLKDDSIDNKVLTRSDKARGKSDNVPSEEVVKKMKNYWRQLLNAKLITQRKFDNLTKAERGGLSELDKAGFIKRQLVETRQITKHVAQILDSRMNTKYDENDKLIREVKVITLKSKLVSDFRKDFQFYKVREINNYHHAHDAYLNAVVGTALIKKYPKLESEFVYGDYKVYDVRKMIAKSEQEIGKATAKYFFYSNIMNFFKTEITLANGEIRKRPLIETNGETGEIVWDKGRDFATVRKVLSMPQVNIVKKTEVQTGGFSKESILPKRNSDKLIARKKDWDPKKYGGFDSPTVAYSVLVVAKVEKGKSKKLKSVKELLGITIMERSSFEKNPIDFLEAKGYKEVKKDLIIKLPKYSLFELENGRKRMLASAGELQKGNELALPSKYVNFLYLASHYEKLKGSPEDNEQKQLFVEQHKHYLDEIIEQISEFSKRVILADANLDKVLSAYNKHRDKPIREQAENIIHLFTLTNLGAPAAFKYFDTTIDRKRYTSTKEVLDATLIHQSITGLYETRIDLSQLGGDGGGGSGGSGGTAPLEEEYRLFLEAPIQNVTLLEQWKREIPKVWAEINPPGLASTQAPIHVQLLSTALPVRVRQYPITLEAKRSLRETIRKFRAAGILRPVHSPWNTPLLPVRKSGTSEYRMVQDLREVNKRVETIHPTVPNPYTLLSLLPPDRIWYSVLDLKDAFFCIPLAPESQLIFAFEWADAEEGESGQLTWTRLPQGFKNSPTLFNEALNRDLQGFRLDHPSVSLLQYVDDLLIAADTQAACLSATRDLLMTLAELGYRVSGKKAQLCQEEVTYLGFKIHKGSRSLSNSRTQAILQIPVPKTKRQVREFLGKIGYCRLFIPGFAELAQPLYAATRPGNDPLVWGEKEEEAFQSLKLALTQPPALALPSLDKPFQLFVEETSGAAKGVLTQALGPWKRPVAYLSKRLDPVAAGWPRCLRAIAAAALLTREASKLTFGQDIEITSSHNLESLLRSPPDKWLTNARITQYQVLLLDPPRVRFKQTAALNPATLLPETDDTLPIHHCLDTLDSLTSTRPDLTDQPLAQAEATLFTDGSSYIRDGKRYAGAAVVTLDSVIWAEPLPIGTSAQKAELIALTKALEWSKDKSVNIYTDSRYAFATLHVHGMIYRERGWLTAGGKAIKNAPEILALLTAVWLPKRVAVMHCKGHQKDDAPTSTGNRRADEVAREVAIRPLSTQATISAGKRTADGSEFEKRTADGSEFESPKKKAKVE

SEQ ID NO: 1435 - protein, 2091 aa, synthetic construct
MPAAKRVKLDGGDKKYSIGLDIGTNSVGWAVITDEYKVPSKKFKVLGNTDRHSIKKNLIGALLFDSGETAEATRLKRTARRRYTRRKNRICYLQEIFSNEMAKVDDSFFHRLEESFLVEEDKKHERHPIFGNIVDEVAYHEKYPTIYHLRKKLVDSTDKADLRLIYLALAHMIKFRGHFLIEGDLNPDNSDVDKLFIQLVQTYNQLFEENPINASGVDAKAILSARLSKSRRLENLIAQLPGEKKNGLFGNLIALSLGLTPNFKSNFDLAEDAKLQLSKDTYDDDLDNLLAQIGDQYADLFLAAKNLSDAILLSDILRVNTEITKAPLSASMIKRYDEHHQDLTLLKALVRQQLPEKYKEIFFDQSKNGYAGYIDGGASQEEFYKFIKPILEKMDGTEELLVKLNREDLLRKQRTFDNGSIPHQIHLGELHAILRRQEDFYPFLKDNREKIEKILTFRIPYYVGPLARGNSRFAWMTRKSEETITPWNFEEVVDKGASAQSFIERMTNFDKNLPNEKVLPKHSLLYEYFTVYNELTKVKYVTEGMRKPAFLSGEQKKAIVDLLFKTNRKVTVKQLKEDYFKKIECFDSVEISGVEDRFNASLGTYHDLLKIIKDKDFLDNEENEDILEDIVLTLTLFEDREMIEERLKTYAHLFDDKVMKQLKRRRYTGWGRLSRKLINGIRDKQSGKTILDFLKSDGFANRNFMQLIHDDSLTFKEDIQKAQVSGQGDSLHEHIANLAGSPAIKKGILQTVKVVDELVKVMGRHKPENIVIEMARENQTTQKGQKNSRERMKRIEEGIKELGSQILKEHPVENTQLQNEKLYLYYLQNGRDMYVDQELDINRLSDYDVDHIVPQSFLKDDSIDNKVLTRSDKARGKSDNVPSEEVVKKMKNYWRQLLNAKLITQRKFDNLTKAERGGLSELDKAGFIKRQLVETRQITKHVAQILDSRMNTKYDENDKLIREVKVITLKSKLVSDFRKDFQFYKVREINNYHHAHDAYLNAVVGTALIKKYPKLESEFVYGDYKVYDVRKMIAKSEQEIGKATAKYFFYSNIMNFFKTEITLANGEIRKRPLIETNGETGEIVWDKGRDFATVRKVLSMPQVNIVKKTEVQTGGFSKESILPKRNSDKLIARKKDWDPKKYGGFDSPTVAYSVLVVAKVEKGKSKKLKSVKELLGITIMERSSFEKNPIDFLEAKGYKEVKKDLIIKLPKYSLFELENGRKRMLASAGELQKGNELALPSKYVNFLYLASHYEKLKGSPEDNEQKQLFVEQHKHYLDEIIEQISEFSKRVILADANLDKVLSAYNKHRDKPIREQAENIIHLFTLTNLGAPAAFKYFDTTIDRKRYTSTKEVLDATLIHQSITGLYETRIDLSQLGGDGGGGGGGGTAPLEEEYRLFLEAPIQNVTLLEQWKREIPKVWAEINPPGLASTQAPIHVQLLSTALPVRVRQYPITLEAKRSLRETIRKFRAAGILRPVHSPWNTPLLPVRKSGTSEYRMVQDLREVNKRVETIHPTVPNPYTLLSLLPPDRIWYSVLDLKDAFFCIPLAPESQLIFAFEWADAEEGESGQLTWTRLPQGFKNSPTLFNEALNRDLQGFRLDHPSVSLLQYVDDLLIAADTQAACLSATRDLLMTLAELGYRVSGKKAQLCQEEVTYLGFKIHKGSRSLSNSRTQAILQIPVPKTKRQVREFLGKIGYCRLFIPGFAELAQPLYAATRPGNDPLVWGEKEEEAFQSLKLALTQPPALALPSLDKPFQLFVEETSGAAKGVLTQALGPWKRPVAYLSKRLDPVAAGWPRCLRAIAAAALLTREASKLTFGQDIEITSSHNLESLLRSPPDKWLTNARITQYQVLLLDPPRVRFKQTAALNPATLLPETDDTLPIHHCLDTLDSLTSTRPDLTDQPLAQAEATLFTDGSSYIRDGKRYAGAAVVTLDSVIWAEPLPIGTSAQKAELIALTKALEWSKDKSVNIYTDSRYAFATLHVHGMIYRERGWLTAGGKAIKNAPEILALLTAVWLPKRVAVMHCKGHQKDDAPTSTGNRRADEVAREVAIRPLSTQATISAGKRTADGSEFEKRTADGSEFESPKKKAKVE

SEQ ID NO: 1436 - protein, 2096 aa, synthetic construct
MPAAKRVKLDGGDKKYSIGLDIGTNSVGWAVITDEYKVPSKKFKVLGNTDRHSIKKNLIGALLFDSGETAEATRLKRTARRRYTRRKNRICYLQEIFSNEMAKVDDSFFHRLEESFLVEEDKKHERHPIFGNIVDEVAYHEKYPTIYHLRKKLVDSTDKADLRLIYLALAHMIKFRGHFLIEGDLNPDNSDVDKLFIQLVQTYNQLFEENPINASGVDAKAILSARLSKSRRLENLIAQLPGEKKNGLFGNLIALSLGLTPNFKSNFDLAEDAKLQLSKDTYDDDLDNLLAQIGDQYADLFLAAKNLSDAILLSDILRVNTEITKAPLSASMIKRYDEHHQDLTLLKALVRQQLPEKYKEIFFDQSKNGYAGYIDGGASQEEFYKFIKPILEKMDGTEELLVKLNREDLLRKQRTFDNGSIPHQIHLGELHAILRRQEDFYPFLKDNREKIEKILTFRIPYYVGPLARGNSRFAWMTRKSEETITPWNFEEVVDKGASAQSFIERMTNFDKNLPNEKVLPKHSLLYEYFTVYNELTKVKYVTEGMRKPAFLSGEQKKAIVDLLFKTNRKVTVKQLKEDYFKKIECFDSVEISGVEDRFNASLGTYHDLLKIIKDKDFLDNEENEDILEDIVLTLTLFEDREMIEERLKTYAHLFDDKVMKQLKRRRYTGWGRLSRKLINGIRDKQSGKTILDFLKSDGFANRNFMQLIHDDSLTFKEDIQKAQVSGQGDSLHEHIANLAGSPAIKKGILQTVKVVDELVKVMGRHKPENIVIEMARENQTTQKGQKNSRERMKRIEEGIKELGSQILKEHPVENTQLQNEKLYLYYLQNGRDMYVDQELDINRLSDYDVDHIVPQSFLKDDSIDNKVLTRSDKARGKSDNVPSEEVVKKMKNYWRQLLNAKLITQRKFDNLTKAERGGLSELDKAGFIKRQLVETRQITKHVAQILDSRMNTKYDENDKLIREVKVITLKSKLVSDFRKDFQFYKVREINNYHHAHDAYLNAVVGTALIKKYPKLESEFVYGDYKVYDVRKMIAKSEQEIGKATAKYFFYSNIMNFFKTEITLANGEIRKRPLIETNGETGEIVWDKGRDFATVRKVLSMPQVNIVKKTEVQTGGFSKESILPKRNSDKLIARKKDWDPKKYGGFDSPTVAYSVLVVAKVEKGKSKKLKSVKELLGITIMERSSFEKNPIDFLEAKGYKEVKKDLIIKLPKYSLFELENGRKRMLASAGELQKGNELALPSKYVNFLYLASHYEKLKGSPEDNEQKQLFVEQHKHYLDEIIEQISEFSKRVILADANLDKVLSAYNKHRDKPIREQAENIIHLFTLTNLGAPAAFKYFDTTIDRKRYTSTKEVLDATLIHQSITGLYETRIDLSQLGGDGGPAPGGGGGSGGTAPLEEEYRLFLEAPIQNVTLLEQWKREIPKVWAEINPPGLASTQAPIHVQLLSTALPVRVRQYPITLEAKRSLRETIRKFRAAGILRPVHSPWNTPLLPVRKSGTSEYRMVQDLREVNKRVETIHPTVPNPYTLLSLLPPDRIWYSVLDLKDAFFCIPLAPESQLIFAFEWADAEEGESGQLTWTRLPQGFKNSPTLFNEALNRDLQGFRLDHPSVSLLQYVDDLLIAADTQAACLSATRDLLMTLAELGYRVSGKKAQLCQEEVTYLGFKIHKGSRSLSNSRTQAILQIPVPKTKRQVREFLGKIGYCRLFIPGFAELAQPLYAATRPGNDPLVWGEKEEEAFQSLKLALTQPPALALPSLDKPFQLFVEETSGAAKGVLTQALGPWKRPVAYLSKRLDPVAAGWPRCLRAIAAAALLTREASKLTFGQDIEITSSHNLESLLRSPPDKWLTNARITQYQVLLLDPPRVRFKQTAALNPATLLPETDDTLPIHHCLDTLDSLTSTRPDLTDQPLAQAEATLFTDGSSYIRDGKRYAGAAVVTLDSVIWAEPLPIGTSAQKAELIALTKALEWSKDKSVNIYTDSRYAFATLHVHGMIYRERGWLTAGGKAIKNAPEILALLTAVWLPKRVAVMHCKGHQKDDAPTSTGNRRADEVAREVAIRPLSTQATISAGKRTADGSEFEKRTADGSEFESPKKKAKVE

SEQ ID NO: 1437 - protein, 2096 aa, synthetic construct
MPAAKRVKLDGGDKKYSIGLDIGTNSVGWAVITDEYKVPSKKFKVLGNTDRHSIKKNLIGALLFDSGETAEATRLKRTARRRYTRRKNRICYLQEIFSNEMAKVDDSFFHRLEESFLVEEDKKHERHPIFGNIVDEVAYHEKYPTIYHLRKKLVDSTDKADLRLIYLALAHMIKFRGHFLIEGDLNPDNSDVDKLFIQLVQTYNQLFEENPINASGVDAKAILSARLSKSRRLENLIAQLPGEKKNGLFGNLIALSLGLTPNFKSNFDLAEDAKLQLSKDTYDDDLDNLLAQIGDQYADLFLAAKNLSDAILLSDILRVNTEITKAPLSASMIKRYDEHHQDLTLLKALVRQQLPEKYKEIFFDQSKNGYAGYIDGGASQEEFYKFIKPILEKMDGTEELLVKLNREDLLRKQRTFDNGSIPHQIHLGELHAILRRQEDFYPFLKDNREKIEKILTFRIPYYVGPLARGNSRFAWMTRKSEETITPWNFEEVVDKGASAQSFIERMTNFDKNLPNEKVLPKHSLLYEYFTVYNELTKVKYVTEGMRKPAFLSGEQKKAIVDLLFKTNRKVTVKQLKEDYFKKIECFDSVEISGVEDRFNASLGTYHDLLKIIKDKDFLDNEENEDILEDIVLTLTLFEDREMIEERLKTYAHLFDDKVMKQLKRRRYTGWGRLSRKLINGIRDKQSGKTILDFLKSDGFANRNFMQLIHDDSLTFKEDIQKAQVSGQGDSLHEHIANLAGSPAIKKGILQTVKVVDELVKVMGRHKPENIVIEMARENQTTQKGQKNSRERMKRIEEGIKELGSQILKEHPVENTQLQNEKLYLYYLQNGRDMYVDQELDINRLSDYDVDHIVPQSFLKDDSIDNKVLTRSDKARGKSDNVPSEEVVKKMKNYWRQLLNAKLITQRKFDNLTKAERGGLSELDKAGFIKRQLVETRQITKHVAQILDSRMNTKYDENDKLIREVKVITLKSKLVSDFRKDFQFYKVREINNYHHAHDAYLNAVVGTALIKKYPKLESEFVYGDYKVYDVRKMIAKSEQEIGKATAKYFFYSNIMNFFKTEITLANGEIRKRPLIETNGETGEIVWDKGRDFATVRKVLSMPQVNIVKKTEVQTGGFSKESILPKRNSDKLIARKKDWDPKKYGGFDSPTVAYSVLVVAKVEKGKSKKLKSVKELLGITIMERSSFEKNPIDFLEAKGYKEVKKDLIIKLPKYSLFELENGRKRMLASAGELQKGNELALPSKYVNFLYLASHYEKLKGSPEDNEQKQLFVEQHKHYLDEIIEQISEFSKRVILADANLDKVLSAYNKHRDKPIREQAENIIHLFTLTNLGAPAAFKYFDTTIDRKRYTSTKEVLDATLIHQSITGLYETRIDLSQLGGDGGGSSGGSGGGGGTAPLEEEYRLFLEAPIQNVTLLEQWKREIPKVWAEINPPGLASTQAPIHVQLLSTALPVRVRQYPITLEAKRSLRETIRKFRAAGILRPVHSPWNTPLLPVRKSGTSEYRMVQDLREVNKRVETIHPTVPNPYTLLSLLPPDRIWYSVLDLKDAFFCIPLAPESQLIFAFEWADAEEGESGQLTWTRLPQGFKNSPTLFNEALNRDLQGFRLDHPSVSLLQYVDDLLIAADTQAACLSATRDLLMTLAELGYRVSGKKAQLCQEEVTYLGFKIHKGSRSLSNSRTQAILQIPVPKTKRQVREFLGKIGYCRLFIPGFAELAQPLYAATRPGNDPLVWGEKEEEAFQSLKLALTQPPALALPSLDKPFQLFVEETSGAAKGVLTQALGPWKRPVAYLSKRLDPVAAGWPRCLRAIAAAALLTREASKLTFGQDIEITSSHNLESLLRSPPDKWLTNARITQYQVLLLDPPRVRFKQTAALNPATLLPETDDTLPIHHCLDTLDSLTSTRPDLTDQPLAQAEATLFTDGSSYIRDGKRYAGAAVVTLDSVIWAEPLPIGTSAQKAELIALTKALEWSKDKSVNIYTDSRYAFATLHVHGMIYRERGWLTAGGKAIKNAPEILALLTAVWLPKRVAVMHCKGHQKDDAPTSTGNRRADEVAREVAIRPLSTQATISAGKRTADGSEFEKRTADGSEFESPKKKAKVE

SEQ ID NO: 1438 - protein, 2092 aa, synthetic construct
MPAAKRVKLDGGDKKYSIGLDIGTNSVGWAVITDEYKVPSKKFKVLGNTDRHSIKKNLIGALLFDSGETAEATRLKRTARRRYTRRKNRICYLQEIFSNEMAKVDDSFFHRLEESFLVEEDKKHERHPIFGNIVDEVAYHEKYPTIYHLRKKLVDSTDKADLRLIYLALAHMIKFRGHFLIEGDLNPDNSDVDKLFIQLVQTYNQLFEENPINASGVDAKAILSARLSKSRRLENLIAQLPGEKKNGLFGNLIALSLGLTPNFKSNFDLAEDAKLQLSKDTYDDDLDNLLAQIGDQYADLFLAAKNLSDAILLSDILRVNTEITKAPLSASMIKRYDEHHQDLTLLKALVRQQLPEKYKEIFFDQSKNGYAGYIDGGASQEEFYKFIKPILEKMDGTEELLVKLNREDLLRKQRTFDNGSIPHQIHLGELHAILRRQEDFYPFLKDNREKIEKILTFRIPYYVGPLARGNSRFAWMTRKSEETITPWNFEEVVDKGASAQSFIERMTNFDKNLPNEKVLPKHSLLYEYFTVYNELTKVKYVTEGMRKPAFLSGEQKKAIVDLLFKTNRKVTVKQLKEDYFKKIECFDSVEISGVEDRFNASLGTYHDLLKIIKDKDFLDNEENEDILEDIVLTLTLFEDREMIEERLKTYAHLFDDKVMKQLKRRRYTGWGRLSRKLINGIRDKQSGKTILDFLKSDGFANRNFMQLIHDDSLTFKEDIQKAQVSGQGDSLHEHIANLAGSPAIKKGILQTVKVVDELVKVMGRHKPENIVIEMARENQTTQKGQKNSRERMKRIEEGIKELGSQILKEHPVENTQLQNEKLYLYYLQNGRDMYVDQELDINRLSDYDVDHIVPQSFLKDDSIDNKVLTRSDKARGKSDNVPSEEVVKKMKNYWRQLLNAKLITQRKFDNLTKAERGGLSELDKAGFIKRQLVETRQITKHVAQILDSRMNTKYDENDKLIREVKVITLKSKLVSDFRKDFQFYKVREINNYHHAHDAYLNAVVGTALIKKYPKLESEFVYGDYKVYDVRKMIAKSEQEIGKATAKYFFYSNIMNFFKTEITLANGEIRKRPLIETNGETGEIVWDKGRDFATVRKVLSMPQVNIVKKTEVQTGGFSKESILPKRNSDKLIARKKDWDPKKYGGFDSPTVAYSVLVVAKVEKGKSKKLKSVKELLGITIMERSSFEKNPIDFLEAKGYKEVKKDLIIKLPKYSLFELENGRKRMLASAGELQKGNELALPSKYVNFLYLASHYEKLKGSPEDNEQKQLFVEQHKHYLDEIIEQISEFSKRVILADANLDKVLSAYNKHRDKPIREQAENIIHLFTLTNLGAPAAFKYFDTTIDRKRYTSTKEVLDATLIHQSITGLYETRIDLSQLGGDGGGGGGGGGTAPLEEEYRLFLEAPIQNVTLLEQWKREIPKVWAEINPPGLASTQAPIHVQLLSTALPVRVRQYPITLEAKRSLRETIRKFRAAGILRPVHSPWNTPLLPVRKSGTSEYRMVQDLREVNKRVETIHPTVPNPYTLLSLLPPDRIWYSVLDLKDAFFCIPLAPESQLIFAFEWADAEEGESGQLTWTRLPQGFKNSPTLFNEALNRDLQGFRLDHPSVSLLQYVDDLLIAADTQAACLSATRDLLMTLAELGYRVSGKKAQLCQEEVTYLGFKIHKGSRSLSNSRTQAILQIPVPKTKRQVREFLGKIGYCRLFIPGFAELAQPLYAATRPGNDPLVWGEKEEEAFQSLKLALTQPPALALPSLDKPFQLFVEETSGAAKGVLTQALGPWKRPVAYLSKRLDPVAAGWPRCLRAIAAAALLTREASKLTFGQDIEITSSHNLESLLRSPPDKWLTNARITQYQVLLLDPPRVRFKQTAALNPATLLPETDDTLPIHHCLDTLDSLTSTRPDLTDQPLAQAEATLFTDGSSYIRDGKRYAGAAVVTLDSVIWAEPLPIGTSAQKAELIALTKALEWSKDKSVNIYTDSRYAFATLHVHGMIYRERGWLTAGGKAIKNAPEILALLTAVWLPKRVAVMHCKGHQKDDAPTSTGNRRADEVAREVAIRPLSTQATISAGKRTADGSEFEKRTADGSEFESPKKKAKVE

SEQ ID NO: 1439 - protein, 2098 aa, synthetic construct
MPAAKRVKLDGGDKKYSIGLDIGTNSVGWAVITDEYKVPSKKFKVLGNTDRHSIKKNLIGALLFDSGETAEATRLKRTARRRYTRRKNRICYLQEIFSNEMAKVDDSFFHRLEESFLVEEDKKHERHPIFGNIVDEVAYHEKYPTIYHLRKKLVDSTDKADLRLIYLALAHMIKFRGHFLIEGDLNPDNSDVDKLFIQLVQTYNQLFEENPINASGVDAKAILSARLSKSRRLENLIAQLPGEKKNGLFGNLIALSLGLTPNFKSNFDLAEDAKLQLSKDTYDDDLDNLLAQIGDQYADLFLAAKNLSDAILLSDILRVNTEITKAPLSASMIKRYDEHHQDLTLLKALVRQQLPEKYKEIFFDQSKNGYAGYIDGGASQEEFYKFIKPILEKMDGTEELLVKLNREDLLRKQRTFDNGSIPHQIHLGELHAILRRQEDFYPFLKDNREKIEKILTFRIPYYVGPLARGNSRFAWMTRKSEETITPWNFEEVVDKGASAQSFIERMTNFDKNLPNEKVLPKHSLLYEYFTVYNELTKVKYVTEGMRKPAFLSGEQKKAIVDLLFKTNRKVTVKQLKEDYFKKIECFDSVEISGVEDRFNASLGTYHDLLKIIKDKDFLDNEENEDILEDIVLTLTLFEDREMIEERLKTYAHLFDDKVMKQLKRRRYTGWGRLSRKLINGIRDKQSGKTILDFLKSDGFANRNFMQLIHDDSLTFKEDIQKAQVSGQGDSLHEHIANLAGSPAIKKGILQTVKVVDELVKVMGRHKPENIVIEMARENQTTQKGQKNSRERMKRIEEGIKELGSQILKEHPVENTQLQNEKLYLYYLQNGRDMYVDQELDINRLSDYDVDHIVPQSFLKDDSIDNKVLTRSDKARGKSDNVPSEEVVKKMKNYWRQLLNAKLITQRKFDNLTKAERGGLSELDKAGFIKRQLVETRQITKHVAQILDSRMNTKYDENDKLIREVKVITLKSKLVSDFRKDFQFYKVREINNYHHAHDAYLNAVVGTALIKKYPKLESEFVYGDYKVYDVRKMIAKSEQEIGKATAKYFFYSNIMNFFKTEITLANGEIRKRPLIETNGETGEIVWDKGRDFATVRKVLSMPQVNIVKKTEVQTGGFSKESILPKRNSDKLIARKKDWDPKKYGGFDSPTVAYSVLVVAKVEKGKSKKLKSVKELLGITIMERSSFEKNPIDFLEAKGYKEVKKDLIIKLPKYSLFELENGRKRMLASAGELQKGNELALPSKYVNFLYLASHYEKLKGSPEDNEQKQLFVEQHKHYLDEIIEQISEFSKRVILADANLDKVLSAYNKHRDKPIREQAENIIHLFTLTNLGAPAAFKYFDTTIDRKRYTSTKEVLDATLIHQSITGLYETRIDLSQLGGDGGEAAAKPAPGGSGGTAPLEEEYRLFLEAPIQNVTLLEQWKREIPKVWAEINPPGLASTQAPIHVQLLSTALPVRVRQYPITLEAKRSLRETIRKFRAAGILRPVHSPWNTPLLPVRKSGTSEYRMVQDLREVNKRVETIHPTVPNPYTLLSLLPPDRIWYSVLDLKDAFFCIPLAPESQLIFAFEWADAEEGESGQLTWTRLPQGFKNSPTLFNEALNRDLQGFRLDHPSVSLLQYVDDLLIAADTQAACLSATRDLLMTLAELGYRVSGKKAQLCQEEVTYLGFKIHKGSRSLSNSRTQAILQIPVPKTKRQVREFLGKIGYCRLFIPGFAELAQPLYAATRPGNDPLVWGEKEEEAFQSLKLALTQPPALALPSLDKPFQLFVEETSGAAKGVLTQALGPWKRPVAYLSKRLDPVAAGWPRCLRAIAAAALLTREASKLTFGQDIEITSSHNLESLLRSPPDKWLTNARITQYQVLLLDPPRVRFKQTAALNPATLLPETDDTLPIHHCLDTLDSLTSTRPDLTDQPLAQAEATLFTDGSSYIRDGKRYAGAAVVTLDSVIWAEPLPIGTSAQKAELIALTKALEWSKDKSVNIYTDSRYAFATLHVHGMIYRERGWLTAGGKAIKNAPEILALLTAVWLPKRVAVMHCKGHQKDDAPTSTGNRRADEVAREVAIRPLSTQATISAGKRTADGSEFEKRTADGSEFESPKKKAKVE

SEQ ID NO: 1440 - protein, 2094 aa, synthetic construct
MPAAKRVKLDGGDKKYSIGLDIGTNSVGWAVITDEYKVPSKKFKVLGNTDRHSIKKNLIGALLFDSGETAEATRLKRTARRRYTRRKNRICYLQEIFSNEMAKVDDSFFHRLEESFLVEEDKKHERHPIFGNIVDEVAYHEKYPTIYHLRKKLVDSTDKADLRLIYLALAHMIKFRGHFLIEGDLNPDNSDVDKLFIQLVQTYNQLFEENPINASGVDAKAILSARLSKSRRLENLIAQLPGEKKNGLFGNLIALSLGLTPNFKSNFDLAEDAKLQLSKDTYDDDLDNLLAQIGDQYADLFLAAKNLSDAILLSDILRVNTEITKAPLSASMIKRYDEHHQDLTLLKALVRQQLPEKYKEIFFDQSKNGYAGYIDGGASQEEFYKFIKPILEKMDGTEELLVKLNREDLLRKQRTFDNGSIPHQIHLGELHAILRRQEDFYPFLKDNREKIEKILTFRIPYYVGPLARGNSRFAWMTRKSEETITPWNFEEVVDKGASAQSFIERMTNFDKNLPNEKVLPKHSLLYEYFTVYNELTKVKYVTEGMRKPAFLSGEQKKAIVDLLFKTNRKVTVKQLKEDYFKKIECFDSVEISGVEDRFNASLGTYHDLLKIIKDKDFLDNEENEDILEDIVLTLTLFEDREMIEERLKTYAHLFDDKVMKQLKRRRYTGWGRLSRKLINGIRDKQSGKTILDFLKSDGFANRNFMQLIHDDSLTFKEDIQKAQVSGQGDSLHEHIANLAGSPAIKKGILQTVKVVDELVKVMGRHKPENIVIEMARENQTTQKGQKNSRERMKRIEEGIKELGSQILKEHPVENTQLQNEKLYLYYLQNGRDMYVDQELDINRLSDYDVDHIVPQSFLKDDSIDNKVLTRSDKARGKSDNVPSEEVVKKMKNYWRQLLNAKLITQRKFDNLTKAERGGLSELDKAGFIKRQLVETRQITKHVAQILDSRMNTKYDENDKLIREVKVITLKSKLVSDFRKDFQFYKVREINNYHHAHDAYLNAVVGTALIKKYPKLESEFVYGDYKVYDVRKMIAKSEQEIGKATAKYFFYSNIMNFFKTEITLANGEIRKRPLIETNGETGEIVWDKGRDFATVRKVLSMPQVNIVKKTEVQTGGFSKESILPKRNSDKLIARKKDWDPKKYGGFDSPTVAYSVLVVAKVEKGKSKKLKSVKELLGITIMERSSFEKNPIDFLEAKGYKEVKKDLIIKLPKYSLFELENGRKRMLASAGELQKGNELALPSKYVNFLYLASHYEKLKGSPEDNEQKQLFVEQHKHYLDEIIEQISEFSKRVILADANLDKVLSAYNKHRDKPIREQAENIIHLFTLTNLGAPAAFKYFDTTIDRKRYTSTKEVLDATLIHQSITGLYETRIDLSQLGGDGGPAPAPAPGGTAPLEEEYRLFLEAPIQNVTLLEQWKREIPKVWAEINPPGLASTQAPIHVQLLSTALPVRVRQYPITLEAKRSLRETIRKFRAAGILRPVHSPWNTPLLPVRKSGTSEYRMVQDLREVNKRVETIHPTVPNPYTLLSLLPPDRIWYSVLDLKDAFFCIPLAPESQLIFAFEWADAEEGESGQLTWTRLPQGFKNSPTLFNEALNRDLQGFRLDHPSVSLLQYVDDLLIAADTQAACLSATRDLLMTLAELGYRVSGKKAQLCQEEVTYLGFKIHKGSRSLSNSRTQAILQIPVPKTKRQVREFLGKIGYCRLFIPGFAELAQPLYAATRPGNDPLVWGEKEEEAFQSLKLALTQPPALALPSLDKPFQLFVEETSGAAKGVLTQALGPWKRPVAYLSKRLDPVAAGWPRCLRAIAAAALLTREASKLTFGQDIEITSSHNLESLLRSPPDKWLTNARITQYQVLLLDPPRVRFKQTAALNPATLLPETDDTLPIHHCLDTLDSLTSTRPDLTDQPLAQAEATLFTDGSSYIRDGKRYAGAAVVTLDSVIWAEPLPIGTSAQKAELIALTKALEWSKDKSVNIYTDSRYAFATLHVHGMIYRERGWLTAGGKAIKNAPEILALLTAVWLPKRVAVMHCKGHQKDDAPTSTGNRRADEVAREVAIRPLSTQATISAGKRTADGSEFEKRTADGSEFESPKKKAKVE

SEQ ID NO: 1441 - protein, 2098 aa, synthetic construct
MPAAKRVKLDGGDKKYSIGLDIGTNSVGWAVITDEYKVPSKKFKVLGNTDRHSIKKNLIGALLFDSGETAEATRLKRTARRRYTRRKNRICYLQEIFSNEMAKVDDSFFHRLEESFLVEEDKKHERHPIFGNIVDEVAYHEKYPTIYHLRKKLVDSTDKADLRLIYLALAHMIKFRGHFLIEGDLNPDNSDVDKLFIQLVQTYNQLFEENPINASGVDAKAILSARLSKSRRLENLIAQLPGEKKNGLFGNLIALSLGLTPNFKSNFDLAEDAKLQLSKDTYDDDLDNLLAQIGDQYADLFLAAKNLSDAILLSDILRVNTEITKAPLSASMIKRYDEHHQDLTLLKALVRQQLPEKYKEIFFDQSKNGYAGYIDGGASQEEFYKFIKPILEKMDGTEELLVKLNREDLLRKQRTFDNGSIPHQIHLGELHAILRRQEDFYPFLKDNREKIEKILTFRIPYYVGPLARGNSRFAWMTRKSEETITPWNFEEVVDKGASAQSFIERMTNFDKNLPNEKVLPKHSLLYEYFTVYNELTKVKYVTEGMRKPAFLSGEQKKAIVDLLFKTNRKVTVKQLKEDYFKKIECFDSVEISGVEDRFNASLGTYHDLLKIIKDKDFLDNEENEDILEDIVLTLTLFEDREMIEERLKTYAHLFDDKVMKQLKRRRYTGWGRLSRKLINGIRDKQSGKTILDFLKSDGFANRNFMQLIHDDSLTFKEDIQKAQVSGQGDSLHEHIANLAGSPAIKKGILQTVKVVDELVKVMGRHKPENIVIEMARENQTTQKGQKNSRERMKRIEEGIKELGSQILKEHPVENTQLQNEKLYLYYLQNGRDMYVDQELDINRLSDYDVDHIVPQSFLKDDSIDNKVLTRSDKARGKSDNVPSEEVVKKMKNYWRQLLNAKLITQRKFDNLTKAERGGLSELDKAGFIKRQLVETRQITKHVAQILDSRMNTKYDENDKLIREVKVITLKSKLVSDFRKDFQFYKVREINNYHHAHDAYLNAVVGTALIKKYPKLESEFVYGDYKVYDVRKMIAKSEQEIGKATAKYFFYSNIMNFFKTEITLANGEIRKRPLIETNGETGEIVWDKGRDFATVRKVLSMPQVNIVKKTEVQTGGFSKESILPKRNSDKLIARKKDWDPKKYGGFDSPTVAYSVLVVAKVEKGKSKKLKSVKELLGITIMERSSFEKNPIDFLEAKGYKEVKKDLIIKLPKYSLFELENGRKRMLASAGELQKGNELALPSKYVNFLYLASHYEKLKGSPEDNEQKQLFVEQHKHYLDEIIEQISEFSKRVILADANLDKVLSAYNKHRDKPIREQAENIIHLFTLTNLGAPAAFKYFDTTIDRKRYTSTKEVLDATLIHQSITGLYETRIDLSQLGGDGGEAAAKGGSGGGGGTAPLEEEYRLFLEAPIQNVTLLEQWKREIPKVWAEINPPGLASTQAPIHVQLLSTALPVRVRQYPITLEAKRSLRETIRKFRAAGILRPVHSPWNTPLLPVRKSGTSEYRMVQDLREVNKRVETIHPTVPNPYTLLSLLPPDRIWYSVLDLKDAFFCIPLAPESQLIFAFEWADAEEGESGQLTWTRLPQGFKNSPTLFNEALNRDLQGFRLDHPSVSLLQYVDDLLIAADTQAACLSATRDLLMTLAELGYRVSGKKAQLCQEEVTYLGFKIHKGSRSLSNSRTQAILQIPVPKTKRQVREFLGKIGYCRLFIPGFAELAQPLYAATRPGNDPLVWGEKEEEAFQSLKLALTQPPALALPSLDKPFQLFVEETSGAAKGVLTQALGPWKRPVAYLSKRLDPVAAGWPRCLRAIAAAALLTREASKLTFGQDIEITSSHNLESLLRSPPDKWLTNARITQYQVLLLDPPRVRFKQTAALNPATLLPETDDTLPIHHCLDTLDSLTSTRPDLTDQPLAQAEATLFTDGSSYIRDGKRYAGAAVVTLDSVIWAEPLPIGTSAQKAELIALTKALEWSKDKSVNIYTDSRYAFATLHVHGMIYRERGWLTAGGKAIKNAPEILALLTAVWLPKRVAVMHCKGHQKDDAPTSTGNRRADEVAREVAIRPLSTQATISAGKRTADGSEFEKRTADGSEFESPKKKAKVE

SEQ ID NO: 1442 - protein, 2098 aa, synthetic construct
MPAAKRVKLDGGDKKYSIGLDIGTNSVGWAVITDEYKVPSKKFKVLGNTDRHSIKKNLIGALLFDSGETAEATRLKRTARRRYTRRKNRICYLQEIFSNEMAKVDDSFFHRLEESFLVEEDKKHERHPIFGNIVDEVAYHEKYPTIYHLRKKLVDSTDKADLRLIYLALAHMIKFRGHFLIEGDLNPDNSDVDKLFIQLVQTYNQLFEENPINASGVDAKAILSARLSKSRRLENLIAQLPGEKKNGLFGNLIALSLGLTPNFKSNFDLAEDAKLQLSKDTYDDDLDNLLAQIGDQYADLFLAAKNLSDAILLSDILRVNTEITKAPLSASMIKRYDEHHQDLTLLKALVRQQLPEKYKEIFFDQSKNGYAGYIDGGASQEEFYKFIKPILEKMDGTEELLVKLNREDLLRKQRTFDNGSIPHQIHLGELHAILRRQEDFYPFLKDNREKIEKILTFRIPYYVGPLARGNSRFAWMTRKSEETITPWNFEEVVDKGASAQSFIERMTNFDKNLPNEKVLPKHSLLYEYFTVYNELTKVKYVTEGMRKPAFLSGEQKKAIVDLLFKTNRKVTVKQLKEDYFKKIECFDSVEISGVEDRFNASLGTYHDLLKIIKDKDFLDNEENEDILEDIVLTLTLFEDREMIEERLKTYAHLFDDKVMKQLKRRRYTGWGRLSRKLINGIRDKQSGKTILDFLKSDGFANRNFMQLIHDDSLTFKEDIQKAQVSGQGDSLHEHIANLAGSPAIKKGILQTVKVVDELVKVMGRHKPENIVIEMARENQTTQKGQKNSRERMKRIEEGIKELGSQILKEHPVENTQLQNEKLYLYYLQNGRDMYVDQELDINRLSDYDVDHIVPQSFLKDDSIDNKVLTRSDKARGKSDNVPSEEVVKKMKNYWRQLLNAKLITQRKFDNLTKAERGGLSELDKAGFIKRQLVETRQITKHVAQILDSRMNTKYDENDKLIREVKVITLKSKLVSDFRKDFQFYKVREINNYHHAHDAYLNAVVGTALIKKYPKLESEFVYGDYKVYDVRKMIAKSEQEIGKATAKYFFYSNIMNFFKTEITLANGEIRKRPLIETNGETGEIVWDKGRDFATVRKVLSMPQVNIVKKTEVQTGGFSKESILPKRNSDKLIARKKDWDPKKYGGFDSPTVAYSVLVVAKVEKGKSKKLKSVKELLGITIMERSSFEKNPIDFLEAKGYKEVKKDLIIKLPKYSLFELENGRKRMLASAGELQKGNELALPSKYVNFLYLASHYEKLKGSPEDNEQKQLFVEQHKHYLDEIIEQISEFSKRVILADANLDKVLSAYNKHRDKPIREQAENIIHLFTLTNLGAPAAFKYFDTTIDRKRYTSTKEVLDATLIHQSITGLYETRIDLSQLGGDGGGGSGGGEAAAKGGTAPLEEEYRLFLEAPIQNVTLLEQWKREIPKVWAEINPPGLASTQAPIHVQLLSTALPVRVRQYPITLEAKRSLRETIRKFRAAGILRPVHSPWNTPLLPVRKSGTSEYRMVQDLREVNKRVETIHPTVPNPYTLLSLLPPDRIWYSVLDLKDAFFCIPLAPESQLIFAFEWADAEEGESGQLTWTRLPQGFKNSPTLFNEALNRDLQGFRLDHPSVSLLQYVDDLLIAADTQAACLSATRDLLMTLAELGYRVSGKKAQLCQEEVTYLGFKIHKGSRSLSNSRTQAILQIPVPKTKRQVREFLGKIGYCRLFIPGFAELAQPLYAATRPGNDPLVWGEKEEEAFQSLKLALTQPPALALPSLDKPFQLFVEETSGAAKGVLTQALGPWKRPVAYLSKRLDPVAAGWPRCLRAIAAAALLTREASKLTFGQDIEITSSHNLESLLRSPPDKWLTNARITQYQVLLLDPPRVRFKQTAALNPATLLPETDDTLPIHHCLDTLDSLTSTRPDLTDQPLAQAEATLFTDGSSYIRDGKRYAGAAVVTLDSVIWAEPLPIGTSAQKAELIALTKALEWSKDKSVNIYTDSRYAFATLHVHGMIYRERGWLTAGGKAIKNAPEILALLTAVWLPKRVAVMHCKGHQKDDAPTSTGNRRADEVAREVAIRPLSTQATISAGKRTADGSEFEKRTADGSEFESPKKKAKVE

SEQ ID NO: 1443 - protein, 2093 aa, synthetic construct
MPAAKRVKLDGGDKKYSIGLDIGTNSVGWAVITDEYKVPSKKFKVLGNTDRHSIKKNLIGALLFDSGETAEATRLKRTARRRYTRRKNRICYLQEIFSNEMAKVDDSFFHRLEESFLVEEDKKHERHPIFGNIVDEVAYHEKYPTIYHLRKKLVDSTDKADLRLIYLALAHMIKFRGHFLIEGDLNPDNSDVDKLFIQLVQTYNQLFEENPINASGVDAKAILSARLSKSRRLENLIAQLPGEKKNGLFGNLIALSLGLTPNFKSNFDLAEDAKLQLSKDTYDDDLDNLLAQIGDQYADLFLAAKNLSDAILLSDILRVNTEITKAPLSASMIKRYDEHHQDLTLLKALVRQQLPEKYKEIFFDQSKNGYAGYIDGGASQEEFYKFIKPILEKMDGTEELLVKLNREDLLRKQRTFDNGSIPHQIHLGELHAILRRQEDFYPFLKDNREKIEKILTFRIPYYVGPLARGNSRFAWMTRKSEETITPWNFEEVVDKGASAQSFIERMTNFDKNLPNEKVLPKHSLLYEYFTVYNELTKVKYVTEGMRKPAFLSGEQKKAIVDLLFKTNRKVTVKQLKEDYFKKIECFDSVEISGVEDRFNASLGTYHDLLKIIKDKDFLDNEENEDILEDIVLTLTLFEDREMIEERLKTYAHLFDDKVMKQLKRRRYTGWGRLSRKLINGIRDKQSGKTILDFLKSDGFANRNFMQLIHDDSLTFKEDIQKAQVSGQGDSLHEHIANLAGSPAIKKGILQTVKVVDELVKVMGRHKPENIVIEMARENQTTQKGQKNSRERMKRIEEGIKELGSQILKEHPVENTQLQNEKLYLYYLQNGRDMYVDQELDINRLSDYDVDHIVPQSFLKDDSIDNKVLTRSDKARGKSDNVPSEEVVKKMKNYWRQLLNAKLITQRKFDNLTKAERGGLSELDKAGFIKRQLVETRQITKHVAQILDSRMNTKYDENDKLIREVKVITLKSKLVSDFRKDFQFYKVREINNYHHAHDAYLNAVVGTALIKKYPKLESEFVYGDYKVYDVRKMIAKSEQEIGKATAKYFFYSNIMNFFKTEITLANGEIRKRPLIETNGETGEIVWDKGRDFATVRKVLSMPQVNIVKKTEVQTGGFSKESILPKRNSDKLIARKKDWDPKKYGGFDSPTVAYSVLVVAKVEKGKSKKLKSVKELLGITIMERSSFEKNPIDFLEAKGYKEVKKDLIIKLPKYSLFELENGRKRMLASAGELQKGNELALPSKYVNFLYLASHYEKLKGSPEDNEQKQLFVEQHKHYLDEIIEQISEFSKRVILADANLDKVLSAYNKHRDKPIREQAENIIHLFTLTNLGAPAAFKYFDTTIDRKRYTSTKEVLDATLIHQSITGLYETRIDLSQLGGDGGGSSGSSGGTAPLEEEYRLFLEAPIQNVTLLEQWKREIPKVWAEINPPGLASTQAPIHVQLLSTALPVRVRQYPITLEAKRSLRETIRKFRAAGILRPVHSPWNTPLLPVRKSGTSEYRMVQDLREVNKRVETIHPTVPNPYTLLSLLPPDRIWYSVLDLKDAFFCIPLAPESQLIFAFEWADAEEGESGQLTWTRLPQGFKNSPTLFNEALNRDLQGFRLDHPSVSLLQYVDDLLIAADTQAACLSATRDLLMTLAELGYRVSGKKAQLCQEEVTYLGFKIHKGSRSLSNSRTQAILQIPVPKTKRQVREFLGKIGYCRLFIPGFAELAQPLYAATRPGNDPLVWGEKEEEAFQSLKLALTQPPALALPSLDKPFQLFVEETSGAAKGVLTQALGPWKRPVAYLSKRLDPVAAGWPRCLRAIAAAALLTREASKLTFGQDIEITSSHNLESLLRSPPDKWLTNARITQYQVLLLDPPRVRFKQTAALNPATLLPETDDTLPIHHCLDTLDSLTSTRPDLTDQPLAQAEATLFTDGSSYIRDGKRYAGAAVVTLDSVIWAEPLPIGTSAQKAELIALTKALEWSKDKSVNIYTDSRYAFATLHVHGMIYRERGWLTAGGKAIKNAPEILALLTAVWLPKRVAVMHCKGHQKDDAPTSTGNRRADEVAREVAIRPLSTQATISAGKRTADGSEFEKRTADGSEFESPKKKAKVE

SEQ ID NO: 1444 - protein, 2093 aa, synthetic construct
MPAAKRVKLDGGDKKYSIGLDIGTNSVGWAVITDEYKVPSKKFKVLGNTDRHSIKKNLIGALLFDSGETAEATRLKRTARRRYTRRKNRICYLQEIFSNEMAKVDDSFFHRLEESFLVEEDKKHERHPIFGNIVDEVAYHEKYPTIYHLRKKLVDSTDKADLRLIYLALAHMIKFRGHFLIEGDLNPDNSDVDKLFIQLVQTYNQLFEENPINASGVDAKAILSARLSKSRRLENLIAQLPGEKKNGLFGNLIALSLGLTPNFKSNFDLAEDAKLQLSKDTYDDDLDNLLAQIGDQYADLFLAAKNLSDAILLSDILRVNTEITKAPLSASMIKRYDEHHQDLTLLKALVRQQLPEKYKEIFFDQSKNGYAGYIDGGASQEEFYKFIKPILEKMDGTEELLVKLNREDLLRKQRTFDNGSIPHQIHLGELHAILRRQEDFYPFLKDNREKIEKILTFRIPYYVGPLARGNSRFAWMTRKSEETITPWNFEEVVDKGASAQSFIERMTNFDKNLPNEKVLPKHSLLYEYFTVYNELTKVKYVTEGMRKPAFLSGEQKKAIVDLLFKTNRKVTVKQLKEDYFKKIECFDSVEISGVEDRFNASLGTYHDLLKIIKDKDFLDNEENEDILEDIVLTLTLFEDREMIEERLKTYAHLFDDKVMKQLKRRRYTGWGRLSRKLINGIRDKQSGKTILDFLKSDGFANRNFMQLIHDDSLTFKEDIQKAQVSGQGDSLHEHIANLAGSPAIKKGILQTVKVVDELVKVMGRHKPENIVIEMARENQTTQKGQKNSRERMKRIEEGIKELGSQILKEHPVENTQLQNEKLYLYYLQNGRDMYVDQELDINRLSDYDVDHIVPQSFLKDDSIDNKVLTRSDKARGKSDNVPSEEVVKKMKNYWRQLLNAKLITQRKFDNLTKAERGGLSELDKAGFIKRQLVETRQITKHVAQILDSRMNTKYDENDKLIREVKVITLKSKLVSDFRKDFQFYKVREINNYHHAHDAYLNAVVGTALIKKYPKLESEFVYGDYKVYDVRKMIAKSEQEIGKATAKYFFYSNIMNFFKTEITLANGEIRKRPLIETNGETGEIVWDKGRDFATVRKVLSMPQVNIVKKTEVQTGGFSKESILPKRNSDKLIARKKDWDPKKYGGFDSPTVAYSVLVVAKVEKGKSKKLKSVKELLGITIMERSSFEKNPIDFLEAKGYKEVKKDLIIKLPKYSLFELENGRKRMLASAGELQKGNELALPSKYVNFLYLASHYEKLKGSPEDNEQKQLFVEQHKHYLDEIIEQISEFSKRVILADANLDKVLSAYNKHRDKPIREQAENIIHLFTLTNLGAPAAFKYFDTTIDRKRYTSTKEVLDATLIHQSITGLYETRIDLSQLGGDGGGGGGSSGGTAPLEEEYRLFLEAPIQNVTLLEQWKREIPKVWAEINPPGLASTQAPIHVQLLSTALPVRVRQYPITLEAKRSLRETIRKFRAAGILRPVHSPWNTPLLPVRKSGTSEYRMVQDLREVNKRVETIHPTVPNPYTLLSLLPPDRIWYSVLDLKDAFFCIPLAPESQLIFAFEWADAEEGESGQLTWTRLPQGFKNSPTLFNEALNRDLQGFRLDHPSVSLLQYVDDLLIAADTQAACLSATRDLLMTLAELGYRVSGKKAQLCQEEVTYLGFKIHKGSRSLSNSRTQAILQIPVPKTKRQVREFLGKIGYCRLFIPGFAELAQPLYAATRPGNDPLVWGEKEEEAFQSLKLALTQPPALALPSLDKPFQLFVEETSGAAKGVLTQALGPWKRPVAYLSKRLDPVAAGWPRCLRAIAAAALLTREASKLTFGQDIEITSSHNLESLLRSPPDKWLTNARITQYQVLLLDPPRVRFKQTAALNPATLLPETDDTLPIHHCLDTLDSLTSTRPDLTDQPLAQAEATLFTDGSSYIRDGKRYAGAAVVTLDSVIWAEPLPIGTSAQKAELIALTKALEWSKDKSVNIYTDSRYAFATLHVHGMIYRERGWLTAGGKAIKNAPEILALLTAVWLPKRVAVMHCKGHQKDDAPTSTGNRRADEVAREVAIRPLSTQATISAGKRTADGSEFEKRTADGSEFESPKKKAKVE

SEQ ID NO: 1445 - protein, 2093 aa, synthetic construct
MPAAKRVKLDGGDKKYSIGLDIGTNSVGWAVITDEYKVPSKKFKVLGNTDRHSIKKNLIGALLFDSGETAEATRLKRTARRRYTRRKNRICYLQEIFSNEMAKVDDSFFHRLEESFLVEEDKKHERHPIFGNIVDEVAYHEKYPTIYHLRKKLVDSTDKADLRLIYLALAHMIKFRGHFLIEGDLNPDNSDVDKLFIQLVQTYNQLFEENPINASGVDAKAILSARLSKSRRLENLIAQLPGEKKNGLFGNLIALSLGLTPNFKSNFDLAEDAKLQLSKDTYDDDLDNLLAQIGDQYADLFLAAKNLSDAILLSDILRVNTEITKAPLSASMIKRYDEHHQDLTLLKALVRQQLPEKYKEIFFDQSKNGYAGYIDGGASQEEFYKFIKPILEKMDGTEELLVKLNREDLLRKQRTFDNGSIPHQIHLGELHAILRRQEDFYPFLKDNREKIEKILTFRIPYYVGPLARGNSRFAWMTRKSEETITPWNFEEVVDKGASAQSFIERMTNFDKNLPNEKVLPKHSLLYEYFTVYNELTKVKYVTEGMRKPAFLSGEQKKAIVDLLFKTNRKVTVKQLKEDYFKKIECFDSVEISGVEDRFNASLGTYHDLLKIIKDKDFLDNEENEDILEDIVLTLTLFEDREMIEERLKTYAHLFDDKVMKQLKRRRYTGWGRLSRKLINGIRDKQSGKTILDFLKSDGFANRNFMQLIHDDSLTFKEDIQKAQVSGQGDSLHEHIANLAGSPAIKKGILQTVKVVDELVKVMGRHKPENIVIEMARENQTTQKGQKNSRERMKRIEEGIKELGSQILKEHPVENTQLQNEKLYLYYLQNGRDMYVDQELDINRLSDYDVDHIVPQSFLKDDSIDNKVLTRSDKARGKSDNVPSEEVVKKMKNYWRQLLNAKLITQRKFDNLTKAERGGLSELDKAGFIKRQLVETRQITKHVAQILDSRMNTKYDENDKLIREVKVITLKSKLVSDFRKDFQFYKVREINNYHHAHDAYLNAVVGTALIKKYPKLESEFVYGDYKVYDVRKMIAKSEQEIGKATAKYFFYSNIMNFFKTEITLANGEIRKRPLIETNGETGEIVWDKGRDFATVRKVLSMPQVNIVKKTEVQTGGFSKESILPKRNSDKLIARKKDWDPKKYGGFDSPTVAYSVLVVAKVEKGKSKKLKSVKELLGITIMERSSFEKNPIDFLEAKGYKEVKKDLIIKLPKYSLFELENGRKRMLASAGELQKGNELALPSKYVNFLYLASHYEKLKGSPEDNEQKQLFVEQHKHYLDEIIEQISEFSKRVILADANLDKVLSAYNKHRDKPIREQAENIIHLFTLTNLGAPAAFKYFDTTIDRKRYTSTKEVLDATLIHQSITGLYETRIDLSQLGGDGGGSSGGSGGTAPLEEEYRLFLEAPIQNVTLLEQWKREIPKVWAEINPPGLASTQAPIHVQLLSTALPVRVRQYPITLEAKRSLRETIRKFRAAGILRPVHSPWNTPLLPVRKSGTSEYRMVQDLREVNKRVETIHPTVPNPYTLLSLLPPDRIWYSVLDLKDAFFCIPLAPESQLIFAFEWADAEEGESGQLTWTRLPQGFKNSPTLFNEALNRDLQGFRLDHPSVSLLQYVDDLLIAADTQAACLSATRDLLMTLAELGYRVSGKKAQLCQEEVTYLGFKIHKGSRSLSNSRTQAILQIPVPKTKRQVREFLGKIGYCRLFIPGFAELAQPLYAATRPGNDPLVWGEKEEEAFQSLKLALTQPPALALPSLDKPFQLFVEETSGAAKGVLTQALGPWKRPVAYLSKRLDPVAAGWPRCLRAIAAAALLTREASKLTFGQDIEITSSHNLESLLRSPPDKWLTNARITQYQVLLLDPPRVRFKQTAALNPATLLPETDDTLPIHHCLDTLDSLTSTRPDLTDQPLAQAEATLFTDGSSYIRDGKRYAGAAVVTLDSVIWAEPLPIGTSAQKAELIALTKALEWSKDKSVNIYTDSRYAFATLHVHGMIYRERGWLTAGGKAIKNAPEILALLTAVWLPKRVAVMHCKGHQKDDAPTSTGNRRADEVAREVAIRPLSTQATISAGKRTADGSEFEKRTADGSEFESPKKKAKVE

SEQ ID NO: 1446 - protein, 2095 aa, synthetic construct
MPAAKRVKLDGGDKKYSIGLDIGTNSVGWAVITDEYKVPSKKFKVLGNTDRHSIKKNLIGALLFDSGETAEATRLKRTARRRYTRRKNRICYLQEIFSNEMAKVDDSFFHRLEESFLVEEDKKHERHPIFGNIVDEVAYHEKYPTIYHLRKKLVDSTDKADLRLIYLALAHMIKFRGHFLIEGDLNPDNSDVDKLFIQLVQTYNQLFEENPINASGVDAKAILSARLSKSRRLENLIAQLPGEKKNGLFGNLIALSLGLTPNFKSNFDLAEDAKLQLSKDTYDDDLDNLLAQIGDQYADLFLAAKNLSDAILLSDILRVNTEITKAPLSASMIKRYDEHHQDLTLLKALVRQQLPEKYKEIFFDQSKNGYAGYIDGGASQEEFYKFIKPILEKMDGTEELLVKLNREDLLRKQRTFDNGSIPHQIHLGELHAILRRQEDFYPFLKDNREKIEKILTFRIPYYVGPLARGNSRFAWMTRKSEETITPWNFEEVVDKGASAQSFIERMTNFDKNLPNEKVLPKHSLLYEYFTVYNELTKVKYVTEGMRKPAFLSGEQKKAIVDLLFKTNRKVTVKQLKEDYFKKIECFDSVEISGVEDRFNASLGTYHDLLKIIKDKDFLDNEENEDILEDIVLTLTLFEDREMIEERLKTYAHLFDDKVMKQLKRRRYTGWGRLSRKLINGIRDKQSGKTILDFLKSDGFANRNFMQLIHDDSLTFKEDIQKAQVSGQGDSLHEHIANLAGSPAIKKGILQTVKVVDELVKVMGRHKPENIVIEMARENQTTQKGQKNSRERMKRIEEGIKELGSQILKEHPVENTQLQNEKLYLYYLQNGRDMYVDQELDINRLSDYDVDHIVPQSFLKDDSIDNKVLTRSDKARGKSDNVPSEEVVKKMKNYWRQLLNAKLITQRKFDNLTKAERGGLSELDKAGFIKRQLVETRQITKHVAQILDSRMNTKYDENDKLIREVKVITLKSKLVSDFRKDFQFYKVREINNYHHAHDAYLNAVVGTALIKKYPKLESEFVYGDYKVYDVRKMIAKSEQEIGKATAKYFFYSNIMNFFKTEITLANGEIRKRPLIETNGETGEIVWDKGRDFATVRKVLSMPQVNIVKKTEVQTGGFSKESILPKRNSDKLIARKKDWDPKKYGGFDSPTVAYSVLVVAKVEKGKSKKLKSVKELLGITIMERSSFEKNPIDFLEAKGYKEVKKDLIIKLPKYSLFELENGRKRMLASAGELQKGNELALPSKYVNFLYLASHYEKLKGSPEDNEQKQLFVEQHKHYLDEIIEQISEFSKRVILADANLDKVLSAYNKHRDKPIREQAENIIHLFTLTNLGAPAAFKYFDTTIDRKRYTSTKEVLDATLIHQSITGLYETRIDLSQLGGDGGGGGEAAAKGGTAPLEEEYRLFLEAPIQNVTLLEQWKREIPKVWAEINPPGLASTQAPIHVQLLSTALPVRVRQYPITLEAKRSLRETIRKFRAAGILRPVHSPWNTPLLPVRKSGTSEYRMVQDLREVNKRVETIHPTVPNPYTLLSLLPPDRIWYSVLDLKDAFFCIPLAPESQLIFAFEWADAEEGESGQLTWTRLPQGFKNSPTLFNEALNRDLQGFRLDHPSVSLLQYVDDLLIAADTQAACLSATRDLLMTLAELGYRVSGKKAQLCQEEVTYLGFKIHKGSRSLSNSRTQAILQIPVPKTKRQVREFLGKIGYCRLFIPGFAELAQPLYAATRPGNDPLVWGEKEEEAFQSLKLALTQPPALALPSLDKPFQLFVEETSGAAKGVLTQALGPWKRPVAYLSKRLDPVAAGWPRCLRAIAAAALLTREASKLTFGQDIEITSSHNLESLLRSPPDKWLTNARITQYQVLLLDPPRVRFKQTAALNPATLLPETDDTLPIHHCLDTLDSLTSTRPDLTDQPLAQAEATLFTDGSSYIRDGKRYAGAAVVTLDSVIWAEPLPIGTSAQKAELIALTKALEWSKDKSVNIYTDSRYAFATLHVHGMIYRERGWLTAGGKAIKNAPEILALLTAVWLPKRVAVMHCKGHQKDDAPTSTGNRRADEVAREVAIRPLSTQATISAGKRTADGSEFEKRTADGSEFESPKKKAKVE

SEQ ID NO: 1447 - protein, 2096 aa, synthetic construct
MPAAKRVKLDGGDKKYSIGLDIGTNSVGWAVITDEYKVPSKKFKVLGNTDRHSIKKNLIGALLFDSGETAEATRLKRTARRRYTRRKNRICYLQEIFSNEMAKVDDSFFHRLEESFLVEEDKKHERHPIFGNIVDEVAYHEKYPTIYHLRKKLVDSTDKADLRLIYLALAHMIKFRGHFLIEGDLNPDNSDVDKLFIQLVQTYNQLFEENPINASGVDAKAILSARLSKSRRLENLIAQLPGEKKNGLFGNLIALSLGLTPNFKSNFDLAEDAKLQLSKDTYDDDLDNLLAQIGDQYADLFLAAKNLSDAILLSDILRVNTEITKAPLSASMIKRYDEHHQDLTLLKALVRQQLPEKYKEIFFDQSKNGYAGYIDGGASQEEFYKFIKPILEKMDGTEELLVKLNREDLLRKQRTFDNGSIPHQIHLGELHAILRRQEDFYPFLKDNREKIEKILTFRIPYYVGPLARGNSRFAWMTRKSEETITPWNFEEVVDKGASAQSFIERMTNFDKNLPNEKVLPKHSLLYEYFTVYNELTKVKYVTEGMRKPAFLSGEQKKAIVDLLFKTNRKVTVKQLKEDYFKKIECFDSVEISGVEDRFNASLGTYHDLLKIIKDKDFLDNEENEDILEDIVLTLTLFEDREMIEERLKTYAHLFDDKVMKQLKRRRYTGWGRLSRKLINGIRDKQSGKTILDFLKSDGFANRNFMQLIHDDSLTFKEDIQKAQVSGQGDSLHEHIANLAGSPAIKKGILQTVKVVDELVKVMGRHKPENIVIEMARENQTTQKGQKNSRERMKRIEEGIKELGSQILKEHPVENTQLQNEKLYLYYLQNGRDMYVDQELDINRLSDYDVDHIVPQSFLKDDSIDNKVLTRSDKARGKSDNVPSEEVVKKMKNYWRQLLNAKLITQRKFDNLTKAERGGLSELDKAGFIKRQLVETRQITKHVAQILDSRMNTKYDENDKLIREVKVITLKSKLVSDFRKDFQFYKVREINNYHHAHDAYLNAVVGTALIKKYPKLESEFVYGDYKVYDVRKMIAKSEQEIGKATAKYFFYSNIMNFFKTEITLANGEIRKRPLIETNGETGEIVWDKGRDFATVRKVLSMPQVNIVKKTEVQTGGFSKESILPKRNSDKLIARKKDWDPKKYGGFDSPTVAYSVLVVAKVEKGKSKKLKSVKELLGITIMERSSFEKNPIDFLEAKGYKEVKKDLIIKLPKYSLFELENGRKRMLASAGELQKGNELALPSKYVNFLYLASHYEKLKGSPEDNEQKQLFVEQHKHYLDEIIEQISEFSKRVILADANLDKVLSAYNKHRDKPIREQAENIIHLFTLTNLGAPAAFKYFDTTIDRKRYTSTKEVLDATLIHQSITGLYETRIDLSQLGGDGGPAPGGGGSSGGTAPLEEEYRLFLEAPIQNVTLLEQWKREIPKVWAEINPPGLASTQAPIHVQLLSTALPVRVRQYPITLEAKRSLRETIRKFRAAGILRPVHSPWNTPLLPVRKSGTSEYRMVQDLREVNKRVETIHPTVPNPYTLLSLLPPDRIWYSVLDLKDAFFCIPLAPESQLIFAFEWADAEEGESGQLTWTRLPQGFKNSPTLFNEALNRDLQGFRLDHPSVSLLQYVDDLLIAADTQAACLSATRDLLMTLAELGYRVSGKKAQLCQEEVTYLGFKIHKGSRSLSNSRTQAILQIPVPKTKRQVREFLGKIGYCRLFIPGFAELAQPLYAATRPGNDPLVWGEKEEEAFQSLKLALTQPPALALPSLDKPFQLFVEETSGAAKGVLTQALGPWKRPVAYLSKRLDPVAAGWPRCLRAIAAAALLTREASKLTFGQDIEITSSHNLESLLRSPPDKWLTNARITQYQVLLLDPPRVRFKQTAALNPATLLPETDDTLPIHHCLDTLDSLTSTRPDLTDQPLAQAEATLFTDGSSYIRDGKRYAGAAVVTLDSVIWAEPLPIGTSAQKAELIALTKALEWSKDKSVNIYTDSRYAFATLHVHGMIYRERGWLTAGGKAIKNAPEILALLTAVWLPKRVAVMHCKGHQKDDAPTSTGNRRADEVAREVAIRPLSTQATISAGKRTADGSEFEKRTADGSEFESPKKKAKVE

SEQ ID NO: 1448 - protein, 2129 aa, synthetic construct
MPAAKRVKLDGGDKKYSIGLDIGTNSVGWAVITDEYKVPSKKFKVLGNTDRHSIKKNLIGALLFDSGETAEATRLKRTARRRYTRRKNRICYLQEIFSNEMAKVDDSFFHRLEESFLVEEDKKHERHPIFGNIVDEVAYHEKYPTIYHLRKKLVDSTDKADLRLIYLALAHMIKFRGHFLIEGDLNPDNSDVDKLFIQLVQTYNQLFEENPINASGVDAKAILSARLSKSRRLENLIAQLPGEKKNGLFGNLIALSLGLTPNFKSNFDLAEDAKLQLSKDTYDDDLDNLLAQIGDQYADLFLAAKNLSDAILLSDILRVNTEITKAPLSASMIKRYDEHHQDLTLLKALVRQQLPEKYKEIFFDQSKNGYAGYIDGGASQEEFYKFIKPILEKMDGTEELLVKLNREDLLRKQRTFDNGSIPHQIHLGELHAILRRQEDFYPFLKDNREKIEKILTFRIPYYVGPLARGNSRFAWMTRKSEETITPWNFEEVVDKGASAQSFIERMTNFDKNLPNEKVLPKHSLLYEYFTVYNELTKVKYVTEGMRKPAFLSGEQKKAIVDLLFKTNRKVTVKQLKEDYFKKIECFDSVEISGVEDRFNASLGTYHDLLKIIKDKDFLDNEENEDILEDIVLTLTLFEDREMIEERLKTYAHLFDDKVMKQLKRRRYTGWGRLSRKLINGIRDKQSGKTILDFLKSDGFANRNFMQLIHDDSLTFKEDIQKAQVSGQGDSLHEHIANLAGSPAIKKGILQTVKVVDELVKVMGRHKPENIVIEMARENQTTQKGQKNSRERMKRIEEGIKELGSQILKEHPVENTQLQNEKLYLYYLQNGRDMYVDQELDINRLSDYDVDHIVPQSFLKDDSIDNKVLTRSDKARGKSDNVPSEEVVKKMKNYWRQLLNAKLITQRKFDNLTKAERGGLSELDKAGFIKRQLVETRQITKHVAQILDSRMNTKYDENDKLIREVKVITLKSKLVSDFRKDFQFYKVREINNYHHAHDAYLNAVVGTALIKKYPKLESEFVYGDYKVYDVRKMIAKSEQEIGKATAKYFFYSNIMNFFKTEITLANGEIRKRPLIETNGETGEIVWDKGRDFATVRKVLSMPQVNIVKKTEVQTGGFSKESILPKRNSDKLIARKKDWDPKKYGGFDSPTVAYSVLVVAKVEKGKSKKLKSVKELLGITIMERSSFEKNPIDFLEAKGYKEVKKDLIIKLPKYSLFELENGRKRMLASAGELQKGNELALPSKYVNFLYLASHYEKLKGSPEDNEQKQLFVEQHKHYLDEIIEQISEFSKRVILADANLDKVLSAYNKHRDKPIREQAENIIHLFTLTNLGAPAAFKYFDTTIDRKRYTSTKEVLDATLIHQSITGLYETRIDLSQLGGDGGAEAAAKEAAAKEAAAKEAAAKALEAEAAAKEAAAKEAAAKEAAAKAGGVLNLEEEYRLHEKPVPSSIDPSWLQLFPTVWAERAGMGLANQVPPVVVELRSGASPVAVRQYPMSKEAREGIRPHIQKFLDLGVLVPCRSPWNTPLLPVKKPGTNDYRPVQDLREINKRVQDIHPTVPNPYNLLSSLPPSYTWYSVLDLKDAFFCLRLHPNSQPLFAFEWKDPEKGNTGQLTWTRLPQGFKNSPTLFNEALHRDLAPFRALNPQVVLLQYVDDLLVAAPTYEDCKKGTQKLLQELSKLGYRVSAKKAQLCQREVTYLGYLLKEGKRWLTPARKATVMKIPVPTTPRQVREFLGKAGFCRLFIPGFASLAAPLYPLTKPSIPFIWTEEHQQAFDHIKKALLSAPALALPDLTKPFTLYIDERAGVARGVLTQTLGPWRRPVAYLSKKLDPVASGWPTCLKAVAAVALLLKDADKLTLGQNVTVIASHSLESIVRQPPDRWMTNARMTHYQSLLLNERVSFAPPAVLNPATLLPVESEATPVHRCSEILAEETGTRRDLEDQPLPGVPTWYTDGSSFITEGKRRAGAPIVDGKRTVWASSLPEGTSAQKAELVALTQALRLAEGKNINIYTDSRYAFATAHIHGAIYKQRGWLTSAGKDIKNKEEILALLEAIHLPRRVAIIHCPGHQRGSNPVATGNRRADEAAKQAALSTRVLAGTTKPAGKRTADGSEFEKRTADGSEFESPKKKAKVE

SEQ ID NO: 1449 - protein, 2092 aa, synthetic construct
MPAAKRVKLDGGDKKYSIGLDIGTNSVGWAVITDEYKVPSKKFKVLGNTDRHSIKKNLIGALLFDSGETAEATRLKRTARRRYTRRKNRICYLQEIFSNEMAKVDDSFFHRLEESFLVEEDKKHERHPIFGNIVDEVAYHEKYPTIYHLRKKLVDSTDKADLRLIYLALAHMIKFRGHFLIEGDLNPDNSDVDKLFIQLVQTYNQLFEENPINASGVDAKAILSARLSKSRRLENLIAQLPGEKKNGLFGNLIALSLGLTPNFKSNFDLAEDAKLQLSKDTYDDDLDNLLAQIGDQYADLFLAAKNLSDAILLSDILRVNTEITKAPLSASMIKRYDEHHQDLTLLKALVRQQLPEKYKEIFFDQSKNGYAGYIDGGASQEEFYKFIKPILEKMDGTEELLVKLNREDLLRKQRTFDNGSIPHQIHLGELHAILRRQEDFYPFLKDNREKIEKILTFRIPYYVGPLARGNSRFAWMTRKSEETITPWNFEEVVDKGASAQSFIERMTNFDKNLPNEKVLPKHSLLYEYFTVYNELTKVKYVTEGMRKPAFLSGEQKKAIVDLLFKTNRKVTVKQLKEDYFKKIECFDSVEISGVEDRFNASLGTYHDLLKIIKDKDFLDNEENEDILEDIVLTLTLFEDREMIEERLKTYAHLFDDKVMKQLKRRRYTGWGRLSRKLINGIRDKQSGKTILDFLKSDGFANRNFMQLIHDDSLTFKEDIQKAQVSGQGDSLHEHIANLAGSPAIKKGILQTVKVVDELVKVMGRHKPENIVIEMARENQTTQKGQKNSRERMKRIEEGIKELGSQILKEHPVENTQLQNEKLYLYYLQNGRDMYVDQELDINRLSDYDVDHIVPQSFLKDDSIDNKVLTRSDKARGKSDNVPSEEVVKKMKNYWRQLLNAKLITQRKFDNLTKAERGGLSELDKAGFIKRQLVETRQITKHVAQILDSRMNTKYDENDKLIREVKVITLKSKLVSDFRKDFQFYKVREINNYHHAHDAYLNAVVGTALIKKYPKLESEFVYGDYKVYDVRKMIAKSEQEIGKATAKYFFYSNIMNFFKTEITLANGEIRKRPLIETNGETGEIVWDKGRDFATVRKVLSMPQVNIVKKTEVQTGGFSKESILPKRNSDKLIARKKDWDPKKYGGFDSPTVAYSVLVVAKVEKGKSKKLKSVKELLGITIMERSSFEKNPIDFLEAKGYKEVKKDLIIKLPKYSLFELENGRKRMLASAGELQKGNELALPSKYVNFLYLASHYEKLKGSPEDNEQKQLFVEQHKHYLDEIIEQISEFSKRVILADANLDKVLSAYNKHRDKPIREQAENIIHLFTLTNLGAPAAFKYFDTTIDRKRYTSTKEVLDATLIHQSITGLYETRIDLSQLGGDGGGGSGGSGGSGGVLNLEEEYRLHEKPVPSSIDPSWLQLFPTVWAERAGMGLANQVPPVVVELRSGASPVAVRQYPMSKEAREGIRPHIQKFLDLGVLVPCRSPWNTPLLPVKKPGTNDYRPVQDLREINKRVQDIHPTVPNPYNLLSSLPPSYTWYSVLDLKDAFFCLRLHPNSQPLFAFEWKDPEKGNTGQLTWTRLPQGFKNSPTLFNEALHRDLAPFRALNPQVVLLQYVDDLLVAAPTYEDCKKGTQKLLQELSKLGYRVSAKKAQLCQREVTYLGYLLKEGKRWLTPARKATVMKIPVPTTPRQVREFLGKAGFCRLFIPGFASLAAPLYPLTKPSIPFIWTEEHQQAFDHIKKALLSAPALALPDLTKPFTLYIDERAGVARGVLTQTLGPWRRPVAYLSKKLDPVASGWPTCLKAVAAVALLLKDADKLTLGQNVTVIASHSLESIVRQPPDRWMTNARMTHYQSLLLNERVSFAPPAVLNPATLLPVESEATPVHRCSEILAEETGTRRDLEDQPLPGVPTWYTDGSSFITEGKRRAGAPIVDGKRTVWASSLPEGTSAQKAELVALTQALRLAEGKNINIYTDSRYAFATAHIHGAIYKQRGWLTSAGKDIKNKEEILALLEAIHLPRRVAIIHCPGHQRGSNPVATGNRRADEAAKQAALSTRVLAGTTKPAGKRTADGSEFEKRTADGSEFESPKKKAKVE

SEQ ID NO: 1450 - protein, 2089 aa, synthetic construct
MPAAKRVKLDGGDKKYSIGLDIGTNSVGWAVITDEYKVPSKKFKVLGNTDRHSIKKNLIGALLFDSGETAEATRLKRTARRRYTRRKNRICYLQEIFSNEMAKVDDSFFHRLEESFLVEEDKKHERHPIFGNIVDEVAYHEKYPTIYHLRKKLVDSTDKADLRLIYLALAHMIKFRGHFLIEGDLNPDNSDVDKLFIQLVQTYNQLFEENPINASGVDAKAILSARLSKSRRLENLIAQLPGEKKNGLFGNLIALSLGLTPNFKSNFDLAEDAKLQLSKDTYDDDLDNLLAQIGDQYADLFLAAKNLSDAILLSDILRVNTEITKAPLSASMIKRYDEHHQDLTLLKALVRQQLPEKYKEIFFDQSKNGYAGYIDGGASQEEFYKFIKPILEKMDGTEELLVKLNREDLLRKQRTFDNGSIPHQIHLGELHAILRRQEDFYPFLKDNREKIEKILTFRIPYYVGPLARGNSRFAWMTRKSEETITPWNFEEVVDKGASAQSFIERMTNFDKNLPNEKVLPKHSLLYEYFTVYNELTKVKYVTEGMRKPAFLSGEQKKAIVDLLFKTNRKVTVKQLKEDYFKKIECFDSVEISGVEDRFNASLGTYHDLLKIIKDKDFLDNEENEDILEDIVLTLTLFEDREMIEERLKTYAHLFDDKVMKQLKRRRYTGWGRLSRKLINGIRDKQSGKTILDFLKSDGFANRNFMQLIHDDSLTFKEDIQKAQVSGQGDSLHEHIANLAGSPAIKKGILQTVKVVDELVKVMGRHKPENIVIEMARENQTTQKGQKNSRERMKRIEEGIKELGSQILKEHPVENTQLQNEKLYLYYLQNGRDMYVDQELDINRLSDYDVDHIVPQSFLKDDSIDNKVLTRSDKARGKSDNVPSEEVVKKMKNYWRQLLNAKLITQRKFDNLTKAERGGLSELDKAGFIKRQLVETRQITKHVAQILDSRMNTKYDENDKLIREVKVITLKSKLVSDFRKDFQFYKVREINNYHHAHDAYLNAVVGTALIKKYPKLESEFVYGDYKVYDVRKMIAKSEQEIGKATAKYFFYSNIMNFFKTEITLANGEIRKRPLIETNGETGEIVWDKGRDFATVRKVLSMPQVNIVKKTEVQTGGFSKESILPKRNSDKLIARKKDWDPKKYGGFDSPTVAYSVLVVAKVEKGKSKKLKSVKELLGITIMERSSFEKNPIDFLEAKGYKEVKKDLIIKLPKYSLFELENGRKRMLASAGELQKGNELALPSKYVNFLYLASHYEKLKGSPEDNEQKQLFVEQHKHYLDEIIEQISEFSKRVILADANLDKVLSAYNKHRDKPIREQAENIIHLFTLTNLGAPAAFKYFDTTIDRKRYTSTKEVLDATLIHQSITGLYETRIDLSQLGGDGGGGSGSSGGVLNLEEEYRLHEKPVPSSIDPSWLQLFPTVWAERAGMGLANQVPPVVVELRSGASPVAVRQYPMSKEAREGIRPHIQKFLDLGVLVPCRSPWNTPLLPVKKPGTNDYRPVQDLREINKRVQDIHPTVPNPYNLLSSLPPSYTWYSVLDLKDAFFCLRLHPNSQPLFAFEWKDPEKGNTGQLTWTRLPQGFKNSPTLFNEALHRDLAPFRALNPQVVLLQYVDDLLVAAPTYEDCKKGTQKLLQELSKLGYRVSAKKAQLCQREVTYLGYLLKEGKRWLTPARKATVMKIPVPTTPRQVREFLGKAGFCRLFIPGFASLAAPLYPLTKPSIPFIWTEEHQQAFDHIKKALLSAPALALPDLTKPFTLYIDERAGVARGVLTQTLGPWRRPVAYLSKKLDPVASGWPTCLKAVAAVALLLKDADKLTLGQNVTVIASHSLESIVRQPPDRWMTNARMTHYQSLLLNERVSFAPPAVLNPATLLPVESEATPVHRCSEILAEETGTRRDLEDQPLPGVPTWYTDGSSFITEGKRRAGAPIVDGKRTVWASSLPEGTSAQKAELVALTQALRLAEGKNINIYTDSRYAFATAHIHGAIYKQRGWLTSAGKDIKNKEEILALLEAIHLPRRVAIIHCPGHQRGSNPVATGNRRADEAAKQAALSTRVLAGTTKPAGKRTADGSEFEKRTADGSEFESPKKKAKVE

SEQ ID NO: 1451 - protein, 2094 aa, synthetic construct
MPAAKRVKLDGGDKKYSIGLDIGTNSVGWAVITDEYKVPSKKFKVLGNTDRHSIKKNLIGALLFDSGETAEATRLKRTARRRYTRRKNRICYLQEIFSNEMAKVDDSFFHRLEESFLVEEDKKHERHPIFGNIVDEVAYHEKYPTIYHLRKKLVDSTDKADLRLIYLALAHMIKFRGHFLIEGDLNPDNSDVDKLFIQLVQTYNQLFEENPINASGVDAKAILSARLSKSRRLENLIAQLPGEKKNGLFGNLIALSLGLTPNFKSNFDLAEDAKLQLSKDTYDDDLDNLLAQIGDQYADLFLAAKNLSDAILLSDILRVNTEITKAPLSASMIKRYDEHHQDLTLLKALVRQQLPEKYKEIFFDQSKNGYAGYIDGGASQEEFYKFIKPILEKMDGTEELLVKLNREDLLRKQRTFDNGSIPHQIHLGELHAILRRQEDFYPFLKDNREKIEKILTFRIPYYVGPLARGNSRFAWMTRKSEETITPWNFEEVVDKGASAQSFIERMTNFDKNLPNEKVLPKHSLLYEYFTVYNELTKVKYVTEGMRKPAFLSGEQKKAIVDLLFKTNRKVTVKQLKEDYFKKIECFDSVEISGVEDRFNASLGTYHDLLKIIKDKDFLDNEENEDILEDIVLTLTLFEDREMIEERLKTYAHLFDDKVMKQLKRRRYTGWGRLSRKLINGIRDKQSGKTILDFLKSDGFANRNFMQLIHDDSLTFKEDIQKAQVSGQGDSLHEHIANLAGSPAIKKGILQTVKVVDELVKVMGRHKPENIVIEMARENQTTQKGQKNSRERMKRIEEGIKELGSQILKEHPVENTQLQNEKLYLYYLQNGRDMYVDQELDINRLSDYDVDHIVPQSFLKDDSIDNKVLTRSDKARGKSDNVPSEEVVKKMKNYWRQLLNAKLITQRKFDNLTKAERGGLSELDKAGFIKRQLVETRQITKHVAQILDSRMNTKYDENDKLIREVKVITLKSKLVSDFRKDFQFYKVREINNYHHAHDAYLNAVVGTALIKKYPKLESEFVYGDYKVYDVRKMIAKSEQEIGKATAKYFFYSNIMNFFKTEITLANGEIRKRPLIETNGETGEIVWDKGRDFATVRKVLSMPQVNIVKKTEVQTGGFSKESILPKRNSDKLIARKKDWDPKKYGGFDSPTVAYSVLVVAKVEKGKSKKLKSVKELLGITIMERSSFEKNPIDFLEAKGYKEVKKDLIIKLPKYSLFELENGRKRMLASAGELQKGNELALPSKYVNFLYLASHYEKLKGSPEDNEQKQLFVEQHKHYLDEIIEQISEFSKRVILADANLDKVLSAYNKHRDKPIREQAENIIHLFTLTNLGAPAAFKYFDTTIDRKRYTSTKEVLDATLIHQSITGLYETRIDLSQLGGDGGEAAAKGGGGGSGGVLNLEEEYRLHEKPVPSSIDPSWLQLFPTVWAERAGMGLANQVPPVVVELRSGASPVAVRQYPMSKEAREGIRPHIQKFLDLGVLVPCRSPWNTPLLPVKKPGTNDYRPVQDLREINKRVQDIHPTVPNPYNLLSSLPPSYTWYSVLDLKDAFFCLRLHPNSQPLFAFEWKDPEKGNTGQLTWTRLPQGFKNSPTLFNEALHRDLAPFRALNPQVVLLQYVDDLLVAAPTYEDCKKGTQKLLQELSKLGYRVSAKKAQLCQREVTYLGYLLKEGKRWLTPARKATVMKIPVPTTPRQVREFLGKAGFCRLFIPGFASLAAPLYPLTKPSIPFIWTEEHQQAFDHIKKALLSAPALALPDLTKPFTLYIDERAGVARGVLTQTLGPWRRPVAYLSKKLDPVASGWPTCLKAVAAVALLLKDADKLTLGQNVTVIASHSLESIVRQPPDRWMTNARMTHYQSLLLNERVSFAPPAVLNPATLLPVESEATPVHRCSEILAEETGTRRDLEDQPLPGVPTWYTDGSSFITEGKRRAGAPIVDGKRTVWASSLPEGTSAQKAELVALTQALRLAEGKNINIYTDSRYAFATAHIHGAIYKQRGWLTSAGKDIKNKEEILALLEAIHLPRRVAIIHCPGHQRGSNPVATGNRRADEAAKQAALSTRVLAGTTKPAGKRTADGSEFEKRTADGSEFESPKKKAKVE

SEQ ID NO: 1452 - protein, 2098 aa, synthetic construct
MPAAKRVKLDGGDKKYSIGLDIGTNSVGWAVITDEYKVPSKKFKVLGNTDRHSIKKNLIGALLFDSGETAEATRLKRTARRRYTRRKNRICYLQEIFSNEMAKVDDSFFHRLEESFLVEEDKKHERHPIFGNIVDEVAYHEKYPTIYHLRKKLVDSTDKADLRLIYLALAHMIKFRGHFLIEGDLNPDNSDVDKLFIQLVQTYNQLFEENPINASGVDAKAILSARLSKSRRLENLIAQLPGEKKNGLFGNLIALSLGLTPNFKSNFDLAEDAKLQLSKDTYDDDLDNLLAQIGDQYADLFLAAKNLSDAILLSDILRVNTEITKAPLSASMIKRYDEHHQDLTLLKALVRQQLPEKYKEIFFDQSKNGYAGYIDGGASQEEFYKFIKPILEKMDGTEELLVKLNREDLLRKQRTFDNGSIPHQIHLGELHAILRRQEDFYPFLKDNREKIEKILTFRIPYYVGPLARGNSRFAWMTRKSEETITPWNFEEVVDKGASAQSFIERMTNFDKNLPNEKVLPKHSLLYEYFTVYNELTKVKYVTEGMRKPAFLSGEQKKAIVDLLFKTNRKVTVKQLKEDYFKKIECFDSVEISGVEDRFNASLGTYHDLLKIIKDKDFLDNEENEDILEDIVLTLTLFEDREMIEERLKTYAHLFDDKVMKQLKRRRYTGWGRLSRKLINGIRDKQSGKTILDFLKSDGFANRNFMQLIHDDSLTFKEDIQKAQVSGQGDSLHEHIANLAGSPAIKKGILQTVKVVDELVKVMGRHKPENIVIEMARENQTTQKGQKNSRERMKRIEEGIKELGSQILKEHPVENTQLQNEKLYLYYLQNGRDMYVDQELDINRLSDYDVDHIVPQSFLKDDSIDNKVLTRSDKARGKSDNVPSEEVVKKMKNYWRQLLNAKLITQRKFDNLTKAERGGLSELDKAGFIKRQLVETRQITKHVAQILDSRMNTKYDENDKLIREVKVITLKSKLVSDFRKDFQFYKVREINNYHHAHDAYLNAVVGTALIKKYPKLESEFVYGDYKVYDVRKMIAKSEQEIGKATAKYFFYSNIMNFFKTEITLANGEIRKRPLIETNGETGEIVWDKGRDFATVRKVLSMPQVNIVKKTEVQTGGFSKESILPKRNSDKLIARKKDWDPKKYGGFDSPTVAYSVLVVAKVEKGKSKKLKSVKELLGITIMERSSFEKNPIDFLEAKGYKEVKKDLIIKLPKYSLFELENGRKRMLASAGELQKGNELALPSKYVNFLYLASHYEKLKGSPEDNEQKQLFVEQHKHYLDEIIEQISEFSKRVILADANLDKVLSAYNKHRDKPIREQAENIIHLFTLTNLGAPAAFKYFDTTIDRKRYTSTKEVLDATLIHQSITGLYETRIDLSQLGGDGGEAAAKEAAAKEAAAKGGVLNLEEEYRLHEKPVPSSIDPSWLQLFPTVWAERAGMGLANQVPPVVVELRSGASPVAVRQYPMSKEAREGIRPHIQKFLDLGVLVPCRSPWNTPLLPVKKPGTNDYRPVQDLREINKRVQDIHPTVPNPYNLLSSLPPSYTWYSVLDLKDAFFCLRLHPNSQPLFAFEWKDPEKGNTGQLTWTRLPQGFKNSPTLFNEALHRDLAPFRALNPQVVLLQYVDDLLVAAPTYEDCKKGTQKLLQELSKLGYRVSAKKAQLCQREVTYLGYLLKEGKRWLTPARKATVMKIPVPTTPRQVREFLGKAGFCRLFIPGFASLAAPLYPLTKPSIPFIWTEEHQQAFDHIKKALLSAPALALPDLTKPFTLYIDERAGVARGVLTQTLGPWRRPVAYLSKKLDPVASGWPTCLKAVAAVALLLKDADKLTLGQNVTVIASHSLESIVRQPPDRWMTNARMTHYQSLLLNERVSFAPPAVLNPATLLPVESEATPVHRCSEILAEETGTRRDLEDQPLPGVPTWYTDGSSFITEGKRRAGAPIVDGKRTVWASSLPEGTSAQKAELVALTQALRLAEGKNINIYTDSRYAFATAHIHGAIYKQRGWLTSAGKDIKNKEEILALLEAIHLPRRVAIIHCPGHQRGSNPVATGNRRADEAAKQAALSTRVLAGTTKPAGKRTADGSEFEKRTADGSEFESPKKKAKVE

SEQ ID NO: 1453 - protein, 2094 aa, synthetic construct
MPAAKRVKLDGGDKKYSIGLDIGTNSVGWAVITDEYKVPSKKFKVLGNTDRHSIKKNLIGALLFDSGETAEATRLKRTARRRYTRRKNRICYLQEIFSNEMAKVDDSFFHRLEESFLVEEDKKHERHPIFGNIVDEVAYHEKYPTIYHLRKKLVDSTDKADLRLIYLALAHMIKFRGHFLIEGDLNPDNSDVDKLFIQLVQTYNQLFEENPINASGVDAKAILSARLSKSRRLENLIAQLPGEKKNGLFGNLIALSLGLTPNFKSNFDLAEDAKLQLSKDTYDDDLDNLLAQIGDQYADLFLAAKNLSDAILLSDILRVNTEITKAPLSASMIKRYDEHHQDLTLLKALVRQQLPEKYKEIFFDQSKNGYAGYIDGGASQEEFYKFIKPILEKMDGTEELLVKLNREDLLRKQRTFDNGSIPHQIHLGELHAILRRQEDFYPFLKDNREKIEKILTFRIPYYVGPLARGNSRFAWMTRKSEETITPWNFEEVVDKGASAQSFIERMTNFDKNLPNEKVLPKHSLLYEYFTVYNELTKVKYVTEGMRKPAFLSGEQKKAIVDLLFKTNRKVTVKQLKEDYFKKIECFDSVEISGVEDRFNASLGTYHDLLKIIKDKDFLDNEENEDILEDIVLTLTLFEDREMIEERLKTYAHLFDDKVMKQLKRRRYTGWGRLSRKLINGIRDKQSGKTILDFLKSDGFANRNFMQLIHDDSLTFKEDIQKAQVSGQGDSLHEHIANLAGSPAIKKGILQTVKVVDELVKVMGRHKPENIVIEMARENQTTQKGQKNSRERMKRIEEGIKELGSQILKEHPVENTQLQNEKLYLYYLQNGRDMYVDQELDINRLSDYDVDHIVPQSFLKDDSIDNKVLTRSDKARGKSDNVPSEEVVKKMKNYWRQLLNAKLITQRKFDNLTKAERGGLSELDKAGFIKRQLVETRQITKHVAQILDSRMNTKYDENDKLIREVKVITLKSKLVSDFRKDFQFYKVREINNYHHAHDAYLNAVVGTALIKKYPKLESEFVYGDYKVYDVRKMIAKSEQEIGKATAKYFFYSNIMNFFKTEITLANGEIRKRPLIETNGETGEIVWDKGRDFATVRKVLSMPQVNIVKKTEVQTGGFSKESILPKRNSDKLIARKKDWDPKKYGGFDSPTVAYSVLVVAKVEKGKSKKLKSVKELLGITIMERSSFEKNPIDFLEAKGYKEVKKDLIIKLPKYSLFELENGRKRMLASAGELQKGNELALPSKYVNFLYLASHYEKLKGSPEDNEQKQLFVEQHKHYLDEIIEQISEFSKRVILADANLDKVLSAYNKHRDKPIREQAENIIHLFTLTNLGAPAAFKYFDTTIDRKRYTSTKEVLDATLIHQSITGLYETRIDLSQLGGDGGPAPAPAPAPAPGGVLNLEEEYRLHEKPVPSSIDPSWLQLFPTVWAERAGMGLANQVPPVVVELRSGASPVAVRQYPMSKEAREGIRPHIQKFLDLGVLVPCRSPWNTPLLPVKKPGTNDYRPVQDLREINKRVQDIHPTVPNPYNLLSSLPPSYTWYSVLDLKDAFFCLRLHPNSQPLFAFEWKDPEKGNTGQLTWTRLPQGFKNSPTLFNEALHRDLAPFRALNPQVVLLQYVDDLLVAAPTYEDCKKGTQKLLQELSKLGYRVSAKKAQLCQREVTYLGYLLKEGKRWLTPARKATVMKIPVPTTPRQVREFLGKAGFCRLFIPGFASLAAPLYPLTKPSIPFIWTEEHQQAFDHIKKALLSAPALALPDLTKPFTLYIDERAGVARGVLTQTLGPWRRPVAYLSKKLDPVASGWPTCLKAVAAVALLLKDADKLTLGQNVTVIASHSLESIVRQPPDRWMTNARMTHYQSLLLNERVSFAPPAVLNPATLLPVESEATPVHRCSEILAEETGTRRDLEDQPLPGVPTWYTDGSSFITEGKRRAGAPIVDGKRTVWASSLPEGTSAQKAELVALTQALRLAEGKNINIYTDSRYAFATAHIHGAIYKQRGWLTSAGKDIKNKEEILALLEAIHLPRRVAIIHCPGHQRGSNPVATGNRRADEAAKQAALSTRVLAGTTKPAGKRTADGSEFEKRTADGSEFESPKKKAKVE

SEQ ID NO: 1454 - protein, 2113 aa, synthetic construct
MPAAKRVKLDGGDKKYSIGLDIGTNSVGWAVITDEYKVPSKKFKVLGNTDRHSIKKNLIGALLFDSGETAEATRLKRTARRRYTRRKNRICYLQEIFSNEMAKVDDSFFHRLEESFLVEEDKKHERHPIFGNIVDEVAYHEKYPTIYHLRKKLVDSTDKADLRLIYLALAHMIKFRGHFLIEGDLNPDNSDVDKLFIQLVQTYNQLFEENPINASGVDAKAILSARLSKSRRLENLIAQLPGEKKNGLFGNLIALSLGLTPNFKSNFDLAEDAKLQLSKDTYDDDLDNLLAQIGDQYADLFLAAKNLSDAILLSDILRVNTEITKAPLSASMIKRYDEHHQDLTLLKALVRQQLPEKYKEIFFDQSKNGYAGYIDGGASQEEFYKFIKPILEKMDGTEELLVKLNREDLLRKQRTFDNGSIPHQIHLGELHAILRRQEDFYPFLKDNREKIEKILTFRIPYYVGPLARGNSRFAWMTRKSEETITPWNFEEVVDKGASAQSFIERMTNFDKNLPNEKVLPKHSLLYEYFTVYNELTKVKYVTEGMRKPAFLSGEQKKAIVDLLFKTNRKVTVKQLKEDYFKKIECFDSVEISGVEDRFNASLGTYHDLLKIIKDKDFLDNEENEDILEDIVLTLTLFEDREMIEERLKTYAHLFDDKVMKQLKRRRYTGWGRLSRKLINGIRDKQSGKTILDFLKSDGFANRNFMQLIHDDSLTFKEDIQKAQVSGQGDSLHEHIANLAGSPAIKKGILQTVKVVDELVKVMGRHKPENIVIEMARENQTTQKGQKNSRERMKRIEEGIKELGSQILKEHPVENTQLQNEKLYLYYLQNGRDMYVDQELDINRLSDYDVDHIVPQSFLKDDSIDNKVLTRSDKARGKSDNVPSEEVVKKMKNYWRQLLNAKLITQRKFDNLTKAERGGLSELDKAGFIKRQLVETRQITKHVAQILDSRMNTKYDENDKLIREVKVITLKSKLVSDFRKDFQFYKVREINNYHHAHDAYLNAVVGTALIKKYPKLESEFVYGDYKVYDVRKMIAKSEQEIGKATAKYFFYSNIMNFFKTEITLANGEIRKRPLIETNGETGEIVWDKGRDFATVRKVLSMPQVNIVKKTEVQTGGFSKESILPKRNSDKLIARKKDWDPKKYGGFDSPTVAYSVLVVAKVEKGKSKKLKSVKELLGITIMERSSFEKNPIDFLEAKGYKEVKKDLIIKLPKYSLFELENGRKRMLASAGELQKGNELALPSKYVNFLYLASHYEKLKGSPEDNEQKQLFVEQHKHYLDEIIEQISEFSKRVILADANLDKVLSAYNKHRDKPIREQAENIIHLFTLTNLGAPAAFKYFDTTIDRKRYTSTKEVLDATLIHQSITGLYETRIDLSQLGGDGGEAAAKEAAAKEAAAKEAAAKEAAAKEAAAKGGVLNLEEEYRLHEKPVPSSIDPSWLQLFPTVWAERAGMGLANQVPPVVVELRSGASPVAVRQYPMSKEAREGIRPHIQKFLDLGVLVPCRSPWNTPLLPVKKPGTNDYRPVQDLREINKRVQDIHPTVPNPYNLLSSLPPSYTWYSVLDLKDAFFCLRLHPNSQPLFAFEWKDPEKGNTGQLTWTRLPQGFKNSPTLFNEALHRDLAPFRALNPQVVLLQYVDDLLVAAPTYEDCKKGTQKLLQELSKLGYRVSAKKAQLCQREVTYLGYLLKEGKRWLTPARKATVMKIPVPTTPRQVREFLGKAGFCRLFIPGFASLAAPLYPLTKPSIPFIWTEEHQQAFDHIKKALLSAPALALPDLTKPFTLYIDERAGVARGVLTQTLGPWRRPVAYLSKKLDPVASGWPTCLKAVAAVALLLKDADKLTLGQNVTVIASHSLESIVRQPPDRWMTNARMTHYQSLLLNERVSFAPPAVLNPATLLPVESEATPVHRCSEILAEETGTRRDLEDQPLPGVPTWYTDGSSFITEGKRRAGAPIVDGKRTVWASSLPEGTSAQKAELVALTQALRLAEGKNINIYTDSRYAFATAHIHGAIYKQRGWLTSAGKDIKNKEEILALLEAIHLPRRVAIIHCPGHQRGSNPVATGNRRADEAAKQAALSTRVLAGTTKPAGKRTADGSEFEKRTADGSEFESPKKKAKVE

SEQ ID NO: 1455 - protein, 2094 aa, synthetic construct
MPAAKRVKLDGGDKKYSIGLDIGTNSVGWAVITDEYKVPSKKFKVLGNTDRHSIKKNLIGALLFDSGETAEATRLKRTARRRYTRRKNRICYLQEIFSNEMAKVDDSFFHRLEESFLVEEDKKHERHPIFGNIVDEVAYHEKYPTIYHLRKKLVDSTDKADLRLIYLALAHMIKFRGHFLIEGDLNPDNSDVDKLFIQLVQTYNQLFEENPINASGVDAKAILSARLSKSRRLENLIAQLPGEKKNGLFGNLIALSLGLTPNFKSNFDLAEDAKLQLSKDTYDDDLDNLLAQIGDQYADLFLAAKNLSDAILLSDILRVNTEITKAPLSASMIKRYDEHHQDLTLLKALVRQQLPEKYKEIFFDQSKNGYAGYIDGGASQEEFYKFIKPILEKMDGTEELLVKLNREDLLRKQRTFDNGSIPHQIHLGELHAILRRQEDFYPFLKDNREKIEKILTFRIPYYVGPLARGNSRFAWMTRKSEETITPWNFEEVVDKGASAQSFIERMTNFDKNLPNEKVLPKHSLLYEYFTVYNELTKVKYVTEGMRKPAFLSGEQKKAIVDLLFKTNRKVTVKQLKEDYFKKIECFDSVEISGVEDRFNASLGTYHDLLKIIKDKDFLDNEENEDILEDIVLTLTLFEDREMIEERLKTYAHLFDDKVMKQLKRRRYTGWGRLSRKLINGIRDKQSGKTILDFLKSDGFANRNFMQLIHDDSLTFKEDIQKAQVSGQGDSLHEHIANLAGSPAIKKGILQTVKVVDELVKVMGRHKPENIVIEMARENQTTQKGQKNSRERMKRIEEGIKELGSQILKEHPVENTQLQNEKLYLYYLQNGRDMYVDQELDINRLSDYDVDHIVPQSFLKDDSIDNKVLTRSDKARGKSDNVPSEEVVKKMKNYWRQLLNAKLITQRKFDNLTKAERGGLSELDKAGFIKRQLVETRQITKHVAQILDSRMNTKYDENDKLIREVKVITLKSKLVSDFRKDFQFYKVREINNYHHAHDAYLNAVVGTALIKKYPKLESEFVYGDYKVYDVRKMIAKSEQEIGKATAKYFFYSNIMNFFKTEITLANGEIRKRPLIETNGETGEIVWDKGRDFATVRKVLSMPQVNIVKKTEVQTGGFSKESILPKRNSDKLIARKKDWDPKKYGGFDSPTVAYSVLVVAKVEKGKSKKLKSVKELLGITIMERSSFEKNPIDFLEAKGYKEVKKDLIIKLPKYSLFELENGRKRMLASAGELQKGNELALPSKYVNFLYLASHYEKLKGSPEDNEQKQLFVEQHKHYLDEIIEQISEFSKRVILADANLDKVLSAYNKHRDKPIREQAENIIHLFTLTNLGAPAAFKYFDTTIDRKRYTSTKEVLDATLIHQSITGLYETRIDLSQLGGDGGEAAAKGGGGSSGGVLNLEEEYRLHEKPVPSSIDPSWLQLFPTVWAERAGMGLANQVPPVVVELRSGASPVAVRQYPMSKEAREGIRPHIQKFLDLGVLVPCRSPWNTPLLPVKKPGTNDYRPVQDLREINKRVQDIHPTVPNPYNLLSSLPPSYTWYSVLDLKDAFFCLRLHPNSQPLFAFEWKDPEKGNTGQLTWTRLPQGFKNSPTLFNEALHRDLAPFRALNPQVVLLQYVDDLLVAAPTYEDCKKGTQKLLQELSKLGYRVSAKKAQLCQREVTYLGYLLKEGKRWLTPARKATVMKIPVPTTPRQVREFLGKAGFCRLFIPGFASLAAPLYPLTKPSIPFIWTEEHQQAFDHIKKALLSAPALALPDLTKPFTLYIDERAGVARGVLTQTLGPWRRPVAYLSKKLDPVASGWPTCLKAVAAVALLLKDADKLTLGQNVTVIASHSLESIVRQPPDRWMTNARMTHYQSLLLNERVSFAPPAVLNPATLLPVESEATPVHRCSEILAEETGTRRDLEDQPLPGVPTWYTDGSSFITEGKRRAGAPIVDGKRTVWASSLPEGTSAQKAELVALTQALRLAEGKNINIYTDSRYAFATAHIHGAIYKQRGWLTSAGKDIKNKEEILALLEAIHLPRRVAIIHCPGHQRGSNPVATGNRRADEAAKQAALSTRVLAGTTKPAGKRTADGSEFEKRTADGSEFESPKKKAKVE

SEQ ID NO: 1456 - protein, 2094 aa, synthetic construct
MPAAKRVKLDGGDKKYSIGLDIGTNSVGWAVITDEYKVPSKKFKVLGNTDRHSIKKNLIGALLFDSGETAEATRLKRTARRRYTRRKNRICYLQEIFSNEMAKVDDSFFHRLEESFLVEEDKKHERHPIFGNIVDEVAYHEKYPTIYHLRKKLVDSTDKADLRLIYLALAHMIKFRGHFLIEGDLNPDNSDVDKLFIQLVQTYNQLFEENPINASGVDAKAILSARLSKSRRLENLIAQLPGEKKNGLFGNLIALSLGLTPNFKSNFDLAEDAKLQLSKDTYDDDLDNLLAQIGDQYADLFLAAKNLSDAILLSDILRVNTEITKAPLSASMIKRYDEHHQDLTLLKALVRQQLPEKYKEIFFDQSKNGYAGYIDGGASQEEFYKFIKPILEKMDGTEELLVKLNREDLLRKQRTFDNGSIPHQIHLGELHAILRRQEDFYPFLKDNREKIEKILTFRIPYYVGPLARGNSRFAWMTRKSEETITPWNFEEVVDKGASAQSFIERMTNFDKNLPNEKVLPKHSLLYEYFTVYNELTKVKYVTEGMRKPAFLSGEQKKAIVDLLFKTNRKVTVKQLKEDYFKKIECFDSVEISGVEDRFNASLGTYHDLLKIIKDKDFLDNEENEDILEDIVLTLTLFEDREMIEERLKTYAHLFDDKVMKQLKRRRYTGWGRLSRKLINGIRDKQSGKTILDFLKSDGFANRNFMQLIHDDSLTFKEDIQKAQVSGQGDSLHEHIANLAGSPAIKKGILQTVKVVDELVKVMGRHKPENIVIEMARENQTTQKGQKNSRERMKRIEEGIKELGSQILKEHPVENTQLQNEKLYLYYLQNGRDMYVDQELDINRLSDYDVDHIVPQSFLKDDSIDNKVLTRSDKARGKSDNVPSEEVVKKMKNYWRQLLNAKLITQRKFDNLTKAERGGLSELDKAGFIKRQLVETRQITKHVAQILDSRMNTKYDENDKLIREVKVITLKSKLVSDFRKDFQFYKVREINNYHHAHDAYLNAVVGTALIKKYPKLESEFVYGDYKVYDVRKMIAKSEQEIGKATAKYFFYSNIMNFFKTEITLANGEIRKRPLIETNGETGEIVWDKGRDFATVRKVLSMPQVNIVKKTEVQTGGFSKESILPKRNSDKLIARKKDWDPKKYGGFDSPTVAYSVLVVAKVEKGKSKKLKSVKELLGITIMERSSFEKNPIDFLEAKGYKEVKKDLIIKLPKYSLFELENGRKRMLASAGELQKGNELALPSKYVNFLYLASHYEKLKGSPEDNEQKQLFVEQHKHYLDEIIEQISEFSKRVILADANLDKVLSAYNKHRDKPIREQAENIIHLFTLTNLGAPAAFKYFDTTIDRKRYTSTKEVLDATLIHQSITGLYETRIDLSQLGGDGGGGGGGSEAAAKGGVLNLEEEYRLHEKPVPSSIDPSWLQLFPTVWAERAGMGLANQVPPVVVELRSGASPVAVRQYPMSKEAREGIRPHIQKFLDLGVLVPCRSPWNTPLLPVKKPGTNDYRPVQDLREINKRVQDIHPTVPNPYNLLSSLPPSYTWYSVLDLKDAFFCLRLHPNSQPLFAFEWKDPEKGNTGQLTWTRLPQGFKNSPTLFNEALHRDLAPFRALNPQVVLLQYVDDLLVAAPTYEDCKKGTQKLLQELSKLGYRVSAKKAQLCQREVTYLGYLLKEGKRWLTPARKATVMKIPVPTTPRQVREFLGKAGFCRLFIPGFASLAAPLYPLTKPSIPFIWTEEHQQAFDHIKKALLSAPALALPDLTKPFTLYIDERAGVARGVLTQTLGPWRRPVAYLSKKLDPVASGWPTCLKAVAAVALLLKDADKLTLGQNVTVIASHSLESIVRQPPDRWMTNARMTHYQSLLLNERVSFAPPAVLNPATLLPVESEATPVHRCSEILAEETGTRRDLEDQPLPGVPTWYTDGSSFITEGKRRAGAPIVDGKRTVWASSLPEGTSAQKAELVALTQALRLAEGKNINIYTDSRYAFATAHIHGAIYKQRGWLTSAGKDIKNKEEILALLEAIHLPRRVAIIHCPGHQRGSNPVATGNRRADEAAKQAALSTRVLAGTTKPAGKRTADGSEFEKRTADGSEFESPKKKAKVE

SEQ ID NO: 1457 - protein, 2094 aa, synthetic construct
MPAAKRVKLDGGDKKYSIGLDIGTNSVGWAVITDEYKVPSKKFKVLGNTDRHSIKKNLIGALLFDSGETAEATRLKRTARRRYTRRKNRICYLQEIFSNEMAKVDDSFFHRLEESFLVEEDKKHERHPIFGNIVDEVAYHEKYPTIYHLRKKLVDSTDKADLRLIYLALAHMIKFRGHFLIEGDLNPDNSDVDKLFIQLVQTYNQLFEENPINASGVDAKAILSARLSKSRRLENLIAQLPGEKKNGLFGNLIALSLGLTPNFKSNFDLAEDAKLQLSKDTYDDDLDNLLAQIGDQYADLFLAAKNLSDAILLSDILRVNTEITKAPLSASMIKRYDEHHQDLTLLKALVRQQLPEKYKEIFFDQSKNGYAGYIDGGASQEEFYKFIKPILEKMDGTEELLVKLNREDLLRKQRTFDNGSIPHQIHLGELHAILRRQEDFYPFLKDNREKIEKILTFRIPYYVGPLARGNSRFAWMTRKSEETITPWNFEEVVDKGASAQSFIERMTNFDKNLPNEKVLPKHSLLYEYFTVYNELTKVKYVTEGMRKPAFLSGEQKKAIVDLLFKTNRKVTVKQLKEDYFKKIECFDSVEISGVEDRFNASLGTYHDLLKIIKDKDFLDNEENEDILEDIVLTLTLFEDREMIEERLKTYAHLFDDKVMKQLKRRRYTGWGRLSRKLINGIRDKQSGKTILDFLKSDGFANRNFMQLIHDDSLTFKEDIQKAQVSGQGDSLHEHIANLAGSPAIKKGILQTVKVVDELVKVMGRHKPENIVIEMARENQTTQKGQKNSRERMKRIEEGIKELGSQILKEHPVENTQLQNEKLYLYYLQNGRDMYVDQELDINRLSDYDVDHIVPQSFLKDDSIDNKVLTRSDKARGKSDNVPSEEVVKKMKNYWRQLLNAKLITQRKFDNLTKAERGGLSELDKAGFIKRQLVETRQITKHVAQILDSRMNTKYDENDKLIREVKVITLKSKLVSDFRKDFQFYKVREINNYHHAHDAYLNAVVGTALIKKYPKLESEFVYGDYKVYDVRKMIAKSEQEIGKATAKYFFYSNIMNFFKTEITLANGEIRKRPLIETNGETGEIVWDKGRDFATVRKVLSMPQVNIVKKTEVQTGGFSKESILPKRNSDKLIARKKDWDPKKYGGFDSPTVAYSVLVVAKVEKGKSKKLKSVKELLGITIMERSSFEKNPIDFLEAKGYKEVKKDLIIKLPKYSLFELENGRKRMLASAGELQKGNELALPSKYVNFLYLASHYEKLKGSPEDNEQKQLFVEQHKHYLDEIIEQISEFSKRVILADANLDKVLSAYNKHRDKPIREQAENIIHLFTLTNLGAPAAFKYFDTTIDRKRYTSTKEVLDATLIHQSITGLYETRIDLSQLGGDGGGSSPAPEAAAKGGVLNLEEEYRLHEKPVPSSIDPSWLQLFPTVWAERAGMGLANQVPPVVVELRSGASPVAVRQYPMSKEAREGIRPHIQKFLDLGVLVPCRSPWNTPLLPVKKPGTNDYRPVQDLREINKRVQDIHPTVPNPYNLLSSLPPSYTWYSVLDLKDAFFCLRLHPNSQPLFAFEWKDPEKGNTGQLTWTRLPQGFKNSPTLFNEALHRDLAPFRALNPQVVLLQYVDDLLVAAPTYEDCKKGTQKLLQELSKLGYRVSAKKAQLCQREVTYLGYLLKEGKRWLTPARKATVMKIPVPTTPRQVREFLGKAGFCRLFIPGFASLAAPLYPLTKPSIPFIWTEEHQQAFDHIKKALLSAPALALPDLTKPFTLYIDERAGVARGVLTQTLGPWRRPVAYLSKKLDPVASGWPTCLKAVAAVALLLKDADKLTLGQNVTVIASHSLESIVRQPPDRWMTNARMTHYQSLLLNERVSFAPPAVLNPATLLPVESEATPVHRCSEILAEETGTRRDLEDQPLPGVPTWYTDGSSFITEGKRRAGAPIVDGKRTVWASSLPEGTSAQKAELVALTQALRLAEGKNINIYTDSRYAFATAHIHGAIYKQRGWLTSAGKDIKNKEEILALLEAIHLPRRVAIIHCPGHQRGSNPVATGNRRADEAAKQAALSTRVLAGTTKPAGKRTADGSEFEKRTADGSEFESPKKKAKVE

SEQ ID NO: 1458 - protein, 2098 aa, synthetic construct
MPAAKRVKLDGGDKKYSIGLDIGTNSVGWAVITDEYKVPSKKFKVLGNTDRHSIKKNLIGALLFDSGETAEATRLKRTARRRYTRRKNRICYLQEIFSNEMAKVDDSFFHRLEESFLVEEDKKHERHPIFGNIVDEVAYHEKYPTIYHLRKKLVDSTDKADLRLIYLALAHMIKFRGHFLIEGDLNPDNSDVDKLFIQLVQTYNQLFEENPINASGVDAKAILSARLSKSRRLENLIAQLPGEKKNGLFGNLIALSLGLTPNFKSNFDLAEDAKLQLSKDTYDDDLDNLLAQIGDQYADLFLAAKNLSDAILLSDILRVNTEITKAPLSASMIKRYDEHHQDLTLLKALVRQQLPEKYKEIFFDQSKNGYAGYIDGGASQEEFYKFIKPILEKMDGTEELLVKLNREDLLRKQRTFDNGSIPHQIHLGELHAILRRQEDFYPFLKDNREKIEKILTFRIPYYVGPLARGNSRFAWMTRKSEETITPWNFEEVVDKGASAQSFIERMTNFDKNLPNEKVLPKHSLLYEYFTVYNELTKVKYVTEGMRKPAFLSGEQKKAIVDLLFKTNRKVTVKQLKEDYFKKIECFDSVEISGVEDRFNASLGTYHDLLKIIKDKDFLDNEENEDILEDIVLTLTLFEDREMIEERLKTYAHLFDDKVMKQLKRRRYTGWGRLSRKLINGIRDKQSGKTILDFLKSDGFANRNFMQLIHDDSLTFKEDIQKAQVSGQGDSLHEHIANLAGSPAIKKGILQTVKVVDELVKVMGRHKPENIVIEMARENQTTQKGQKNSRERMKRIEEGIKELGSQILKEHPVENTQLQNEKLYLYYLQNGRDMYVDQELDINRLSDYDVDHIVPQSFLKDDSIDNKVLTRSDKARGKSDNVPSEEVVKKMKNYWRQLLNAKLITQRKFDNLTKAERGGLSELDKAGFIKRQLVETRQITKHVAQILDSRMNTKYDENDKLIREVKVITLKSKLVSDFRKDFQFYKVREINNYHHAHDAYLNAVVGTALIKKYPKLESEFVYGDYKVYDVRKMIAKSEQEIGKATAKYFFYSNIMNFFKTEITLANGEIRKRPLIETNGETGEIVWDKGRDFATVRKVLSMPQVNIVKKTEVQTGGFSKESILPKRNSDKLIARKKDWDPKKYGGFDSPTVAYSVLVVAKVEKGKSKKLKSVKELLGITIMERSSFEKNPIDFLEAKGYKEVKKDLIIKLPKYSLFELENGRKRMLASAGELQKGNELALPSKYVNFLYLASHYEKLKGSPEDNEQKQLFVEQHKHYLDEIIEQISEFSKRVILADANLDKVLSAYNKHRDKPIREQAENIIHLFTLTNLGAPAAFKYFDTTIDRKRYTSTKEVLDATLIHQSITGLYETRIDLSQLGGDGGGGGGSGGGGSGGGGSGGVLNLEEEYRLHEKPVPSSIDPSWLQLFPTVWAERAGMGLANQVPPVVVELRSGASPVAVRQYPMSKEAREGIRPHIQKFLDLGVLVPCRSPWNTPLLPVKKPGTNDYRPVQDLREINKRVQDIHPTVPNPYNLLSSLPPSYTWYSVLDLKDAFFCLRLHPNSQPLFAFEWKDPEKGNTGQLTWTRLPQGFKNSPTLFNEALHRDLAPFRALNPQVVLLQYVDDLLVAAPTYEDCKKGTQKLLQELSKLGYRVSAKKAQLCQREVTYLGYLLKEGKRWLTPARKATVMKIPVPTTPRQVREFLGKAGFCRLFIPGFASLAAPLYPLTKPSIPFIWTEEHQQAFDHIKKALLSAPALALPDLTKPFTLYIDERAGVARGVLTQTLGPWRRPVAYLSKKLDPVASGWPTCLKAVAAVALLLKDADKLTLGQNVTVIASHSLESIVRQPPDRWMTNARMTHYQSLLLNERVSFAPPAVLNPATLLPVESEATPVHRCSEILAEETGTRRDLEDQPLPGVPTWYTDGSSFITEGKRRAGAPIVDGKRTVWASSLPEGTSAQKAELVALTQALRLAEGKNINIYTDSRYAFATAHIHGAIYKQRGWLTSAGKDIKNKEEILALLEAIHLPRRVAIIHCPGHQRGSNPVATGNRRADEAAKQAALSTRVLAGTTKPAGKRTADGSEFEKRTADGSEFESPKKKAKVE

SEQ ID NO: 1459 - protein, 2094 aa, synthetic construct
MPAAKRVKLDGGDKKYSIGLDIGTNSVGWAVITDEYKVPSKKFKVLGNTDRHSIKKNLIGALLFDSGETAEATRLKRTARRRYTRRKNRICYLQEIFSNEMAKVDDSFFHRLEESFLVEEDKKHERHPIFGNIVDEVAYHEKYPTIYHLRKKLVDSTDKADLRLIYLALAHMIKFRGHFLIEGDLNPDNSDVDKLFIQLVQTYNQLFEENPINASGVDAKAILSARLSKSRRLENLIAQLPGEKKNGLFGNLIALSLGLTPNFKSNFDLAEDAKLQLSKDTYDDDLDNLLAQIGDQYADLFLAAKNLSDAILLSDILRVNTEITKAPLSASMIKRYDEHHQDLTLLKALVRQQLPEKYKEIFFDQSKNGYAGYIDGGASQEEFYKFIKPILEKMDGTEELLVKLNREDLLRKQRTFDNGSIPHQIHLGELHAILRRQEDFYPFLKDNREKIEKILTFRIPYYVGPLARGNSRFAWMTRKSEETITPWNFEEVVDKGASAQSFIERMTNFDKNLPNEKVLPKHSLLYEYFTVYNELTKVKYVTEGMRKPAFLSGEQKKAIVDLLFKTNRKVTVKQLKEDYFKKIECFDSVEISGVEDRFNASLGTYHDLLKIIKDKDFLDNEENEDILEDIVLTLTLFEDREMIEERLKTYAHLFDDKVMKQLKRRRYTGWGRLSRKLINGIRDKQSGKTILDFLKSDGFANRNFMQLIHDDSLTFKEDIQKAQVSGQGDSLHEHIANLAGSPAIKKGILQTVKVVDELVKVMGRHKPENIVIEMARENQTTQKGQKNSRERMKRIEEGIKELGSQILKEHPVENTQLQNEKLYLYYLQNGRDMYVDQELDINRLSDYDVDHIVPQSFLKDDSIDNKVLTRSDKARGKSDNVPSEEVVKKMKNYWRQLLNAKLITQRKFDNLTKAERGGLSELDKAGFIKRQLVETRQITKHVAQILDSRMNTKYDENDKLIREVKVITLKSKLVSDFRKDFQFYKVREINNYHHAHDAYLNAVVGTALIKKYPKLESEFVYGDYKVYDVRKMIAKSEQEIGKATAKYFFYSNIMNFFKTEITLANGEIRKRPLIETNGETGEIVWDKGRDFATVRKVLSMPQVNIVKKTEVQTGGFSKESILPKRNSDKLIARKKDWDPKKYGGFDSPTVAYSVLVVAKVEKGKSKKLKSVKELLGITIMERSSFEKNPIDFLEAKGYKEVKKDLIIKLPKYSLFELENGRKRMLASAGELQKGNELALPSKYVNFLYLASHYEKLKGSPEDNEQKQLFVEQHKHYLDEIIEQISEFSKRVILADANLDKVLSAYNKHRDKPIREQAENIIHLFTLTNLGAPAAFKYFDTTIDRKRYTSTKEVLDATLIHQSITGLYETRIDLSQLGGDGGPAPGGGEAAAKGGVLNLEEEYRLHEKPVPSSIDPSWLQLFPTVWAERAGMGLANQVPPVVVELRSGASPVAVRQYPMSKEAREGIRPHIQKFLDLGVLVPCRSPWNTPLLPVKKPGTNDYRPVQDLREINKRVQDIHPTVPNPYNLLSSLPPSYTWYSVLDLKDAFFCLRLHPNSQPLFAFEWKDPEKGNTGQLTWTRLPQGFKNSPTLFNEALHRDLAPFRALNPQVVLLQYVDDLLVAAPTYEDCKKGTQKLLQELSKLGYRVSAKKAQLCQREVTYLGYLLKEGKRWLTPARKATVMKIPVPTTPRQVREFLGKAGFCRLFIPGFASLAAPLYPLTKPSIPFIWTEEHQQAFDHIKKALLSAPALALPDLTKPFTLYIDERAGVARGVLTQTLGPWRRPVAYLSKKLDPVASGWPTCLKAVAAVALLLKDADKLTLGQNVTVIASHSLESIVRQPPDRWMTNARMTHYQSLLLNERVSFAPPAVLNPATLLPVESEATPVHRCSEILAEETGTRRDLEDQPLPGVPTWYTDGSSFITEGKRRAGAPIVDGKRTVWASSLPEGTSAQKAELVALTQALRLAEGKNINIYTDSRYAFATAHIHGAIYKQRGWLTSAGKDIKNKEEILALLEAIHLPRRVAIIHCPGHQRGSNPVATGNRRADEAAKQAALSTRVLAGTTKPAGKRTADGSEFEKRTADGSEFESPKKKAKVE

SEQ ID NO: 1460 - protein, 2092 aa, synthetic construct
MPAAKRVKLDGGDKKYSIGLDIGTNSVGWAVITDEYKVPSKKFKVLGNTDRHSIKKNLIGALLFDSGETAEATRLKRTARRRYTRRKNRICYLQEIFSNEMAKVDDSFFHRLEESFLVEEDKKHERHPIFGNIVDEVAYHEKYPTIYHLRKKLVDSTDKADLRLIYLALAHMIKFRGHFLIEGDLNPDNSDVDKLFIQLVQTYNQLFEENPINASGVDAKAILSARLSKSRRLENLIAQLPGEKKNGLFGNLIALSLGLTPNFKSNFDLAEDAKLQLSKDTYDDDLDNLLAQIGDQYADLFLAAKNLSDAILLSDILRVNTEITKAPLSASMIKRYDEHHQDLTLLKALVRQQLPEKYKEIFFDQSKNGYAGYIDGGASQEEFYKFIKPILEKMDGTEELLVKLNREDLLRKQRTFDNGSIPHQIHLGELHAILRRQEDFYPFLKDNREKIEKILTFRIPYYVGPLARGNSRFAWMTRKSEETITPWNFEEVVDKGASAQSFIERMTNFDKNLPNEKVLPKHSLLYEYFTVYNELTKVKYVTEGMRKPAFLSGEQKKAIVDLLFKTNRKVTVKQLKEDYFKKIECFDSVEISGVEDRFNASLGTYHDLLKIIKDKDFLDNEENEDILEDIVLTLTLFEDREMIEERLKTYAHLFDDKVMKQLKRRRYTGWGRLSRKLINGIRDKQSGKTILDFLKSDGFANRNFMQLIHDDSLTFKEDIQKAQVSGQGDSLHEHIANLAGSPAIKKGILQTVKVVDELVKVMGRHKPENIVIEMARENQTTQKGQKNSRERMKRIEEGIKELGSQILKEHPVENTQLQNEKLYLYYLQNGRDMYVDQELDINRLSDYDVDHIVPQSFLKDDSIDNKVLTRSDKARGKSDNVPSEEVVKKMKNYWRQLLNAKLITQRKFDNLTKAERGGLSELDKAGFIKRQLVETRQITKHVAQILDSRMNTKYDENDKLIREVKVITLKSKLVSDFRKDFQFYKVREINNYHHAHDAYLNAVVGTALIKKYPKLESEFVYGDYKVYDVRKMIAKSEQEIGKATAKYFFYSNIMNFFKTEITLANGEIRKRPLIETNGETGEIVWDKGRDFATVRKVLSMPQVNIVKKTEVQTGGFSKESILPKRNSDKLIARKKDWDPKKYGGFDSPTVAYSVLVVAKVEKGKSKKLKSVKELLGITIMERSSFEKNPIDFLEAKGYKEVKKDLIIKLPKYSLFELENGRKRMLASAGELQKGNELALPSKYVNFLYLASHYEKLKGSPEDNEQKQLFVEQHKHYLDEIIEQISEFSKRVILADANLDKVLSAYNKHRDKPIREQAENIIHLFTLTNLGAPAAFKYFDTTIDRKRYTSTKEVLDATLIHQSITGLYETRIDLSQLGGDGGPAPGGGGGSGGVLNLEEEYRLHEKPVPSSIDPSWLQLFPTVWAERAGMGLANQVPPVVVELRSGASPVAVRQYPMSKEAREGIRPHIQKFLDLGVLVPCRSPWNTPLLPVKKPGTNDYRPVQDLREINKRVQDIHPTVPNPYNLLSSLPPSYTWYSVLDLKDAFFCLRLHPNSQPLFAFEWKDPEKGNTGQLTWTRLPQGFKNSPTLFNEALHRDLAPFRALNPQVVLLQYVDDLLVAAPTYEDCKKGTQKLLQELSKLGYRVSAKKAQLCQREVTYLGYLLKEGKRWLTPARKATVMKIPVPTTPRQVREFLGKAGFCRLFIPGFASLAAPLYPLTKPSIPFIWTEEHQQAFDHIKKALLSAPALALPDLTKPFTLYIDERAGVARGVLTQTLGPWRRPVAYLSKKLDPVASGWPTCLKAVAAVALLLKDADKLTLGQNVTVIASHSLESIVRQPPDRWMTNARMTHYQSLLLNERVSFAPPAVLNPATLLPVESEATPVHRCSEILAEETGTRRDLEDQPLPGVPTWYTDGSSFITEGKRRAGAPIVDGKRTVWASSLPEGTSAQKAELVALTQALRLAEGKNINIYTDSRYAFATAHIHGAIYKQRGWLTSAGKDIKNKEEILALLEAIHLPRRVAIIHCPGHQRGSNPVATGNRRADEAAKQAALSTRVLAGTTKPAGKRTADGSEFEKRTADGSEFESPKKKAKVE

SEQ ID NO: 1461 - protein, 2094 aa, synthetic construct
MPAAKRVKLDGGDKKYSIGLDIGTNSVGWAVITDEYKVPSKKFKVLGNTDRHSIKKNLIGALLFDSGETAEATRLKRTARRRYTRRKNRICYLQEIFSNEMAKVDDSFFHRLEESFLVEEDKKHERHPIFGNIVDEVAYHEKYPTIYHLRKKLVDSTDKADLRLIYLALAHMIKFRGHFLIEGDLNPDNSDVDKLFIQLVQTYNQLFEENPINASGVDAKAILSARLSKSRRLENLIAQLPGEKKNGLFGNLIALSLGLTPNFKSNFDLAEDAKLQLSKDTYDDDLDNLLAQIGDQYADLFLAAKNLSDAILLSDILRVNTEITKAPLSASMIKRYDEHHQDLTLLKALVRQQLPEKYKEIFFDQSKNGYAGYIDGGASQEEFYKFIKPILEKMDGTEELLVKLNREDLLRKQRTFDNGSIPHQIHLGELHAILRRQEDFYPFLKDNREKIEKILTFRIPYYVGPLARGNSRFAWMTRKSEETITPWNFEEVVDKGASAQSFIERMTNFDKNLPNEKVLPKHSLLYEYFTVYNELTKVKYVTEGMRKPAFLSGEQKKAIVDLLFKTNRKVTVKQLKEDYFKKIECFDSVEISGVEDRFNASLGTYHDLLKIIKDKDFLDNEENEDILEDIVLTLTLFEDREMIEERLKTYAHLFDDKVMKQLKRRRYTGWGRLSRKLINGIRDKQSGKTILDFLKSDGFANRNFMQLIHDDSLTFKEDIQKAQVSGQGDSLHEHIANLAGSPAIKKGILQTVKVVDELVKVMGRHKPENIVIEMARENQTTQKGQKNSRERMKRIEEGIKELGSQILKEHPVENTQLQNEKLYLYYLQNGRDMYVDQELDINRLSDYDVDHIVPQSFLKDDSIDNKVLTRSDKARGKSDNVPSEEVVKKMKNYWRQLLNAKLITQRKFDNLTKAERGGLSELDKAGFIKRQLVETRQITKHVAQILDSRMNTKYDENDKLIREVKVITLKSKLVSDFRKDFQFYKVREINNYHHAHDAYLNAVVGTALIKKYPKLESEFVYGDYKVYDVRKMIAKSEQEIGKATAKYFFYSNIMNFFKTEITLANGEIRKRPLIETNGETGEIVWDKGRDFATVRKVLSMPQVNIVKKTEVQTGGFSKESILPKRNSDKLIARKKDWDPKKYGGFDSPTVAYSVLVVAKVEKGKSKKLKSVKELLGITIMERSSFEKNPIDFLEAKGYKEVKKDLIIKLPKYSLFELENGRKRMLASAGELQKGNELALPSKYVNFLYLASHYEKLKGSPEDNEQKQLFVEQHKHYLDEIIEQISEFSKRVILADANLDKVLSAYNKHRDKPIREQAENIIHLFTLTNLGAPAAFKYFDTTIDRKRYTSTKEVLDATLIHQSITGLYETRIDLSQLGGDGGGGGEAAAKGSSGGVLNLEEEYRLHEKPVPSSIDPSWLQLFPTVWAERAGMGLANQVPPVVVELRSGASPVAVRQYPMSKEAREGIRPHIQKFLDLGVLVPCRSPWNTPLLPVKKPGTNDYRPVQDLREINKRVQDIHPTVPNPYNLLSSLPPSYTWYSVLDLKDAFFCLRLHPNSQPLFAFEWKDPEKGNTGQLTWTRLPQGFKNSPTLFNEALHRDLAPFRALNPQVVLLQYVDDLLVAAPTYEDCKKGTQKLLQELSKLGYRVSAKKAQLCQREVTYLGYLLKEGKRWLTPARKATVMKIPVPTTPRQVREFLGKAGFCRLFIPGFASLAAPLYPLTKPSIPFIWTEEHQQAFDHIKKALLSAPALALPDLTKPFTLYIDERAGVARGVLTQTLGPWRRPVAYLSKKLDPVASGWPTCLKAVAAVALLLKDADKLTLGQNVTVIASHSLESIVRQPPDRWMTNARMTHYQSLLLNERVSFAPPAVLNPATLLPVESEATPVHRCSEILAEETGTRRDLEDQPLPGVPTWYTDGSSFITEGKRRAGAPIVDGKRTVWASSLPEGTSAQKAELVALTQALRLAEGKNINIYTDSRYAFATAHIHGAIYKQRGWLTSAGKDIKNKEEILALLEAIHLPRRVAIIHCPGHQRGSNPVATGNRRADEAAKQAALSTRVLAGTTKPAGKRTADGSEFEKRTADGSEFESPKKKAKVE

SEQ ID NO: 1462 - protein, 2088 aa, synthetic construct
MPAAKRVKLDGGDKKYSIGLDIGTNSVGWAVITDEYKVPSKKFKVLGNTDRHSIKKNLIGALLFDSGETAEATRLKRTARRRYTRRKNRICYLQEIFSNEMAKVDDSFFHRLEESFLVEEDKKHERHPIFGNIVDEVAYHEKYPTIYHLRKKLVDSTDKADLRLIYLALAHMIKFRGHFLIEGDLNPDNSDVDKLFIQLVQTYNQLFEENPINASGVDAKAILSARLSKSRRLENLIAQLPGEKKNGLFGNLIALSLGLTPNFKSNFDLAEDAKLQLSKDTYDDDLDNLLAQIGDQYADLFLAAKNLSDAILLSDILRVNTEITKAPLSASMIKRYDEHHQDLTLLKALVRQQLPEKYKEIFFDQSKNGYAGYIDGGASQEEFYKFIKPILEKMDGTEELLVKLNREDLLRKQRTFDNGSIPHQIHLGELHAILRRQEDFYPFLKDNREKIEKILTFRIPYYVGPLARGNSRFAWMTRKSEETITPWNFEEVVDKGASAQSFIERMTNFDKNLPNEKVLPKHSLLYEYFTVYNELTKVKYVTEGMRKPAFLSGEQKKAIVDLLFKTNRKVTVKQLKEDYFKKIECFDSVEISGVEDRFNASLGTYHDLLKIIKDKDFLDNEENEDILEDIVLTLTLFEDREMIEERLKTYAHLFDDKVMKQLKRRRYTGWGRLSRKLINGIRDKQSGKTILDFLKSDGFANRNFMQLIHDDSLTFKEDIQKAQVSGQGDSLHEHIANLAGSPAIKKGILQTVKVVDELVKVMGRHKPENIVIEMARENQTTQKGQKNSRERMKRIEEGIKELGSQILKEHPVENTQLQNEKLYLYYLQNGRDMYVDQELDINRLSDYDVDHIVPQSFLKDDSIDNKVLTRSDKARGKSDNVPSEEVVKKMKNYWRQLLNAKLITQRKFDNLTKAERGGLSELDKAGFIKRQLVETRQITKHVAQILDSRMNTKYDENDKLIREVKVITLKSKLVSDFRKDFQFYKVREINNYHHAHDAYLNAVVGTALIKKYPKLESEFVYGDYKVYDVRKMIAKSEQEIGKATAKYFFYSNIMNFFKTEITLANGEIRKRPLIETNGETGEIVWDKGRDFATVRKVLSMPQVNIVKKTEVQTGGFSKESILPKRNSDKLIARKKDWDPKKYGGFDSPTVAYSVLVVAKVEKGKSKKLKSVKELLGITIMERSSFEKNPIDFLEAKGYKEVKKDLIIKLPKYSLFELENGRKRMLASAGELQKGNELALPSKYVNFLYLASHYEKLKGSPEDNEQKQLFVEQHKHYLDEIIEQISEFSKRVILADANLDKVLSAYNKHRDKPIREQAENIIHLFTLTNLGAPAAFKYFDTTIDRKRYTSTKEVLDATLIHQSITGLYETRIDLSQLGGDGGGGGGSGGVLNLEEEYRLHEKPVPSSIDPSWLQLFPTVWAERAGMGLANQVPPVVVELRSGASPVAVRQYPMSKEAREGIRPHIQKFLDLGVLVPCRSPWNTPLLPVKKPGTNDYRPVQDLREINKRVQDIHPTVPNPYNLLSSLPPSYTWYSVLDLKDAFFCLRLHPNSQPLFAFEWKDPEKGNTGQLTWTRLPQGFKNSPTLFNEALHRDLAPFRALNPQVVLLQYVDDLLVAAPTYEDCKKGTQKLLQELSKLGYRVSAKKAQLCQREVTYLGYLLKEGKRWLTPARKATVMKIPVPTTPRQVREFLGKAGFCRLFIPGFASLAAPLYPLTKPSIPFIWTEEHQQAFDHIKKALLSAPALALPDLTKPFTLYIDERAGVARGVLTQTLGPWRRPVAYLSKKLDPVASGWPTCLKAVAAVALLLKDADKLTLGQNVTVIASHSLESIVRQPPDRWMTNARMTHYQSLLLNERVSFAPPAVLNPATLLPVESEATPVHRCSEILAEETGTRRDLEDQPLPGVPTWYTDGSSFITEGKRRAGAPIVDGKRTVWASSLPEGTSAQKAELVALTQALRLAEGKNINIYTDSRYAFATAHIHGAIYKQRGWLTSAGKDIKNKEEILALLEAIHLPRRVAIIHCPGHQRGSNPVATGNRRADEAAKQAALSTRVLAGTTKPAGKRTADGSEFEKRTADGSEFESPKKKAKVE

SEQ ID NO: 1463 - protein, 2094 aa, synthetic construct
MPAAKRVKLDGGDKKYSIGLDIGTNSVGWAVITDEYKVPSKKFKVLGNTDRHSIKKNLIGALLFDSGETAEATRLKRTARRRYTRRKNRICYLQEIFSNEMAKVDDSFFHRLEESFLVEEDKKHERHPIFGNIVDEVAYHEKYPTIYHLRKKLVDSTDKADLRLIYLALAHMIKFRGHFLIEGDLNPDNSDVDKLFIQLVQTYNQLFEENPINASGVDAKAILSARLSKSRRLENLIAQLPGEKKNGLFGNLIALSLGLTPNFKSNFDLAEDAKLQLSKDTYDDDLDNLLAQIGDQYADLFLAAKNLSDAILLSDILRVNTEITKAPLSASMIKRYDEHHQDLTLLKALVRQQLPEKYKEIFFDQSKNGYAGYIDGGASQEEFYKFIKPILEKMDGTEELLVKLNREDLLRKQRTFDNGSIPHQIHLGELHAILRRQEDFYPFLKDNREKIEKILTFRIPYYVGPLARGNSRFAWMTRKSEETITPWNFEEVVDKGASAQSFIERMTNFDKNLPNEKVLPKHSLLYEYFTVYNELTKVKYVTEGMRKPAFLSGEQKKAIVDLLFKTNRKVTVKQLKEDYFKKIECFDSVEISGVEDRFNASLGTYHDLLKIIKDKDFLDNEENEDILEDIVLTLTLFEDREMIEERLKTYAHLFDDKVMKQLKRRRYTGWGRLSRKLINGIRDKQSGKTILDFLKSDGFANRNFMQLIHDDSLTFKEDIQKAQVSGQGDSLHEHIANLAGSPAIKKGILQTVKVVDELVKVMGRHKPENIVIEMARENQTTQKGQKNSRERMKRIEEGIKELGSQILKEHPVENTQLQNEKLYLYYLQNGRDMYVDQELDINRLSDYDVDHIVPQSFLKDDSIDNKVLTRSDKARGKSDNVPSEEVVKKMKNYWRQLLNAKLITQRKFDNLTKAERGGLSELDKAGFIKRQLVETRQITKHVAQILDSRMNTKYDENDKLIREVKVITLKSKLVSDFRKDFQFYKVREINNYHHAHDAYLNAVVGTALIKKYPKLESEFVYGDYKVYDVRKMIAKSEQEIGKATAKYFFYSNIMNFFKTEITLANGEIRKRPLIETNGETGEIVWDKGRDFATVRKVLSMPQVNIVKKTEVQTGGFSKESILPKRNSDKLIARKKDWDPKKYGGFDSPTVAYSVLVVAKVEKGKSKKLKSVKELLGITIMERSSFEKNPIDFLEAKGYKEVKKDLIIKLPKYSLFELENGRKRMLASAGELQKGNELALPSKYVNFLYLASHYEKLKGSPEDNEQKQLFVEQHKHYLDEIIEQISEFSKRVILADANLDKVLSAYNKHRDKPIREQAENIIHLFTLTNLGAPAAFKYFDTTIDRKRYTSTKEVLDATLIHQSITGLYETRIDLSQLGGDGGGGSEAAAKGGGGGVLNLEEEYRLHEKPVPSSIDPSWLQLFPTVWAERAGMGLANQVPPVVVELRSGASPVAVRQYPMSKEAREGIRPHIQKFLDLGVLVPCRSPWNTPLLPVKKPGTNDYRPVQDLREINKRVQDIHPTVPNPYNLLSSLPPSYTWYSVLDLKDAFFCLRLHPNSQPLFAFEWKDPEKGNTGQLTWTRLPQGFKNSPTLFNEALHRDLAPFRALNPQVVLLQYVDDLLVAAPTYEDCKKGTQKLLQELSKLGYRVSAKKAQLCQREVTYLGYLLKEGKRWLTPARKATVMKIPVPTTPRQVREFLGKAGFCRLFIPGFASLAAPLYPLTKPSIPFIWTEEHQQAFDHIKKALLSAPALALPDLTKPFTLYIDERAGVARGVLTQTLGPWRRPVAYLSKKLDPVASGWPTCLKAVAAVALLLKDADKLTLGQNVTVIASHSLESIVRQPPDRWMTNARMTHYQSLLLNERVSFAPPAVLNPATLLPVESEATPVHRCSEILAEETGTRRDLEDQPLPGVPTWYTDGSSFITEGKRRAGAPIVDGKRTVWASSLPEGTSAQKAELVALTQALRLAEGKNINIYTDSRYAFATAHIHGAIYKQRGWLTSAGKDIKNKEEILALLEAIHLPRRVAIIHCPGHQRGSNPVATGNRRADEAAKQAALSTRVLAGTTKPAGKRTADGSEFEKRTADGSEFESPKKKAKVE

SEQ ID NO: 1464 - protein, 2086 aa, synthetic construct
MPAAKRVKLDGGDKKYSIGLDIGTNSVGWAVITDEYKVPSKKFKVLGNTDRHSIKKNLIGALLFDSGETAEATRLKRTARRRYTRRKNRICYLQEIFSNEMAKVDDSFFHRLEESFLVEEDKKHERHPIFGNIVDEVAYHEKYPTIYHLRKKLVDSTDKADLRLIYLALAHMIKFRGHFLIEGDLNPDNSDVDKLFIQLVQTYNQLFEENPINASGVDAKAILSARLSKSRRLENLIAQLPGEKKNGLFGNLIALSLGLTPNFKSNFDLAEDAKLQLSKDTYDDDLDNLLAQIGDQYADLFLAAKNLSDAILLSDILRVNTEITKAPLSASMIKRYDEHHQDLTLLKALVRQQLPEKYKEIFFDQSKNGYAGYIDGGASQEEFYKFIKPILEKMDGTEELLVKLNREDLLRKQRTFDNGSIPHQIHLGELHAILRRQEDFYPFLKDNREKIEKILTFRIPYYVGPLARGNSRFAWMTRKSEETITPWNFEEVVDKGASAQSFIERMTNFDKNLPNEKVLPKHSLLYEYFTVYNELTKVKYVTEGMRKPAFLSGEQKKAIVDLLFKTNRKVTVKQLKEDYFKKIECFDSVEISGVEDRFNASLGTYHDLLKIIKDKDFLDNEENEDILEDIVLTLTLFEDREMIEERLKTYAHLFDDKVMKQLKRRRYTGWGRLSRKLINGIRDKQSGKTILDFLKSDGFANRNFMQLIHDDSLTFKEDIQKAQVSGQGDSLHEHIANLAGSPAIKKGILQTVKVVDELVKVMGRHKPENIVIEMARENQTTQKGQKNSRERMKRIEEGIKELGSQILKEHPVENTQLQNEKLYLYYLQNGRDMYVDQELDINRLSDYDVDHIVPQSFLKDDSIDNKVLTRSDKARGKSDNVPSEEVVKKMKNYWRQLLNAKLITQRKFDNLTKAERGGLSELDKAGFIKRQLVETRQITKHVAQILDSRMNTKYDENDKLIREVKVITLKSKLVSDFRKDFQFYKVREINNYHHAHDAYLNAVVGTALIKKYPKLESEFVYGDYKVYDVRKMIAKSEQEIGKATAKYFFYSNIMNFFKTEITLANGEIRKRPLIETNGETGEIVWDKGRDFATVRKVLSMPQVNIVKKTEVQTGGFSKESILPKRNSDKLIARKKDWDPKKYGGFDSPTVAYSVLVVAKVEKGKSKKLKSVKELLGITIMERSSFEKNPIDFLEAKGYKEVKKDLIIKLPKYSLFELENGRKRMLASAGELQKGNELALPSKYVNFLYLASHYEKLKGSPEDNEQKQLFVEQHKHYLDEIIEQISEFSKRVILADANLDKVLSAYNKHRDKPIREQAENIIHLFTLTNLGAPAAFKYFDTTIDRKRYTSTKEVLDATLIHQSITGLYETRIDLSQLGGDGGGGSGGVLNLEEEYRLHEKPVPSSIDPSWLQLFPTVWAERAGMGLANQVPPVVVELRSGASPVAVRQYPMSKEAREGIRPHIQKFLDLGVLVPCRSPWNTPLLPVKKPGTNDYRPVQDLREINKRVQDIHPTVPNPYNLLSSLPPSYTWYSVLDLKDAFFCLRLHPNSQPLFAFEWKDPEKGNTGQLTWTRLPQGFKNSPTLFNEALHRDLAPFRALNPQVVLLQYVDDLLVAAPTYEDCKKGTQKLLQELSKLGYRVSAKKAQLCQREVTYLGYLLKEGKRWLTPARKATVMKIPVPTTPRQVREFLGKAGFCRLFIPGFASLAAPLYPLTKPSIPFIWTEEHQQAFDHIKKALLSAPALALPDLTKPFTLYIDERAGVARGVLTQTLGPWRRPVAYLSKKLDPVASGWPTCLKAVAAVALLLKDADKLTLGQNVTVIASHSLESIVRQPPDRWMTNARMTHYQSLLLNERVSFAPPAVLNPATLLPVESEATPVHRCSEILAEETGTRRDLEDQPLPGVPTWYTDGSSFITEGKRRAGAPIVDGKRTVWASSLPEGTSAQKAELVALTQALRLAEGKNINIYTDSRYAFATAHIHGAIYKQRGWLTSAGKDIKNKEEILALLEAIHLPRRVAIIHCPGHQRGSNPVATGNRRADEAAKQAALSTRVLAGTTKPAGKRTADGSEFEKRTADGSEFESPKKKAKVE

SEQ ID NO: 1465 - protein, 2091 aa, synthetic construct
MPAAKRVKLDGGDKKYSIGLDIGTNSVGWAVITDEYKVPSKKFKVLGNTDRHSIKKNLIGALLFDSGETAEATRLKRTARRRYTRRKNRICYLQEIFSNEMAKVDDSFFHRLEESFLVEEDKKHERHPIFGNIVDEVAYHEKYPTIYHLRKKLVDSTDKADLRLIYLALAHMIKFRGHFLIEGDLNPDNSDVDKLFIQLVQTYNQLFEENPINASGVDAKAILSARLSKSRRLENLIAQLPGEKKNGLFGNLIALSLGLTPNFKSNFDLAEDAKLQLSKDTYDDDLDNLLAQIGDQYADLFLAAKNLSDAILLSDILRVNTEITKAPLSASMIKRYDEHHQDLTLLKALVRQQLPEKYKEIFFDQSKNGYAGYIDGGASQEEFYKFIKPILEKMDGTEELLVKLNREDLLRKQRTFDNGSIPHQIHLGELHAILRRQEDFYPFLKDNREKIEKILTFRIPYYVGPLARGNSRFAWMTRKSEETITPWNFEEVVDKGASAQSFIERMTNFDKNLPNEKVLPKHSLLYEYFTVYNELTKVKYVTEGMRKPAFLSGEQKKAIVDLLFKTNRKVTVKQLKEDYFKKIECFDSVEISGVEDRFNASLGTYHDLLKIIKDKDFLDNEENEDILEDIVLTLTLFEDREMIEERLKTYAHLFDDKVMKQLKRRRYTGWGRLSRKLINGIRDKQSGKTILDFLKSDGFANRNFMQLIHDDSLTFKEDIQKAQVSGQGDSLHEHIANLAGSPAIKKGILQTVKVVDELVKVMGRHKPENIVIEMARENQTTQKGQKNSRERMKRIEEGIKELGSQILKEHPVENTQLQNEKLYLYYLQNGRDMYVDQELDINRLSDYDVDHIVPQSFLKDDSIDNKVLTRSDKARGKSDNVPSEEVVKKMKNYWRQLLNAKLITQRKFDNLTKAERGGLSELDKAGFIKRQLVETRQITKHVAQILDSRMNTKYDENDKLIREVKVITLKSKLVSDFRKDFQFYKVREINNYHHAHDAYLNAVVGTALIKKYPKLESEFVYGDYKVYDVRKMIAKSEQEIGKATAKYFFYSNIMNFFKTEITLANGEIRKRPLIETNGETGEIVWDKGRDFATVRKVLSMPQVNIVKKTEVQTGGFSKESILPKRNSDKLIARKKDWDPKKYGGFDSPTVAYSVLVVAKVEKGKSKKLKSVKELLGITIMERSSFEKNPIDFLEAKGYKEVKKDLIIKLPKYSLFELENGRKRMLASAGELQKGNELALPSKYVNFLYLASHYEKLKGSPEDNEQKQLFVEQHKHYLDEIIEQISEFSKRVILADANLDKVLSAYNKHRDKPIREQAENIIHLFTLTNLGAPAAFKYFDTTIDRKRYTSTKEVLDATLIHQSITGLYETRIDLSQLGGDGGGGGGGGGGGGVLNLEEEYRLHEKPVPSSIDPSWLQLFPTVWAERAGMGLANQVPPVVVELRSGASPVAVRQYPMSKEAREGIRPHIQKFLDLGVLVPCRSPWNTPLLPVKKPGTNDYRPVQDLREINKRVQDIHPTVPNPYNLLSSLPPSYTWYSVLDLKDAFFCLRLHPNSQPLFAFEWKDPEKGNTGQLTWTRLPQGFKNSPTLFNEALHRDLAPFRALNPQVVLLQYVDDLLVAAPTYEDCKKGTQKLLQELSKLGYRVSAKKAQLCQREVTYLGYLLKEGKRWLTPARKATVMKIPVPTTPRQVREFLGKAGFCRLFIPGFASLAAPLYPLTKPSIPFIWTEEHQQAFDHIKKALLSAPALALPDLTKPFTLYIDERAGVARGVLTQTLGPWRRPVAYLSKKLDPVASGWPTCLKAVAAVALLLKDADKLTLGQNVTVIASHSLESIVRQPPDRWMTNARMTHYQSLLLNERVSFAPPAVLNPATLLPVESEATPVHRCSEILAEETGTRRDLEDQPLPGVPTWYTDGSSFITEGKRRAGAPIVDGKRTVWASSLPEGTSAQKAELVALTQALRLAEGKNINIYTDSRYAFATAHIHGAIYKQRGWLTSAGKDIKNKEEILALLEAIHLPRRVAIIHCPGHQRGSNPVATGNRRADEAAKQAALSTRVLAGTTKPAGKRTADGSEFEKRTADGSEFESPKKKAKVE

SEQ ID NO: 1466 - protein, 2094 aa, synthetic construct
MPAAKRVKLDGGDKKYSIGLDIGTNSVGWAVITDEYKVPSKKFKVLGNTDRHSIKKNLIGALLFDSGETAEATRLKRTARRRYTRRKNRICYLQEIFSNEMAKVDDSFFHRLEESFLVEEDKKHERHPIFGNIVDEVAYHEKYPTIYHLRKKLVDSTDKADLRLIYLALAHMIKFRGHFLIEGDLNPDNSDVDKLFIQLVQTYNQLFEENPINASGVDAKAILSARLSKSRRLENLIAQLPGEKKNGLFGNLIALSLGLTPNFKSNFDLAEDAKLQLSKDTYDDDLDNLLAQIGDQYADLFLAAKNLSDAILLSDILRVNTEITKAPLSASMIKRYDEHHQDLTLLKALVRQQLPEKYKEIFFDQSKNGYAGYIDGGASQEEFYKFIKPILEKMDGTEELLVKLNREDLLRKQRTFDNGSIPHQIHLGELHAILRRQEDFYPFLKDNREKIEKILTFRIPYYVGPLARGNSRFAWMTRKSEETITPWNFEEVVDKGASAQSFIERMTNFDKNLPNEKVLPKHSLLYEYFTVYNELTKVKYVTEGMRKPAFLSGEQKKAIVDLLFKTNRKVTVKQLKEDYFKKIECFDSVEISGVEDRFNASLGTYHDLLKIIKDKDFLDNEENEDILEDIVLTLTLFEDREMIEERLKTYAHLFDDKVMKQLKRRRYTGWGRLSRKLINGIRDKQSGKTILDFLKSDGFANRNFMQLIHDDSLTFKEDIQKAQVSGQGDSLHEHIANLAGSPAIKKGILQTVKVVDELVKVMGRHKPENIVIEMARENQTTQKGQKNSRERMKRIEEGIKELGSQILKEHPVENTQLQNEKLYLYYLQNGRDMYVDQELDINRLSDYDVDHIVPQSFLKDDSIDNKVLTRSDKARGKSDNVPSEEVVKKMKNYWRQLLNAKLITQRKFDNLTKAERGGLSELDKAGFIKRQLVETRQITKHVAQILDSRMNTKYDENDKLIREVKVITLKSKLVSDFRKDFQFYKVREINNYHHAHDAYLNAVVGTALIKKYPKLESEFVYGDYKVYDVRKMIAKSEQEIGKATAKYFFYSNIMNFFKTEITLANGEIRKRPLIETNGETGEIVWDKGRDFATVRKVLSMPQVNIVKKTEVQTGGFSKESILPKRNSDKLIARKKDWDPKKYGGFDSPTVAYSVLVVAKVEKGKSKKLKSVKELLGITIMERSSFEKNPIDFLEAKGYKEVKKDLIIKLPKYSLFELENGRKRMLASAGELQKGNELALPSKYVNFLYLASHYEKLKGSPEDNEQKQLFVEQHKHYLDEIIEQISEFSKRVILADANLDKVLSAYNKHRDKPIREQAENIIHLFTLTNLGAPAAFKYFDTTIDRKRYTSTKEVLDATLIHQSITGLYETRIDLSQLGGDGGGSSGGGEAAAKGGVLNLEEEYRLHEKPVPSSIDPSWLQLFPTVWAERAGMGLANQVPPVVVELRSGASPVAVRQYPMSKEAREGIRPHIQKFLDLGVLVPCRSPWNTPLLPVKKPGTNDYRPVQDLREINKRVQDIHPTVPNPYNLLSSLPPSYTWYSVLDLKDAFFCLRLHPNSQPLFAFEWKDPEKGNTGQLTWTRLPQGFKNSPTLFNEALHRDLAPFRALNPQVVLLQYVDDLLVAAPTYEDCKKGTQKLLQELSKLGYRVSAKKAQLCQREVTYLGYLLKEGKRWLTPARKATVMKIPVPTTPRQVREFLGKAGFCRLFIPGFASLAAPLYPLTKPSIPFIWTEEHQQAFDHIKKALLSAPALALPDLTKPFTLYIDERAGVARGVLTQTLGPWRRPVAYLSKKLDPVASGWPTCLKAVAAVALLLKDADKLTLGQNVTVIASHSLESIVRQPPDRWMTNARMTHYQSLLLNERVSFAPPAVLNPATLLPVESEATPVHRCSEILAEETGTRRDLEDQPLPGVPTWYTDGSSFITEGKRRAGAPIVDGKRTVWASSLPEGTSAQKAELVALTQALRLAEGKNINIYTDSRYAFATAHIHGAIYKQRGWLTSAGKDIKNKEEILALLEAIHLPRRVAIIHCPGHQRGSNPVATGNRRADEAAKQAALSTRVLAGTTKPAGKRTADGSEFEKRTADGSEFESPKKKAKVE

SEQ ID NO: 1467 - protein, 2094 aa, synthetic construct
MPAAKRVKLDGGDKKYSIGLDIGTNSVGWAVITDEYKVPSKKFKVLGNTDRHSIKKNLIGALLFDSGETAEATRLKRTARRRYTRRKNRICYLQEIFSNEMAKVDDSFFHRLEESFLVEEDKKHERHPIFGNIVDEVAYHEKYPTIYHLRKKLVDSTDKADLRLIYLALAHMIKFRGHFLIEGDLNPDNSDVDKLFIQLVQTYNQLFEENPINASGVDAKAILSARLSKSRRLENLIAQLPGEKKNGLFGNLIALSLGLTPNFKSNFDLAEDAKLQLSKDTYDDDLDNLLAQIGDQYADLFLAAKNLSDAILLSDILRVNTEITKAPLSASMIKRYDEHHQDLTLLKALVRQQLPEKYKEIFFDQSKNGYAGYIDGGASQEEFYKFIKPILEKMDGTEELLVKLNREDLLRKQRTFDNGSIPHQIHLGELHAILRRQEDFYPFLKDNREKIEKILTFRIPYYVGPLARGNSRFAWMTRKSEETITPWNFEEVVDKGASAQSFIERMTNFDKNLPNEKVLPKHSLLYEYFTVYNELTKVKYVTEGMRKPAFLSGEQKKAIVDLLFKTNRKVTVKQLKEDYFKKIECFDSVEISGVEDRFNASLGTYHDLLKIIKDKDFLDNEENEDILEDIVLTLTLFEDREMIEERLKTYAHLFDDKVMKQLKRRRYTGWGRLSRKLINGIRDKQSGKTILDFLKSDGFANRNFMQLIHDDSLTFKEDIQKAQVSGQGDSLHEHIANLAGSPAIKKGILQTVKVVDELVKVMGRHKPENIVIEMARENQTTQKGQKNSRERMKRIEEGIKELGSQILKEHPVENTQLQNEKLYLYYLQNGRDMYVDQELDINRLSDYDVDHIVPQSFLKDDSIDNKVLTRSDKARGKSDNVPSEEVVKKMKNYWRQLLNAKLITQRKFDNLTKAERGGLSELDKAGFIKRQLVETRQITKHVAQILDSRMNTKYDENDKLIREVKVITLKSKLVSDFRKDFQFYKVREINNYHHAHDAYLNAVVGTALIKKYPKLESEFVYGDYKVYDVRKMIAKSEQEIGKATAKYFFYSNIMNFFKTEITLANGEIRKRPLIETNGETGEIVWDKGRDFATVRKVLSMPQVNIVKKTEVQTGGFSKESILPKRNSDKLIARKKDWDPKKYGGFDSPTVAYSVLVVAKVEKGKSKKLKSVKELLGITIMERSSFEKNPIDFLEAKGYKEVKKDLIIKLPKYSLFELENGRKRMLASAGELQKGNELALPSKYVNFLYLASHYEKLKGSPEDNEQKQLFVEQHKHYLDEIIEQISEFSKRVILADANLDKVLSAYNKHRDKPIREQAENIIHLFTLTNLGAPAAFKYFDTTIDRKRYTSTKEVLDATLIHQSITGLYETRIDLSQLGGDGGEAAAKGSSPAPGGVLNLEEEYRLHEKPVPSSIDPSWLQLFPTVWAERAGMGLANQVPPVVVELRSGASPVAVRQYPMSKEAREGIRPHIQKFLDLGVLVPCRSPWNTPLLPVKKPGTNDYRPVQDLREINKRVQDIHPTVPNPYNLLSSLPPSYTWYSVLDLKDAFFCLRLHPNSQPLFAFEWKDPEKGNTGQLTWTRLPQGFKNSPTLFNEALHRDLAPFRALNPQVVLLQYVDDLLVAAPTYEDCKKGTQKLLQELSKLGYRVSAKKAQLCQREVTYLGYLLKEGKRWLTPARKATVMKIPVPTTPRQVREFLGKAGFCRLFIPGFASLAAPLYPLTKPSIPFIWTEEHQQAFDHIKKALLSAPALALPDLTKPFTLYIDERAGVARGVLTQTLGPWRRPVAYLSKKLDPVASGWPTCLKAVAAVALLLKDADKLTLGQNVTVIASHSLESIVRQPPDRWMTNARMTHYQSLLLNERVSFAPPAVLNPATLLPVESEATPVHRCSEILAEETGTRRDLEDQPLPGVPTWYTDGSSFITEGKRRAGAPIVDGKRTVWASSLPEGTSAQKAELVALTQALRLAEGKNINIYTDSRYAFATAHIHGAIYKQRGWLTSAGKDIKNKEEILALLEAIHLPRRVAIIHCPGHQRGSNPVATGNRRADEAAKQAALSTRVLAGTTKPAGKRTADGSEFEKRTADGSEFESPKKKAKVE

SEQ ID NO: 1468 - protein, 2094 aa, synthetic construct
MPAAKRVKLDGGDKKYSIGLDIGTNSVGWAVITDEYKVPSKKFKVLGNTDRHSIKKNLIGALLFDSGETAEATRLKRTARRRYTRRKNRICYLQEIFSNEMAKVDDSFFHRLEESFLVEEDKKHERHPIFGNIVDEVAYHEKYPTIYHLRKKLVDSTDKADLRLIYLALAHMIKFRGHFLIEGDLNPDNSDVDKLFIQLVQTYNQLFEENPINASGVDAKAILSARLSKSRRLENLIAQLPGEKKNGLFGNLIALSLGLTPNFKSNFDLAEDAKLQLSKDTYDDDLDNLLAQIGDQYADLFLAAKNLSDAILLSDILRVNTEITKAPLSASMIKRYDEHHQDLTLLKALVRQQLPEKYKEIFFDQSKNGYAGYIDGGASQEEFYKFIKPILEKMDGTEELLVKLNREDLLRKQRTFDNGSIPHQIHLGELHAILRRQEDFYPFLKDNREKIEKILTFRIPYYVGPLARGNSRFAWMTRKSEETITPWNFEEVVDKGASAQSFIERMTNFDKNLPNEKVLPKHSLLYEYFTVYNELTKVKYVTEGMRKPAFLSGEQKKAIVDLLFKTNRKVTVKQLKEDYFKKIECFDSVEISGVEDRFNASLGTYHDLLKIIKDKDFLDNEENEDILEDIVLTLTLFEDREMIEERLKTYAHLFDDKVMKQLKRRRYTGWGRLSRKLINGIRDKQSGKTILDFLKSDGFANRNFMQLIHDDSLTFKEDIQKAQVSGQGDSLHEHIANLAGSPAIKKGILQTVKVVDELVKVMGRHKPENIVIEMARENQTTQKGQKNSRERMKRIEEGIKELGSQILKEHPVENTQLQNEKLYLYYLQNGRDMYVDQELDINRLSDYDVDHIVPQSFLKDDSIDNKVLTRSDKARGKSDNVPSEEVVKKMKNYWRQLLNAKLITQRKFDNLTKAERGGLSELDKAGFIKRQLVETRQITKHVAQILDSRMNTKYDENDKLIREVKVITLKSKLVSDFRKDFQFYKVREINNYHHAHDAYLNAVVGTALIKKYPKLESEFVYGDYKVYDVRKMIAKSEQEIGKATAKYFFYSNIMNFFKTEITLANGEIRKRPLIETNGETGEIVWDKGRDFATVRKVLSMPQVNIVKKTEVQTGGFSKESILPKRNSDKLIARKKDWDPKKYGGFDSPTVAYSVLVVAKVEKGKSKKLKSVKELLGITIMERSSFEKNPIDFLEAKGYKEVKKDLIIKLPKYSLFELENGRKRMLASAGELQKGNELALPSKYVNFLYLASHYEKLKGSPEDNEQKQLFVEQHKHYLDEIIEQISEFSKRVILADANLDKVLSAYNKHRDKPIREQAENIIHLFTLTNLGAPAAFKYFDTTIDRKRYTSTKEVLDATLIHQSITGLYETRIDLSQLGGDGGGGSEAAAKPAPGGVLNLEEEYRLHEKPVPSSIDPSWLQLFPTVWAERAGMGLANQVPPVVVELRSGASPVAVRQYPMSKEAREGIRPHIQKFLDLGVLVPCRSPWNTPLLPVKKPGTNDYRPVQDLREINKRVQDIHPTVPNPYNLLSSLPPSYTWYSVLDLKDAFFCLRLHPNSQPLFAFEWKDPEKGNTGQLTWTRLPQGFKNSPTLFNEALHRDLAPFRALNPQVVLLQYVDDLLVAAPTYEDCKKGTQKLLQELSKLGYRVSAKKAQLCQREVTYLGYLLKEGKRWLTPARKATVMKIPVPTTPRQVREFLGKAGFCRLFIPGFASLAAPLYPLTKPSIPFIWTEEHQQAFDHIKKALLSAPALALPDLTKPFTLYIDERAGVARGVLTQTLGPWRRPVAYLSKKLDPVASGWPTCLKAVAAVALLLKDADKLTLGQNVTVIASHSLESIVRQPPDRWMTNARMTHYQSLLLNERVSFAPPAVLNPATLLPVESEATPVHRCSEILAEETGTRRDLEDQPLPGVPTWYTDGSSFITEGKRRAGAPIVDGKRTVWASSLPEGTSAQKAELVALTQALRLAEGKNINIYTDSRYAFATAHIHGAIYKQRGWLTSAGKDIKNKEEILALLEAIHLPRRVAIIHCPGHQRGSNPVATGNRRADEAAKQAALSTRVLAGTTKPAGKRTADGSEFEKRTADGSEFESPKKKAKVE

SEQ ID NO: 1469 - protein, 2094 aa, synthetic construct
MPAAKRVKLDGGDKKYSIGLDIGTNSVGWAVITDEYKVPSKKFKVLGNTDRHSIKKNLIGALLFDSGETAEATRLKRTARRRYTRRKNRICYLQEIFSNEMAKVDDSFFHRLEESFLVEEDKKHERHPIFGNIVDEVAYHEKYPTIYHLRKKLVDSTDKADLRLIYLALAHMIKFRGHFLIEGDLNPDNSDVDKLFIQLVQTYNQLFEENPINASGVDAKAILSARLSKSRRLENLIAQLPGEKKNGLFGNLIALSLGLTPNFKSNFDLAEDAKLQLSKDTYDDDLDNLLAQIGDQYADLFLAAKNLSDAILLSDILRVNTEITKAPLSASMIKRYDEHHQDLTLLKALVRQQLPEKYKEIFFDQSKNGYAGYIDGGASQEEFYKFIKPILEKMDGTEELLVKLNREDLLRKQRTFDNGSIPHQIHLGELHAILRRQEDFYPFLKDNREKIEKILTFRIPYYVGPLARGNSRFAWMTRKSEETITPWNFEEVVDKGASAQSFIERMTNFDKNLPNEKVLPKHSLLYEYFTVYNELTKVKYVTEGMRKPAFLSGEQKKAIVDLLFKTNRKVTVKQLKEDYFKKIECFDSVEISGVEDRFNASLGTYHDLLKIIKDKDFLDNEENEDILEDIVLTLTLFEDREMIEERLKTYAHLFDDKVMKQLKRRRYTGWGRLSRKLINGIRDKQSGKTILDFLKSDGFANRNFMQLIHDDSLTFKEDIQKAQVSGQGDSLHEHIANLAGSPAIKKGILQTVKVVDELVKVMGRHKPENIVIEMARENQTTQKGQKNSRERMKRIEEGIKELGSQILKEHPVENTQLQNEKLYLYYLQNGRDMYVDQELDINRLSDYDVDHIVPQSFLKDDSIDNKVLTRSDKARGKSDNVPSEEVVKKMKNYWRQLLNAKLITQRKFDNLTKAERGGLSELDKAGFIKRQLVETRQITKHVAQILDSRMNTKYDENDKLIREVKVITLKSKLVSDFRKDFQFYKVREINNYHHAHDAYLNAVVGTALIKKYPKLESEFVYGDYKVYDVRKMIAKSEQEIGKATAKYFFYSNIMNFFKTEITLANGEIRKRPLIETNGETGEIVWDKGRDFATVRKVLSMPQVNIVKKTEVQTGGFSKESILPKRNSDKLIARKKDWDPKKYGGFDSPTVAYSVLVVAKVEKGKSKKLKSVKELLGITIMERSSFEKNPIDFLEAKGYKEVKKDLIIKLPKYSLFELENGRKRMLASAGELQKGNELALPSKYVNFLYLASHYEKLKGSPEDNEQKQLFVEQHKHYLDEIIEQISEFSKRVILADANLDKVLSAYNKHRDKPIREQAENIIHLFTLTNLGAPAAFKYFDTTIDRKRYTSTKEVLDATLIHQSITGLYETRIDLSQLGGDGGEAAAKPAPGGSGGVLNLEEEYRLHEKPVPSSIDPSWLQLFPTVWAERAGMGLANQVPPVVVELRSGASPVAVRQYPMSKEAREGIRPHIQKFLDLGVLVPCRSPWNTPLLPVKKPGTNDYRPVQDLREINKRVQDIHPTVPNPYNLLSSLPPSYTWYSVLDLKDAFFCLRLHPNSQPLFAFEWKDPEKGNTGQLTWTRLPQGFKNSPTLFNEALHRDLAPFRALNPQVVLLQYVDDLLVAAPTYEDCKKGTQKLLQELSKLGYRVSAKKAQLCQREVTYLGYLLKEGKRWLTPARKATVMKIPVPTTPRQVREFLGKAGFCRLFIPGFASLAAPLYPLTKPSIPFIWTEEHQQAFDHIKKALLSAPALALPDLTKPFTLYIDERAGVARGVLTQTLGPWRRPVAYLSKKLDPVASGWPTCLKAVAAVALLLKDADKLTLGQNVTVIASHSLESIVRQPPDRWMTNARMTHYQSLLLNERVSFAPPAVLNPATLLPVESEATPVHRCSEILAEETGTRRDLEDQPLPGVPTWYTDGSSFITEGKRRAGAPIVDGKRTVWASSLPEGTSAQKAELVALTQALRLAEGKNINIYTDSRYAFATAHIHGAIYKQRGWLTSAGKDIKNKEEILALLEAIHLPRRVAIIHCPGHQRGSNPVATGNRRADEAAKQAALSTRVLAGTTKPAGKRTADGSEFEKRTADGSEFESPKKKAKVE

SEQ ID NO: 1470 - protein, 2089 aa, synthetic construct
MPAAKRVKLDGGDKKYSIGLDIGTNSVGWAVITDEYKVPSKKFKVLGNTDRHSIKKNLIGALLFDSGETAEATRLKRTARRRYTRRKNRICYLQEIFSNEMAKVDDSFFHRLEESFLVEEDKKHERHPIFGNIVDEVAYHEKYPTIYHLRKKLVDSTDKADLRLIYLALAHMIKFRGHFLIEGDLNPDNSDVDKLFIQLVQTYNQLFEENPINASGVDAKAILSARLSKSRRLENLIAQLPGEKKNGLFGNLIALSLGLTPNFKSNFDLAEDAKLQLSKDTYDDDLDNLLAQIGDQYADLFLAAKNLSDAILLSDILRVNTEITKAPLSASMIKRYDEHHQDLTLLKALVRQQLPEKYKEIFFDQSKNGYAGYIDGGASQEEFYKFIKPILEKMDGTEELLVKLNREDLLRKQRTFDNGSIPHQIHLGELHAILRRQEDFYPFLKDNREKIEKILTFRIPYYVGPLARGNSRFAWMTRKSEETITPWNFEEVVDKGASAQSFIERMTNFDKNLPNEKVLPKHSLLYEYFTVYNELTKVKYVTEGMRKPAFLSGEQKKAIVDLLFKTNRKVTVKQLKEDYFKKIECFDSVEISGVEDRFNASLGTYHDLLKIIKDKDFLDNEENEDILEDIVLTLTLFEDREMIEERLKTYAHLFDDKVMKQLKRRRYTGWGRLSRKLINGIRDKQSGKTILDFLKSDGFANRNFMQLIHDDSLTFKEDIQKAQVSGQGDSLHEHIANLAGSPAIKKGILQTVKVVDELVKVMGRHKPENIVIEMARENQTTQKGQKNSRERMKRIEEGIKELGSQILKEHPVENTQLQNEKLYLYYLQNGRDMYVDQELDINRLSDYDVDHIVPQSFLKDDSIDNKVLTRSDKARGKSDNVPSEEVVKKMKNYWRQLLNAKLITQRKFDNLTKAERGGLSELDKAGFIKRQLVETRQITKHVAQILDSRMNTKYDENDKLIREVKVITLKSKLVSDFRKDFQFYKVREINNYHHAHDAYLNAVVGTALIKKYPKLESEFVYGDYKVYDVRKMIAKSEQEIGKATAKYFFYSNIMNFFKTEITLANGEIRKRPLIETNGETGEIVWDKGRDFATVRKVLSMPQVNIVKKTEVQTGGFSKESILPKRNSDKLIARKKDWDPKKYGGFDSPTVAYSVLVVAKVEKGKSKKLKSVKELLGITIMERSSFEKNPIDFLEAKGYKEVKKDLIIKLPKYSLFELENGRKRMLASAGELQKGNELALPSKYVNFLYLASHYEKLKGSPEDNEQKQLFVEQHKHYLDEIIEQISEFSKRVILADANLDKVLSAYNKHRDKPIREQAENIIHLFTLTNLGAPAAFKYFDTTIDRKRYTSTKEVLDATLIHQSITGLYETRIDLSQLGGDGGGGSPAPGGVLNLEEEYRLHEKPVPSSIDPSWLQLFPTVWAERAGMGLANQVPPVVVELRSGASPVAVRQYPMSKEAREGIRPHIQKFLDLGVLVPCRSPWNTPLLPVKKPGTNDYRPVQDLREINKRVQDIHPTVPNPYNLLSSLPPSYTWYSVLDLKDAFFCLRLHPNSQPLFAFEWKDPEKGNTGQLTWTRLPQGFKNSPTLFNEALHRDLAPFRALNPQVVLLQYVDDLLVAAPTYEDCKKGTQKLLQELSKLGYRVSAKKAQLCQREVTYLGYLLKEGKRWLTPARKATVMKIPVPTTPRQVREFLGKAGFCRLFIPGFASLAAPLYPLTKPSIPFIWTEEHQQAFDHIKKALLSAPALALPDLTKPFTLYIDERAGVARGVLTQTLGPWRRPVAYLSKKLDPVASGWPTCLKAVAAVALLLKDADKLTLGQNVTVIASHSLESIVRQPPDRWMTNARMTHYQSLLLNERVSFAPPAVLNPATLLPVESEATPVHRCSEILAEETGTRRDLEDQPLPGVPTWYTDGSSFITEGKRRAGAPIVDGKRTVWASSLPEGTSAQKAELVALTQALRLAEGKNINIYTDSRYAFATAHIHGAIYKQRGWLTSAGKDIKNKEEILALLEAIHLPRRVAIIHCPGHQRGSNPVATGNRRADEAAKQAALSTRVLAGTTKPAGKRTADGSEFEKRTADGSEFESPKKKAKVE

SEQ ID NO: 1471 - protein, 2092 aa, synthetic construct
MPAAKRVKLDGGDKKYSIGLDIGTNSVGWAVITDEYKVPSKKFKVLGNTDRHSIKKNLIGALLFDSGETAEATRLKRTARRRYTRRKNRICYLQEIFSNEMAKVDDSFFHRLEESFLVEEDKKHERHPIFGNIVDEVAYHEKYPTIYHLRKKLVDSTDKADLRLIYLALAHMIKFRGHFLIEGDLNPDNSDVDKLFIQLVQTYNQLFEENPINASGVDAKAILSARLSKSRRLENLIAQLPGEKKNGLFGNLIALSLGLTPNFKSNFDLAEDAKLQLSKDTYDDDLDNLLAQIGDQYADLFLAAKNLSDAILLSDILRVNTEITKAPLSASMIKRYDEHHQDLTLLKALVRQQLPEKYKEIFFDQSKNGYAGYIDGGASQEEFYKFIKPILEKMDGTEELLVKLNREDLLRKQRTFDNGSIPHQIHLGELHAILRRQEDFYPFLKDNREKIEKILTFRIPYYVGPLARGNSRFAWMTRKSEETITPWNFEEVVDKGASAQSFIERMTNFDKNLPNEKVLPKHSLLYEYFTVYNELTKVKYVTEGMRKPAFLSGEQKKAIVDLLFKTNRKVTVKQLKEDYFKKIECFDSVEISGVEDRFNASLGTYHDLLKIIKDKDFLDNEENEDILEDIVLTLTLFEDREMIEERLKTYAHLFDDKVMKQLKRRRYTGWGRLSRKLINGIRDKQSGKTILDFLKSDGFANRNFMQLIHDDSLTFKEDIQKAQVSGQGDSLHEHIANLAGSPAIKKGILQTVKVVDELVKVMGRHKPENIVIEMARENQTTQKGQKNSRERMKRIEEGIKELGSQILKEHPVENTQLQNEKLYLYYLQNGRDMYVDQELDINRLSDYDVDHIVPQSFLKDDSIDNKVLTRSDKARGKSDNVPSEEVVKKMKNYWRQLLNAKLITQRKFDNLTKAERGGLSELDKAGFIKRQLVETRQITKHVAQILDSRMNTKYDENDKLIREVKVITLKSKLVSDFRKDFQFYKVREINNYHHAHDAYLNAVVGTALIKKYPKLESEFVYGDYKVYDVRKMIAKSEQEIGKATAKYFFYSNIMNFFKTEITLANGEIRKRPLIETNGETGEIVWDKGRDFATVRKVLSMPQVNIVKKTEVQTGGFSKESILPKRNSDKLIARKKDWDPKKYGGFDSPTVAYSVLVVAKVEKGKSKKLKSVKELLGITIMERSSFEKNPIDFLEAKGYKEVKKDLIIKLPKYSLFELENGRKRMLASAGELQKGNELALPSKYVNFLYLASHYEKLKGSPEDNEQKQLFVEQHKHYLDEIIEQISEFSKRVILADANLDKVLSAYNKHRDKPIREQAENIIHLFTLTNLGAPAAFKYFDTTIDRKRYTSTKEVLDATLIHQSITGLYETRIDLSQLGGDGGGGGGSSGGSGGVLNLEEEYRLHEKPVPSSIDPSWLQLFPTVWAERAGMGLANQVPPVVVELRSGASPVAVRQYPMSKEAREGIRPHIQKFLDLGVLVPCRSPWNTPLLPVKKPGTNDYRPVQDLREINKRVQDIHPTVPNPYNLLSSLPPSYTWYSVLDLKDAFFCLRLHPNSQPLFAFEWKDPEKGNTGQLTWTRLPQGFKNSPTLFNEALHRDLAPFRALNPQVVLLQYVDDLLVAAPTYEDCKKGTQKLLQELSKLGYRVSAKKAQLCQREVTYLGYLLKEGKRWLTPARKATVMKIPVPTTPRQVREFLGKAGFCRLFIPGFASLAAPLYPLTKPSIPFIWTEEHQQAFDHIKKALLSAPALALPDLTKPFTLYIDERAGVARGVLTQTLGPWRRPVAYLSKKLDPVASGWPTCLKAVAAVALLLKDADKLTLGQNVTVIASHSLESIVRQPPDRWMTNARMTHYQSLLLNERVSFAPPAVLNPATLLPVESEATPVHRCSEILAEETGTRRDLEDQPLPGVPTWYTDGSSFITEGKRRAGAPIVDGKRTVWASSLPEGTSAQKAELVALTQALRLAEGKNINIYTDSRYAFATAHIHGAIYKQRGWLTSAGKDIKNKEEILALLEAIHLPRRVAIIHCPGHQRGSNPVATGNRRADEAAKQAALSTRVLAGTTKPAGKRTADGSEFEKRTADGSEFESPKKKAKVE

SEQ ID NO: 1472 - protein, 2092 aa, synthetic construct
MPAAKRVKLDGGDKKYSIGLDIGTNSVGWAVITDEYKVPSKKFKVLGNTDRHSIKKNLIGALLFDSGETAEATRLKRTARRRYTRRKNRICYLQEIFSNEMAKVDDSFFHRLEESFLVEEDKKHERHPIFGNIVDEVAYHEKYPTIYHLRKKLVDSTDKADLRLIYLALAHMIKFRGHFLIEGDLNPDNSDVDKLFIQLVQTYNQLFEENPINASGVDAKAILSARLSKSRRLENLIAQLPGEKKNGLFGNLIALSLGLTPNFKSNFDLAEDAKLQLSKDTYDDDLDNLLAQIGDQYADLFLAAKNLSDAILLSDILRVNTEITKAPLSASMIKRYDEHHQDLTLLKALVRQQLPEKYKEIFFDQSKNGYAGYIDGGASQEEFYKFIKPILEKMDGTEELLVKLNREDLLRKQRTFDNGSIPHQIHLGELHAILRRQEDFYPFLKDNREKIEKILTFRIPYYVGPLARGNSRFAWMTRKSEETITPWNFEEVVDKGASAQSFIERMTNFDKNLPNEKVLPKHSLLYEYFTVYNELTKVKYVTEGMRKPAFLSGEQKKAIVDLLFKTNRKVTVKQLKEDYFKKIECFDSVEISGVEDRFNASLGTYHDLLKIIKDKDFLDNEENEDILEDIVLTLTLFEDREMIEERLKTYAHLFDDKVMKQLKRRRYTGWGRLSRKLINGIRDKQSGKTILDFLKSDGFANRNFMQLIHDDSLTFKEDIQKAQVSGQGDSLHEHIANLAGSPAIKKGILQTVKVVDELVKVMGRHKPENIVIEMARENQTTQKGQKNSRERMKRIEEGIKELGSQILKEHPVENTQLQNEKLYLYYLQNGRDMYVDQELDINRLSDYDVDHIVPQSFLKDDSIDNKVLTRSDKARGKSDNVPSEEVVKKMKNYWRQLLNAKLITQRKFDNLTKAERGGLSELDKAGFIKRQLVETRQITKHVAQILDSRMNTKYDENDKLIREVKVITLKSKLVSDFRKDFQFYKVREINNYHHAHDAYLNAVVGTALIKKYPKLESEFVYGDYKVYDVRKMIAKSEQEIGKATAKYFFYSNIMNFFKTEITLANGEIRKRPLIETNGETGEIVWDKGRDFATVRKVLSMPQVNIVKKTEVQTGGFSKESILPKRNSDKLIARKKDWDPKKYGGFDSPTVAYSVLVVAKVEKGKSKKLKSVKELLGITIMERSSFEKNPIDFLEAKGYKEVKKDLIIKLPKYSLFELENGRKRMLASAGELQKGNELALPSKYVNFLYLASHYEKLKGSPEDNEQKQLFVEQHKHYLDEIIEQISEFSKRVILADANLDKVLSAYNKHRDKPIREQAENIIHLFTLTNLGAPAAFKYFDTTIDRKRYTSTKEVLDATLIHQSITGLYETRIDLSQLGGDGGGGSGGGGSSGGVLNLEEEYRLHEKPVPSSIDPSWLQLFPTVWAERAGMGLANQVPPVVVELRSGASPVAVRQYPMSKEAREGIRPHIQKFLDLGVLVPCRSPWNTPLLPVKKPGTNDYRPVQDLREINKRVQDIHPTVPNPYNLLSSLPPSYTWYSVLDLKDAFFCLRLHPNSQPLFAFEWKDPEKGNTGQLTWTRLPQGFKNSPTLFNEALHRDLAPFRALNPQVVLLQYVDDLLVAAPTYEDCKKGTQKLLQELSKLGYRVSAKKAQLCQREVTYLGYLLKEGKRWLTPARKATVMKIPVPTTPRQVREFLGKAGFCRLFIPGFASLAAPLYPLTKPSIPFIWTEEHQQAFDHIKKALLSAPALALPDLTKPFTLYIDERAGVARGVLTQTLGPWRRPVAYLSKKLDPVASGWPTCLKAVAAVALLLKDADKLTLGQNVTVIASHSLESIVRQPPDRWMTNARMTHYQSLLLNERVSFAPPAVLNPATLLPVESEATPVHRCSEILAEETGTRRDLEDQPLPGVPTWYTDGSSFITEGKRRAGAPIVDGKRTVWASSLPEGTSAQKAELVALTQALRLAEGKNINIYTDSRYAFATAHIHGAIYKQRGWLTSAGKDIKNKEEILALLEAIHLPRRVAIIHCPGHQRGSNPVATGNRRADEAAKQAALSTRVLAGTTKPAGKRTADGSEFEKRTADGSEFESPKKKAKVE

SEQ ID NO: 1473 - protein, 2094 aa, synthetic construct
MPAAKRVKLDGGDKKYSIGLDIGTNSVGWAVITDEYKVPSKKFKVLGNTDRHSIKKNLIGALLFDSGETAEATRLKRTARRRYTRRKNRICYLQEIFSNEMAKVDDSFFHRLEESFLVEEDKKHERHPIFGNIVDEVAYHEKYPTIYHLRKKLVDSTDKADLRLIYLALAHMIKFRGHFLIEGDLNPDNSDVDKLFIQLVQTYNQLFEENPINASGVDAKAILSARLSKSRRLENLIAQLPGEKKNGLFGNLIALSLGLTPNFKSNFDLAEDAKLQLSKDTYDDDLDNLLAQIGDQYADLFLAAKNLSDAILLSDILRVNTEITKAPLSASMIKRYDEHHQDLTLLKALVRQQLPEKYKEIFFDQSKNGYAGYIDGGASQEEFYKFIKPILEKMDGTEELLVKLNREDLLRKQRTFDNGSIPHQIHLGELHAILRRQEDFYPFLKDNREKIEKILTFRIPYYVGPLARGNSRFAWMTRKSEETITPWNFEEVVDKGASAQSFIERMTNFDKNLPNEKVLPKHSLLYEYFTVYNELTKVKYVTEGMRKPAFLSGEQKKAIVDLLFKTNRKVTVKQLKEDYFKKIECFDSVEISGVEDRFNASLGTYHDLLKIIKDKDFLDNEENEDILEDIVLTLTLFEDREMIEERLKTYAHLFDDKVMKQLKRRRYTGWGRLSRKLINGIRDKQSGKTILDFLKSDGFANRNFMQLIHDDSLTFKEDIQKAQVSGQGDSLHEHIANLAGSPAIKKGILQTVKVVDELVKVMGRHKPENIVIEMARENQTTQKGQKNSRERMKRIEEGIKELGSQILKEHPVENTQLQNEKLYLYYLQNGRDMYVDQELDINRLSDYDVDHIVPQSFLKDDSIDNKVLTRSDKARGKSDNVPSEEVVKKMKNYWRQLLNAKLITQRKFDNLTKAERGGLSELDKAGFIKRQLVETRQITKHVAQILDSRMNTKYDENDKLIREVKVITLKSKLVSDFRKDFQFYKVREINNYHHAHDAYLNAVVGTALIKKYPKLESEFVYGDYKVYDVRKMIAKSEQEIGKATAKYFFYSNIMNFFKTEITLANGEIRKRPLIETNGETGEIVWDKGRDFATVRKVLSMPQVNIVKKTEVQTGGFSKESILPKRNSDKLIARKKDWDPKKYGGFDSPTVAYSVLVVAKVEKGKSKKLKSVKELLGITIMERSSFEKNPIDFLEAKGYKEVKKDLIIKLPKYSLFELENGRKRMLASAGELQKGNELALPSKYVNFLYLASHYEKLKGSPEDNEQKQLFVEQHKHYLDEIIEQISEFSKRVILADANLDKVLSAYNKHRDKPIREQAENIIHLFTLTNLGAPAAFKYFDTTIDRKRYTSTKEVLDATLIHQSITGLYETRIDLSQLGGDGGGGSEAAAKGSSGGVLNLEEEYRLHEKPVPSSIDPSWLQLFPTVWAERAGMGLANQVPPVVVELRSGASPVAVRQYPMSKEAREGIRPHIQKFLDLGVLVPCRSPWNTPLLPVKKPGTNDYRPVQDLREINKRVQDIHPTVPNPYNLLSSLPPSYTWYSVLDLKDAFFCLRLHPNSQPLFAFEWKDPEKGNTGQLTWTRLPQGFKNSPTLFNEALHRDLAPFRALNPQVVLLQYVDDLLVAAPTYEDCKKGTQKLLQELSKLGYRVSAKKAQLCQREVTYLGYLLKEGKRWLTPARKATVMKIPVPTTPRQVREFLGKAGFCRLFIPGFASLAAPLYPLTKPSIPFIWTEEHQQAFDHIKKALLSAPALALPDLTKPFTLYIDERAGVARGVLTQTLGPWRRPVAYLSKKLDPVASGWPTCLKAVAAVALLLKDADKLTLGQNVTVIASHSLESIVRQPPDRWMTNARMTHYQSLLLNERVSFAPPAVLNPATLLPVESEATPVHRCSEILAEETGTRRDLEDQPLPGVPTWYTDGSSFITEGKRRAGAPIVDGKRTVWASSLPEGTSAQKAELVALTQALRLAEGKNINIYTDSRYAFATAHIHGAIYKQRGWLTSAGKDIKNKEEILALLEAIHLPRRVAIIHCPGHQRGSNPVATGNRRADEAAKQAALSTRVLAGTTKPAGKRTADGSEFEKRTADGSEFESPKKKAKVE

SEQ ID NO: 1474 - protein, 2094 aa, synthetic construct
MPAAKRVKLDGGDKKYSIGLDIGTNSVGWAVITDEYKVPSKKFKVLGNTDRHSIKKNLIGALLFDSGETAEATRLKRTARRRYTRRKNRICYLQEIFSNEMAKVDDSFFHRLEESFLVEEDKKHERHPIFGNIVDEVAYHEKYPTIYHLRKKLVDSTDKADLRLIYLALAHMIKFRGHFLIEGDLNPDNSDVDKLFIQLVQTYNQLFEENPINASGVDAKAILSARLSKSRRLENLIAQLPGEKKNGLFGNLIALSLGLTPNFKSNFDLAEDAKLQLSKDTYDDDLDNLLAQIGDQYADLFLAAKNLSDAILLSDILRVNTEITKAPLSASMIKRYDEHHQDLTLLKALVRQQLPEKYKEIFFDQSKNGYAGYIDGGASQEEFYKFIKPILEKMDGTEELLVKLNREDLLRKQRTFDNGSIPHQIHLGELHAILRRQEDFYPFLKDNREKIEKILTFRIPYYVGPLARGNSRFAWMTRKSEETITPWNFEEVVDKGASAQSFIERMTNFDKNLPNEKVLPKHSLLYEYFTVYNELTKVKYVTEGMRKPAFLSGEQKKAIVDLLFKTNRKVTVKQLKEDYFKKIECFDSVEISGVEDRFNASLGTYHDLLKIIKDKDFLDNEENEDILEDIVLTLTLFEDREMIEERLKTYAHLFDDKVMKQLKRRRYTGWGRLSRKLINGIRDKQSGKTILDFLKSDGFANRNFMQLIHDDSLTFKEDIQKAQVSGQGDSLHEHIANLAGSPAIKKGILQTVKVVDELVKVMGRHKPENIVIEMARENQTTQKGQKNSRERMKRIEEGIKELGSQILKEHPVENTQLQNEKLYLYYLQNGRDMYVDQELDINRLSDYDVDHIVPQSFLKDDSIDNKVLTRSDKARGKSDNVPSEEVVKKMKNYWRQLLNAKLITQRKFDNLTKAERGGLSELDKAGFIKRQLVETRQITKHVAQILDSRMNTKYDENDKLIREVKVITLKSKLVSDFRKDFQFYKVREINNYHHAHDAYLNAVVGTALIKKYPKLESEFVYGDYKVYDVRKMIAKSEQEIGKATAKYFFYSNIMNFFKTEITLANGEIRKRPLIETNGETGEIVWDKGRDFATVRKVLSMPQVNIVKKTEVQTGGFSKESILPKRNSDKLIARKKDWDPKKYGGFDSPTVAYSVLVVAKVEKGKSKKLKSVKELLGITIMERSSFEKNPIDFLEAKGYKEVKKDLIIKLPKYSLFELENGRKRMLASAGELQKGNELALPSKYVNFLYLASHYEKLKGSPEDNEQKQLFVEQHKHYLDEIIEQISEFSKRVILADANLDKVLSAYNKHRDKPIREQAENIIHLFTLTNLGAPAAFKYFDTTIDRKRYTSTKEVLDATLIHQSITGLYETRIDLSQLGGDGGGSSEAAAKGGSGGVLNLEEEYRLHEKPVPSSIDPSWLQLFPTVWAERAGMGLANQVPPVVVELRSGASPVAVRQYPMSKEAREGIRPHIQKFLDLGVLVPCRSPWNTPLLPVKKPGTNDYRPVQDLREINKRVQDIHPTVPNPYNLLSSLPPSYTWYSVLDLKDAFFCLRLHPNSQPLFAFEWKDPEKGNTGQLTWTRLPQGFKNSPTLFNEALHRDLAPFRALNPQVVLLQYVDDLLVAAPTYEDCKKGTQKLLQELSKLGYRVSAKKAQLCQREVTYLGYLLKEGKRWLTPARKATVMKIPVPTTPRQVREFLGKAGFCRLFIPGFASLAAPLYPLTKPSIPFIWTEEHQQAFDHIKKALLSAPALALPDLTKPFTLYIDERAGVARGVLTQTLGPWRRPVAYLSKKLDPVASGWPTCLKAVAAVALLLKDADKLTLGQNVTVIASHSLESIVRQPPDRWMTNARMTHYQSLLLNERVSFAPPAVLNPATLLPVESEATPVHRCSEILAEETGTRRDLEDQPLPGVPTWYTDGSSFITEGKRRAGAPIVDGKRTVWASSLPEGTSAQKAELVALTQALRLAEGKNINIYTDSRYAFATAHIHGAIYKQRGWLTSAGKDIKNKEEILALLEAIHLPRRVAIIHCPGHQRGSNPVATGNRRADEAAKQAALSTRVLAGTTKPAGKRTADGSEFEKRTADGSEFESPKKKAKVE

SEQ ID NO: 1475 - protein, 2089 aa, synthetic construct
MPAAKRVKLDGGDKKYSIGLDIGTNSVGWAVITDEYKVPSKKFKVLGNTDRHSIKKNLIGALLFDSGETAEATRLKRTARRRYTRRKNRICYLQEIFSNEMAKVDDSFFHRLEESFLVEEDKKHERHPIFGNIVDEVAYHEKYPTIYHLRKKLVDSTDKADLRLIYLALAHMIKFRGHFLIEGDLNPDNSDVDKLFIQLVQTYNQLFEENPINASGVDAKAILSARLSKSRRLENLIAQLPGEKKNGLFGNLIALSLGLTPNFKSNFDLAEDAKLQLSKDTYDDDLDNLLAQIGDQYADLFLAAKNLSDAILLSDILRVNTEITKAPLSASMIKRYDEHHQDLTLLKALVRQQLPEKYKEIFFDQSKNGYAGYIDGGASQEEFYKFIKPILEKMDGTEELLVKLNREDLLRKQRTFDNGSIPHQIHLGELHAILRRQEDFYPFLKDNREKIEKILTFRIPYYVGPLARGNSRFAWMTRKSEETITPWNFEEVVDKGASAQSFIERMTNFDKNLPNEKVLPKHSLLYEYFTVYNELTKVKYVTEGMRKPAFLSGEQKKAIVDLLFKTNRKVTVKQLKEDYFKKIECFDSVEISGVEDRFNASLGTYHDLLKIIKDKDFLDNEENEDILEDIVLTLTLFEDREMIEERLKTYAHLFDDKVMKQLKRRRYTGWGRLSRKLINGIRDKQSGKTILDFLKSDGFANRNFMQLIHDDSLTFKEDIQKAQVSGQGDSLHEHIANLAGSPAIKKGILQTVKVVDELVKVMGRHKPENIVIEMARENQTTQKGQKNSRERMKRIEEGIKELGSQILKEHPVENTQLQNEKLYLYYLQNGRDMYVDQELDINRLSDYDVDHIVPQSFLKDDSIDNKVLTRSDKARGKSDNVPSEEVVKKMKNYWRQLLNAKLITQRKFDNLTKAERGGLSELDKAGFIKRQLVETRQITKHVAQILDSRMNTKYDENDKLIREVKVITLKSKLVSDFRKDFQFYKVREINNYHHAHDAYLNAVVGTALIKKYPKLESEFVYGDYKVYDVRKMIAKSEQEIGKATAKYFFYSNIMNFFKTEITLANGEIRKRPLIETNGETGEIVWDKGRDFATVRKVLSMPQVNIVKKTEVQTGGFSKESILPKRNSDKLIARKKDWDPKKYGGFDSPTVAYSVLVVAKVEKGKSKKLKSVKELLGITIMERSSFEKNPIDFLEAKGYKEVKKDLIIKLPKYSLFELENGRKRMLASAGELQKGNELALPSKYVNFLYLASHYEKLKGSPEDNEQKQLFVEQHKHYLDEIIEQISEFSKRVILADANLDKVLSAYNKHRDKPIREQAENIIHLFTLTNLGAPAAFKYFDTTIDRKRYTSTKEVLDATLIHQSITGLYETRIDLSQLGGDGGGGSGGSGGVLNLEEEYRLHEKPVPSSIDPSWLQLFPTVWAERAGMGLANQVPPVVVELRSGASPVAVRQYPMSKEAREGIRPHIQKFLDLGVLVPCRSPWNTPLLPVKKPGTNDYRPVQDLREINKRVQDIHPTVPNPYNLLSSLPPSYTWYSVLDLKDAFFCLRLHPNSQPLFAFEWKDPEKGNTGQLTWTRLPQGFKNSPTLFNEALHRDLAPFRALNPQVVLLQYVDDLLVAAPTYEDCKKGTQKLLQELSKLGYRVSAKKAQLCQREVTYLGYLLKEGKRWLTPARKATVMKIPVPTTPRQVREFLGKAGFCRLFIPGFASLAAPLYPLTKPSIPFIWTEEHQQAFDHIKKALLSAPALALPDLTKPFTLYIDERAGVARGVLTQTLGPWRRPVAYLSKKLDPVASGWPTCLKAVAAVALLLKDADKLTLGQNVTVIASHSLESIVRQPPDRWMTNARMTHYQSLLLNERVSFAPPAVLNPATLLPVESEATPVHRCSEILAEETGTRRDLEDQPLPGVPTWYTDGSSFITEGKRRAGAPIVDGKRTVWASSLPEGTSAQKAELVALTQALRLAEGKNINIYTDSRYAFATAHIHGAIYKQRGWLTSAGKDIKNKEEILALLEAIHLPRRVAIIHCPGHQRGSNPVATGNRRADEAAKQAALSTRVLAGTTKPAGKRTADGSEFEKRTADGSEFESPKKKAKVE

SEQ ID NO: 1476 - protein, 2092 aa, synthetic construct
MPAAKRVKLDGGDKKYSIGLDIGTNSVGWAVITDEYKVPSKKFKVLGNTDRHSIKKNLIGALLFDSGETAEATRLKRTARRRYTRRKNRICYLQEIFSNEMAKVDDSFFHRLEESFLVEEDKKHERHPIFGNIVDEVAYHEKYPTIYHLRKKLVDSTDKADLRLIYLALAHMIKFRGHFLIEGDLNPDNSDVDKLFIQLVQTYNQLFEENPINASGVDAKAILSARLSKSRRLENLIAQLPGEKKNGLFGNLIALSLGLTPNFKSNFDLAEDAKLQLSKDTYDDDLDNLLAQIGDQYADLFLAAKNLSDAILLSDILRVNTEITKAPLSASMIKRYDEHHQDLTLLKALVRQQLPEKYKEIFFDQSKNGYAGYIDGGASQEEFYKFIKPILEKMDGTEELLVKLNREDLLRKQRTFDNGSIPHQIHLGELHAILRRQEDFYPFLKDNREKIEKILTFRIPYYVGPLARGNSRFAWMTRKSEETITPWNFEEVVDKGASAQSFIERMTNFDKNLPNEKVLPKHSLLYEYFTVYNELTKVKYVTEGMRKPAFLSGEQKKAIVDLLFKTNRKVTVKQLKEDYFKKIECFDSVEISGVEDRFNASLGTYHDLLKIIKDKDFLDNEENEDILEDIVLTLTLFEDREMIEERLKTYAHLFDDKVMKQLKRRRYTGWGRLSRKLINGIRDKQSGKTILDFLKSDGFANRNFMQLIHDDSLTFKEDIQKAQVSGQGDSLHEHIANLAGSPAIKKGILQTVKVVDELVKVMGRHKPENIVIEMARENQTTQKGQKNSRERMKRIEEGIKELGSQILKEHPVENTQLQNEKLYLYYLQNGRDMYVDQELDINRLSDYDVDHIVPQSFLKDDSIDNKVLTRSDKARGKSDNVPSEEVVKKMKNYWRQLLNAKLITQRKFDNLTKAERGGLSELDKAGFIKRQLVETRQITKHVAQILDSRMNTKYDENDKLIREVKVITLKSKLVSDFRKDFQFYKVREINNYHHAHDAYLNAVVGTALIKKYPKLESEFVYGDYKVYDVRKMIAKSEQEIGKATAKYFFYSNIMNFFKTEITLANGEIRKRPLIETNGETGEIVWDKGRDFATVRKVLSMPQVNIVKKTEVQTGGFSKESILPKRNSDKLIARKKDWDPKKYGGFDSPTVAYSVLVVAKVEKGKSKKLKSVKELLGITIMERSSFEKNPIDFLEAKGYKEVKKDLIIKLPKYSLFELENGRKRMLASAGELQKGNELALPSKYVNFLYLASHYEKLKGSPEDNEQKQLFVEQHKHYLDEIIEQISEFSKRVILADANLDKVLSAYNKHRDKPIREQAENIIHLFTLTNLGAPAAFKYFDTTIDRKRYTSTKEVLDATLIHQSITGLYETRIDLSQLGGDGGGGSGSSPAPGGVLNLEEEYRLHEKPVPSSIDPSWLQLFPTVWAERAGMGLANQVPPVVVELRSGASPVAVRQYPMSKEAREGIRPHIQKFLDLGVLVPCRSPWNTPLLPVKKPGTNDYRPVQDLREINKRVQDIHPTVPNPYNLLSSLPPSYTWYSVLDLKDAFFCLRLHPNSQPLFAFEWKDPEKGNTGQLTWTRLPQGFKNSPTLFNEALHRDLAPFRALNPQVVLLQYVDDLLVAAPTYEDCKKGTQKLLQELSKLGYRVSAKKAQLCQREVTYLGYLLKEGKRWLTPARKATVMKIPVPTTPRQVREFLGKAGFCRLFIPGFASLAAPLYPLTKPSIPFIWTEEHQQAFDHIKKALLSAPALALPDLTKPFTLYIDERAGVARGVLTQTLGPWRRPVAYLSKKLDPVASGWPTCLKAVAAVALLLKDADKLTLGQNVTVIASHSLESIVRQPPDRWMTNARMTHYQSLLLNERVSFAPPAVLNPATLLPVESEATPVHRCSEILAEETGTRRDLEDQPLPGVPTWYTDGSSFITEGKRRAGAPIVDGKRTVWASSLPEGTSAQKAELVALTQALRLAEGKNINIYTDSRYAFATAHIHGAIYKQRGWLTSAGKDIKNKEEILALLEAIHLPRRVAIIHCPGHQRGSNPVATGNRRADEAAKQAALSTRVLAGTTKPAGKRTADGSEFEKRTADGSEFESPKKKAKVE

SEQ ID NO: 1477 - protein, 2092 aa, synthetic construct
MPAAKRVKLDGGDKKYSIGLDIGTNSVGWAVITDEYKVPSKKFKVLGNTDRHSIKKNLIGALLFDSGETAEATRLKRTARRRYTRRKNRICYLQEIFSNEMAKVDDSFFHRLEESFLVEEDKKHERHPIFGNIVDEVAYHEKYPTIYHLRKKLVDSTDKADLRLIYLALAHMIKFRGHFLIEGDLNPDNSDVDKLFIQLVQTYNQLFEENPINASGVDAKAILSARLSKSRRLENLIAQLPGEKKNGLFGNLIALSLGLTPNFKSNFDLAEDAKLQLSKDTYDDDLDNLLAQIGDQYADLFLAAKNLSDAILLSDILRVNTEITKAPLSASMIKRYDEHHQDLTLLKALVRQQLPEKYKEIFFDQSKNGYAGYIDGGASQEEFYKFIKPILEKMDGTEELLVKLNREDLLRKQRTFDNGSIPHQIHLGELHAILRRQEDFYPFLKDNREKIEKILTFRIPYYVGPLARGNSRFAWMTRKSEETITPWNFEEVVDKGASAQSFIERMTNFDKNLPNEKVLPKHSLLYEYFTVYNELTKVKYVTEGMRKPAFLSGEQKKAIVDLLFKTNRKVTVKQLKEDYFKKIECFDSVEISGVEDRFNASLGTYHDLLKIIKDKDFLDNEENEDILEDIVLTLTLFEDREMIEERLKTYAHLFDDKVMKQLKRRRYTGWGRLSRKLINGIRDKQSGKTILDFLKSDGFANRNFMQLIHDDSLTFKEDIQKAQVSGQGDSLHEHIANLAGSPAIKKGILQTVKVVDELVKVMGRHKPENIVIEMARENQTTQKGQKNSRERMKRIEEGIKELGSQILKEHPVENTQLQNEKLYLYYLQNGRDMYVDQELDINRLSDYDVDHIVPQSFLKDDSIDNKVLTRSDKARGKSDNVPSEEVVKKMKNYWRQLLNAKLITQRKFDNLTKAERGGLSELDKAGFIKRQLVETRQITKHVAQILDSRMNTKYDENDKLIREVKVITLKSKLVSDFRKDFQFYKVREINNYHHAHDAYLNAVVGTALIKKYPKLESEFVYGDYKVYDVRKMIAKSEQEIGKATAKYFFYSNIMNFFKTEITLANGEIRKRPLIETNGETGEIVWDKGRDFATVRKVLSMPQVNIVKKTEVQTGGFSKESILPKRNSDKLIARKKDWDPKKYGGFDSPTVAYSVLVVAKVEKGKSKKLKSVKELLGITIMERSSFEKNPIDFLEAKGYKEVKKDLIIKLPKYSLFELENGRKRMLASAGELQKGNELALPSKYVNFLYLASHYEKLKGSPEDNEQKQLFVEQHKHYLDEIIEQISEFSKRVILADANLDKVLSAYNKHRDKPIREQAENIIHLFTLTNLGAPAAFKYFDTTIDRKRYTSTKEVLDATLIHQSITGLYETRIDLSQLGGDGGGSSGGGGGSGGVLNLEEEYRLHEKPVPSSIDPSWLQLFPTVWAERAGMGLANQVPPVVVELRSGASPVAVRQYPMSKEAREGIRPHIQKFLDLGVLVPCRSPWNTPLLPVKKPGTNDYRPVQDLREINKRVQDIHPTVPNPYNLLSSLPPSYTWYSVLDLKDAFFCLRLHPNSQPLFAFEWKDPEKGNTGQLTWTRLPQGFKNSPTLFNEALHRDLAPFRALNPQVVLLQYVDDLLVAAPTYEDCKKGTQKLLQELSKLGYRVSAKKAQLCQREVTYLGYLLKEGKRWLTPARKATVMKIPVPTTPRQVREFLGKAGFCRLFIPGFASLAAPLYPLTKPSIPFIWTEEHQQAFDHIKKALLSAPALALPDLTKPFTLYIDERAGVARGVLTQTLGPWRRPVAYLSKKLDPVASGWPTCLKAVAAVALLLKDADKLTLGQNVTVIASHSLESIVRQPPDRWMTNARMTHYQSLLLNERVSFAPPAVLNPATLLPVESEATPVHRCSEILAEETGTRRDLEDQPLPGVPTWYTDGSSFITEGKRRAGAPIVDGKRTVWASSLPEGTSAQKAELVALTQALRLAEGKNINIYTDSRYAFATAHIHGAIYKQRGWLTSAGKDIKNKEEILALLEAIHLPRRVAIIHCPGHQRGSNPVATGNRRADEAAKQAALSTRVLAGTTKPAGKRTADGSEFEKRTADGSEFESPKKKAKVE

SEQ ID NO: 1478 - protein, 2007 aa, synthetic construct
MPAAKRVKLDGGDKKYSIGLDIGTNSVGWAVITDEYKVPSKKFKVLGNTDRHSIKKNLIGALLFDSGETAEATRLKRTARRRYTRRKNRICYLQEIFSNEMAKVDDSFFHRLEESFLVEEDKKHERHPIFGNIVDEVAYHEKYPTIYHLRKKLVDSTDKADLRLIYLALAHMIKFRGHFLIEGDLNPDNSDVDKLFIQLVQTYNQLFEENPINASGVDAKAILSARLSKSRRLENLIAQLPGEKKNGLFGNLIALSLGLTPNFKSNFDLAEDAKLQLSKDTYDDDLDNLLAQIGDQYADLFLAAKNLSDAILLSDILRVNTEITKAPLSASMIKRYDEHHQDLTLLKALVRQQLPEKYKEIFFDQSKNGYAGYIDGGASQEEFYKFIKPILEKMDGTEELLVKLNREDLLRKQRTFDNGSIPHQIHLGELHAILRRQEDFYPFLKDNREKIEKILTFRIPYYVGPLARGNSRFAWMTRKSEETITPWNFEEVVDKGASAQSFIERMTNFDKNLPNEKVLPKHSLLYEYFTVYNELTKVKYVTEGMRKPAFLSGEQKKAIVDLLFKTNRKVTVKQLKEDYFKKIECFDSVEISGVEDRFNASLGTYHDLLKIIKDKDFLDNEENEDILEDIVLTLTLFEDREMIEERLKTYAHLFDDKVMKQLKRRRYTGWGRLSRKLINGIRDKQSGKTILDFLKSDGFANRNFMQLIHDDSLTFKEDIQKAQVSGQGDSLHEHIANLAGSPAIKKGILQTVKVVDELVKVMGRHKPENIVIEMARENQTTQKGQKNSRERMKRIEEGIKELGSQILKEHPVENTQLQNEKLYLYYLQNGRDMYVDQELDINRLSDYDVDHIVPQSFLKDDSIDNKVLTRSDKARGKSDNVPSEEVVKKMKNYWRQLLNAKLITQRKFDNLTKAERGGLSELDKAGFIKRQLVETRQITKHVAQILDSRMNTKYDENDKLIREVKVITLKSKLVSDFRKDFQFYKVREINNYHHAHDAYLNAVVGTALIKKYPKLESEFVYGDYKVYDVRKMIAKSEQEIGKATAKYFFYSNIMNFFKTEITLANGEIRKRPLIETNGETGEIVWDKGRDFATVRKVLSMPQVNIVKKTEVQTGGFSKESILPKRNSDKLIARKKDWDPKKYGGFDSPTVAYSVLVVAKVEKGKSKKLKSVKELLGITIMERSSFEKNPIDFLEAKGYKEVKKDLIIKLPKYSLFELENGRKRMLASAGELQKGNELALPSKYVNFLYLASHYEKLKGSPEDNEQKQLFVEQHKHYLDEIIEQISEFSKRVILADANLDKVLSAYNKHRDKPIREQAENIIHLFTLTNLGAPAAFKYFDTTIDRKRYTSTKEVLDATLIHQSITGLYETRIDLSQLGGDGGGGGGGGGAVLGLEHLPRPPQISQFPLNPERLQALQHLVRKALEAGHIEPYTGPGNNPVFPVKKANGTWRFIHDLRATNSLTIDLSSSSPGPPDLSSLPTTLAHLQTIDLRDAFFQIPLPKQFQPYFAFTVPQQCNYGPGTRYAWKVLPQGFKNSPTLFEMQLAHILQPIRQAFPQCTILQYMDDILLASPSHEDLLLLSEATMASLISHGLPVSENKTQQTPGTIKFLGQIISPNHLTYDAVPTVPIRSRWALPELQALLGEIQWVSKGTPTLRQPLHSLYCALQRHTDPRDQIYLNPSQVQSLVQLRQALSQNCRSRLVQTLPLLGAIMLTLTGTTTVVFQSKEQWPLVWLHAPLPHTSQCPWGQLLASAVLLLDKYTLQSYGLLCQTIHHNISTQTFNQFIQTSDHPSVPILLHHSHRFKNLGAQTGELWNTFLKTAAPLAPVKALMPVFTLSPVIINTAPCLFSDGSTSRAAYILWDKQILSQRSFPLPPPHKSAQRAELLGLLHGLSSARSWRCLNIFLDSKYLYHYLRTLALGTFQGRSSQAPFQALLPRLLSRKVVYLHHVRSHTNLPDPISRLNALTDALLITPVLQLAGKRTADGSEFEKRTADGSEFESPKKKAKVE

SEQ ID NO: 1479 - protein, 2013 aa, synthetic construct
MPAAKRVKLDGGDKKYSIGLDIGTNSVGWAVITDEYKVPSKKFKVLGNTDRHSIKKNLIGALLFDSGETAEATRLKRTARRRYTRRKNRICYLQEIFSNEMAKVDDSFFHRLEESFLVEEDKKHERHPIFGNIVDEVAYHEKYPTIYHLRKKLVDSTDKADLRLIYLALAHMIKFRGHFLIEGDLNPDNSDVDKLFIQLVQTYNQLFEENPINASGVDAKAILSARLSKSRRLENLIAQLPGEKKNGLFGNLIALSLGLTPNFKSNFDLAEDAKLQLSKDTYDDDLDNLLAQIGDQYADLFLAAKNLSDAILLSDILRVNTEITKAPLSASMIKRYDEHHQDLTLLKALVRQQLPEKYKEIFFDQSKNGYAGYIDGGASQEEFYKFIKPILEKMDGTEELLVKLNREDLLRKQRTFDNGSIPHQIHLGELHAILRRQEDFYPFLKDNREKIEKILTFRIPYYVGPLARGNSRFAWMTRKSEETITPWNFEEVVDKGASAQSFIERMTNFDKNLPNEKVLPKHSLLYEYFTVYNELTKVKYVTEGMRKPAFLSGEQKKAIVDLLFKTNRKVTVKQLKEDYFKKIECFDSVEISGVEDRFNASLGTYHDLLKIIKDKDFLDNEENEDILEDIVLTLTLFEDREMIEERLKTYAHLFDDKVMKQLKRRRYTGWGRLSRKLINGIRDKQSGKTILDFLKSDGFANRNFMQLIHDDSLTFKEDIQKAQVSGQGDSLHEHIANLAGSPAIKKGILQTVKVVDELVKVMGRHKPENIVIEMARENQTTQKGQKNSRERMKRIEEGIKELGSQILKEHPVENTQLQNEKLYLYYLQNGRDMYVDQELDINRLSDYDVDHIVPQSFLKDDSIDNKVLTRSDKARGKSDNVPSEEVVKKMKNYWRQLLNAKLITQRKFDNLTKAERGGLSELDKAGFIKRQLVETRQITKHVAQILDSRMNTKYDENDKLIREVKVITLKSKLVSDFRKDFQFYKVREINNYHHAHDAYLNAVVGTALIKKYPKLESEFVYGDYKVYDVRKMIAKSEQEIGKATAKYFFYSNIMNFFKTEITLANGEIRKRPLIETNGETGEIVWDKGRDFATVRKVLSMPQVNIVKKTEVQTGGFSKESILPKRNSDKLIARKKDWDPKKYGGFDSPTVAYSVLVVAKVEKGKSKKLKSVKELLGITIMERSSFEKNPIDFLEAKGYKEVKKDLIIKLPKYSLFELENGRKRMLASAGELQKGNELALPSKYVNFLYLASHYEKLKGSPEDNEQKQLFVEQHKHYLDEIIEQISEFSKRVILADANLDKVLSAYNKHRDKPIREQAENIIHLFTLTNLGAPAAFKYFDTTIDRKRYTSTKEVLDATLIHQSITGLYETRIDLSQLGGDGGPAPAPAPAPAPGGAVLGLEHLPRPPQISQFPLNPERLQALQHLVRKALEAGHIEPYTGPGNNPVFPVKKANGTWRFIHDLRATNSLTIDLSSSSPGPPDLSSLPTTLAHLQTIDLRDAFFQIPLPKQFQPYFAFTVPQQCNYGPGTRYAWKVLPQGFKNSPTLFEMQLAHILQPIRQAFPQCTILQYMDDILLASPSHEDLLLLSEATMASLISHGLPVSENKTQQTPGTIKFLGQIISPNHLTYDAVPTVPIRSRWALPELQALLGEIQWVSKGTPTLRQPLHSLYCALQRHTDPRDQIYLNPSQVQSLVQLRQALSQNCRSRLVQTLPLLGAIMLTLTGTTTVVFQSKEQWPLVWLHAPLPHTSQCPWGQLLASAVLLLDKYTLQSYGLLCQTIHHNISTQTFNQFIQTSDHPSVPILLHHSHRFKNLGAQTGELWNTFLKTAAPLAPVKALMPVFTLSPVIINTAPCLFSDGSTSRAAYILWDKQILSQRSFPLPPPHKSAQRAELLGLLHGLSSARSWRCLNIFLDSKYLYHYLRTLALGTFQGRSSQAPFQALLPRLLSRKVVYLHHVRSHTNLPDPISRLNALTDALLITPVLQLAGKRTADGSEFEKRTADGSEFESPKKKAKVE

SEQ ID NO: 1480 - protein, 2013 aa, synthetic construct
MPAAKRVKLDGGDKKYSIGLDIGTNSVGWAVITDEYKVPSKKFKVLGNTDRHSIKKNLIGALLFDSGETAEATRLKRTARRRYTRRKNRICYLQEIFSNEMAKVDDSFFHRLEESFLVEEDKKHERHPIFGNIVDEVAYHEKYPTIYHLRKKLVDSTDKADLRLIYLALAHMIKFRGHFLIEGDLNPDNSDVDKLFIQLVQTYNQLFEENPINASGVDAKAILSARLSKSRRLENLIAQLPGEKKNGLFGNLIALSLGLTPNFKSNFDLAEDAKLQLSKDTYDDDLDNLLAQIGDQYADLFLAAKNLSDAILLSDILRVNTEITKAPLSASMIKRYDEHHQDLTLLKALVRQQLPEKYKEIFFDQSKNGYAGYIDGGASQEEFYKFIKPILEKMDGTEELLVKLNREDLLRKQRTFDNGSIPHQIHLGELHAILRRQEDFYPFLKDNREKIEKILTFRIPYYVGPLARGNSRFAWMTRKSEETITPWNFEEVVDKGASAQSFIERMTNFDKNLPNEKVLPKHSLLYEYFTVYNELTKVKYVTEGMRKPAFLSGEQKKAIVDLLFKTNRKVTVKQLKEDYFKKIECFDSVEISGVEDRFNASLGTYHDLLKIIKDKDFLDNEENEDILEDIVLTLTLFEDREMIEERLKTYAHLFDDKVMKQLKRRRYTGWGRLSRKLINGIRDKQSGKTILDFLKSDGFANRNFMQLIHDDSLTFKEDIQKAQVSGQGDSLHEHIANLAGSPAIKKGILQTVKVVDELVKVMGRHKPENIVIEMARENQTTQKGQKNSRERMKRIEEGIKELGSQILKEHPVENTQLQNEKLYLYYLQNGRDMYVDQELDINRLSDYDVDHIVPQSFLKDDSIDNKVLTRSDKARGKSDNVPSEEVVKKMKNYWRQLLNAKLITQRKFDNLTKAERGGLSELDKAGFIKRQLVETRQITKHVAQILDSRMNTKYDENDKLIREVKVITLKSKLVSDFRKDFQFYKVREINNYHHAHDAYLNAVVGTALIKKYPKLESEFVYGDYKVYDVRKMIAKSEQEIGKATAKYFFYSNIMNFFKTEITLANGEIRKRPLIETNGETGEIVWDKGRDFATVRKVLSMPQVNIVKKTEVQTGGFSKESILPKRNSDKLIARKKDWDPKKYGGFDSPTVAYSVLVVAKVEKGKSKKLKSVKELLGITIMERSSFEKNPIDFLEAKGYKEVKKDLIIKLPKYSLFELENGRKRMLASAGELQKGNELALPSKYVNFLYLASHYEKLKGSPEDNEQKQLFVEQHKHYLDEIIEQISEFSKRVILADANLDKVLSAYNKHRDKPIREQAENIIHLFTLTNLGAPAAFKYFDTTIDRKRYTSTKEVLDATLIHQSITGLYETRIDLSQLGGDGGPAPEAAAKGGSGGAVLGLEHLPRPPQISQFPLNPERLQALQHLVRKALEAGHIEPYTGPGNNPVFPVKKANGTWRFIHDLRATNSLTIDLSSSSPGPPDLSSLPTTLAHLQTIDLRDAFFQIPLPKQFQPYFAFTVPQQCNYGPGTRYAWKVLPQGFKNSPTLFEMQLAHILQPIRQAFPQCTILQYMDDILLASPSHEDLLLLSEATMASLISHGLPVSENKTQQTPGTIKFLGQIISPNHLTYDAVPTVPIRSRWALPELQALLGEIQWVSKGTPTLRQPLHSLYCALQRHTDPRDQIYLNPSQVQSLVQLRQALSQNCRSRLVQTLPLLGAIMLTLTGTTTVVFQSKEQWPLVWLHAPLPHTSQCPWGQLLASAVLLLDKYTLQSYGLLCQTIHHNISTQTFNQFIQTSDHPSVPILLHHSHRFKNLGAQTGELWNTFLKTAAPLAPVKALMPVFTLSPVIINTAPCLFSDGSTSRAAYILWDKQILSQRSFPLPPPHKSAQRAELLGLLHGLSSARSWRCLNIFLDSKYLYHYLRTLALGTFQGRSSQAPFQALLPRLLSRKVVYLHHVRSHTNLPDPISRLNALTDALLITPVLQLAGKRTADGSEFEKRTADGSEFESPKKKAKVE

SEQ ID NO: 1481 - protein, 2011 aa, synthetic construct
MPAAKRVKLDGGDKKYSIGLDIGTNSVGWAVITDEYKVPSKKFKVLGNTDRHSIKKNLIGALLFDSGETAEATRLKRTARRRYTRRKNRICYLQEIFSNEMAKVDDSFFHRLEESFLVEEDKKHERHPIFGNIVDEVAYHEKYPTIYHLRKKLVDSTDKADLRLIYLALAHMIKFRGHFLIEGDLNPDNSDVDKLFIQLVQTYNQLFEENPINASGVDAKAILSARLSKSRRLENLIAQLPGEKKNGLFGNLIALSLGLTPNFKSNFDLAEDAKLQLSKDTYDDDLDNLLAQIGDQYADLFLAAKNLSDAILLSDILRVNTEITKAPLSASMIKRYDEHHQDLTLLKALVRQQLPEKYKEIFFDQSKNGYAGYIDGGASQEEFYKFIKPILEKMDGTEELLVKLNREDLLRKQRTFDNGSIPHQIHLGELHAILRRQEDFYPFLKDNREKIEKILTFRIPYYVGPLARGNSRFAWMTRKSEETITPWNFEEVVDKGASAQSFIERMTNFDKNLPNEKVLPKHSLLYEYFTVYNELTKVKYVTEGMRKPAFLSGEQKKAIVDLLFKTNRKVTVKQLKEDYFKKIECFDSVEISGVEDRFNASLGTYHDLLKIIKDKDFLDNEENEDILEDIVLTLTLFEDREMIEERLKTYAHLFDDKVMKQLKRRRYTGWGRLSRKLINGIRDKQSGKTILDFLKSDGFANRNFMQLIHDDSLTFKEDIQKAQVSGQGDSLHEHIANLAGSPAIKKGILQTVKVVDELVKVMGRHKPENIVIEMARENQTTQKGQKNSRERMKRIEEGIKELGSQILKEHPVENTQLQNEKLYLYYLQNGRDMYVDQELDINRLSDYDVDHIVPQSFLKDDSIDNKVLTRSDKARGKSDNVPSEEVVKKMKNYWRQLLNAKLITQRKFDNLTKAERGGLSELDKAGFIKRQLVETRQITKHVAQILDSRMNTKYDENDKLIREVKVITLKSKLVSDFRKDFQFYKVREINNYHHAHDAYLNAVVGTALIKKYPKLESEFVYGDYKVYDVRKMIAKSEQEIGKATAKYFFYSNIMNFFKTEITLANGEIRKRPLIETNGETGEIVWDKGRDFATVRKVLSMPQVNIVKKTEVQTGGFSKESILPKRNSDKLIARKKDWDPKKYGGFDSPTVAYSVLVVAKVEKGKSKKLKSVKELLGITIMERSSFEKNPIDFLEAKGYKEVKKDLIIKLPKYSLFELENGRKRMLASAGELQKGNELALPSKYVNFLYLASHYEKLKGSPEDNEQKQLFVEQHKHYLDEIIEQISEFSKRVILADANLDKVLSAYNKHRDKPIREQAENIIHLFTLTNLGAPAAFKYFDTTIDRKRYTSTKEVLDATLIHQSITGLYETRIDLSQLGGDGGPAPGSSGGGGGAVLGLEHLPRPPQISQFPLNPERLQALQHLVRKALEAGHIEPYTGPGNNPVFPVKKANGTWRFIHDLRATNSLTIDLSSSSPGPPDLSSLPTTLAHLQTIDLRDAFFQIPLPKQFQPYFAFTVPQQCNYGPGTRYAWKVLPQGFKNSPTLFEMQLAHILQPIRQAFPQCTILQYMDDILLASPSHEDLLLLSEATMASLISHGLPVSENKTQQTPGTIKFLGQIISPNHLTYDAVPTVPIRSRWALPELQALLGEIQWVSKGTPTLRQPLHSLYCALQRHTDPRDQIYLNPSQVQSLVQLRQALSQNCRSRLVQTLPLLGAIMLTLTGTTTVVFQSKEQWPLVWLHAPLPHTSQCPWGQLLASAVLLLDKYTLQSYGLLCQTIHHNISTQTFNQFIQTSDHPSVPILLHHSHRFKNLGAQTGELWNTFLKTAAPLAPVKALMPVFTLSPVIINTAPCLFSDGSTSRAAYILWDKQILSQRSFPLPPPHKSAQRAELLGLLHGLSSARSWRCLNIFLDSKYLYHYLRTLALGTFQGRSSQAPFQALLPRLLSRKVVYLHHVRSHTNLPDPISRLNALTDALLITPVLQLAGKRTADGSEFEKRTADGSEFESPKKKAKVE

SEQ ID NO: 1482 - protein, 2013 aa, synthetic construct
MPAAKRVKLDGGDKKYSIGLDIGTNSVGWAVITDEYKVPSKKFKVLGNTDRHSIKKNLIGALLFDSGETAEATRLKRTARRRYTRRKNRICYLQEIFSNEMAKVDDSFFHRLEESFLVEEDKKHERHPIFGNIVDEVAYHEKYPTIYHLRKKLVDSTDKADLRLIYLALAHMIKFRGHFLIEGDLNPDNSDVDKLFIQLVQTYNQLFEENPINASGVDAKAILSARLSKSRRLENLIAQLPGEKKNGLFGNLIALSLGLTPNFKSNFDLAEDAKLQLSKDTYDDDLDNLLAQIGDQYADLFLAAKNLSDAILLSDILRVNTEITKAPLSASMIKRYDEHHQDLTLLKALVRQQLPEKYKEIFFDQSKNGYAGYIDGGASQEEFYKFIKPILEKMDGTEELLVKLNREDLLRKQRTFDNGSIPHQIHLGELHAILRRQEDFYPFLKDNREKIEKILTFRIPYYVGPLARGNSRFAWMTRKSEETITPWNFEEVVDKGASAQSFIERMTNFDKNLPNEKVLPKHSLLYEYFTVYNELTKVKYVTEGMRKPAFLSGEQKKAIVDLLFKTNRKVTVKQLKEDYFKKIECFDSVEISGVEDRFNASLGTYHDLLKIIKDKDFLDNEENEDILEDIVLTLTLFEDREMIEERLKTYAHLFDDKVMKQLKRRRYTGWGRLSRKLINGIRDKQSGKTILDFLKSDGFANRNFMQLIHDDSLTFKEDIQKAQVSGQGDSLHEHIANLAGSPAIKKGILQTVKVVDELVKVMGRHKPENIVIEMARENQTTQKGQKNSRERMKRIEEGIKELGSQILKEHPVENTQLQNEKLYLYYLQNGRDMYVDQELDINRLSDYDVDHIVPQSFLKDDSIDNKVLTRSDKARGKSDNVPSEEVVKKMKNYWRQLLNAKLITQRKFDNLTKAERGGLSELDKAGFIKRQLVETRQITKHVAQILDSRMNTKYDENDKLIREVKVITLKSKLVSDFRKDFQFYKVREINNYHHAHDAYLNAVVGTALIKKYPKLESEFVYGDYKVYDVRKMIAKSEQEIGKATAKYFFYSNIMNFFKTEITLANGEIRKRPLIETNGETGEIVWDKGRDFATVRKVLSMPQVNIVKKTEVQTGGFSKESILPKRNSDKLIARKKDWDPKKYGGFDSPTVAYSVLVVAKVEKGKSKKLKSVKELLGITIMERSSFEKNPIDFLEAKGYKEVKKDLIIKLPKYSLFELENGRKRMLASAGELQKGNELALPSKYVNFLYLASHYEKLKGSPEDNEQKQLFVEQHKHYLDEIIEQISEFSKRVILADANLDKVLSAYNKHRDKPIREQAENIIHLFTLTNLGAPAAFKYFDTTIDRKRYTSTKEVLDATLIHQSITGLYETRIDLSQLGGDGGEAAAKGSSGGSGGAVLGLEHLPRPPQISQFPLNPERLQALQHLVRKALEAGHIEPYTGPGNNPVFPVKKANGTWRFIHDLRATNSLTIDLSSSSPGPPDLSSLPTTLAHLQTIDLRDAFFQIPLPKQFQPYFAFTVPQQCNYGPGTRYAWKVLPQGFKNSPTLFQMQLAHILQPIRQAFPQCTILQYMDDILLASPSHEDLLLLSEATMASLISHGLPVSENKTQQTPGTIKFLGQIISPNHLTYDAVPTVPIRSRWALPELQALLGEIQWVSKGTPTLRQPLHSLYCALQPHTDPRDQIYLNPSQVQSLVQLRQALSQNCRSRLVQTLPLLGAIMLTLTGTTTVVFQSKEQWPLVWLHAPLPHTSQCPWGQLLASAVLLLDKYTLQSYGLLCQTIHHNISTQTFNQFIQTSDHPSVPILLHHSHRFKNLGAQTGELWNTFLKTAAPLAPVKALMPVFTLSPVIINTAPCLFSDGSTSRAAYILWDKQILSQRSFPLPPPHKSAQRAELLGLLHGLSSARSWRCLNIFLDSKYLYHYLRTLALGTFQGRSSQAPFQALLPRLLSRKVVYLHHVRSHTNLPDPISRLNALTDALLITPVLQLAGKRTADGSEFEKRTADGSEFESPKKKAKVE

SEQ ID NO: 1483 - protein, 2010 aa, synthetic construct
MPAAKRVKLDGGDKKYSIGLDIGTNSVGWAVITDEYKVPSKKFKVLGNTDRHSIKKNLIGALLFDSGETAEATRLKRTARRRYTRRKNRICYLQEIFSNEMAKVDDSFFHRLEESFLVEEDKKHERHPIFGNIVDEVAYHEKYPTIYHLRKKLVDSTDKADLRLIYLALAHMIKFRGHFLIEGDLNPDNSDVDKLFIQLVQTYNQLFEENPINASGVDAKAILSARLSKSRRLENLIAQLPGEKKNGLFGNLIALSLGLTPNFKSNFDLAEDAKLQLSKDTYDDDLDNLLAQIGDQYADLFLAAKNLSDAILLSDILRVNTEITKAPLSASMIKRYDEHHQDLTLLKALVRQQLPEKYKEIFFDQSKNGYAGYIDGGASQEEFYKFIKPILEKMDGTEELLVKLNREDLLRKQRTFDNGSIPHQIHLGELHAILRRQEDFYPFLKDNREKIEKILTFRIPYYVGPLARGNSRFAWMTRKSEETITPWNFEEVVDKGASAQSFIERMTNFDKNLPNEKVLPKHSLLYEYFTVYNELTKVKYVTEGMRKPAFLSGEQKKAIVDLLFKTNRKVTVKQLKEDYFKKIECFDSVEISGVEDRFNASLGTYHDLLKIIKDKDFLDNEENEDILEDIVLTLTLFEDREMIEERLKTYAHLFDDKVMKQLKRRRYTGWGRLSRKLINGIRDKQSGKTILDFLKSDGFANRNFMQLIHDDSLTFKEDIQKAQVSGQGDSLHEHIANLAGSPAIKKGILQTVKVVDELVKVMGRHKPENIVIEMARENQTTQKGQKNSRERMKRIEEGIKELGSQILKEHPVENTQLQNEKLYLYYLQNGRDMYVDQELDINRLSDYDVDHIVPQSFLKDDSIDNKVLTRSDKARGKSDNVPSEEVVKKMKNYWRQLLNAKLITQRKFDNLTKAERGGLSELDKAGFIKRQLVETRQITKHVAQILDSRMNTKYDENDKLIREVKVITLKSKLVSDFRKDFQFYKVREINNYHHAHDAYLNAVVGTALIKKYPKLESEFVYGDYKVYDVRKMIAKSEQEIGKATAKYFFYSNIMNFFKTEITLANGEIRKRPLIETNGETGEIVWDKGRDFATVRKVLSMPQVNIVKKTEVQTGGFSKESILPKRNSDKLIARKKDWDPKKYGGFDSPTVAYSVLVVAKVEKGKSKKLKSVKELLGITIMERSSFEKNPIDFLEAKGYKEVKKDLIIKLPKYSLFELENGRKRMLASAGELQKGNELALPSKYVNFLYLASHYEKLKGSPEDNEQKQLFVEQHKHYLDEIIEQISEFSKRVILADANLDKVLSAYNKHRDKPIREQAENIIHLFTLTNLGAPAAFKYFDTTIDRKRYTSTKEVLDATLIHQSITGLYETRIDLSQLGGDGGEAAAKGGSGGAVLGLEHLPRPPQISQFPLNPERLQALQHLVRKALEAGHIEPYTGPGNNPVFPVKKANGTWRFIHDLRATNSLTIDLSSSSPGPPDLSSLPTTLAHLQTIDLRDAFFQIPLPKQFQPYFAFTVPQQCNYGPGTRYAWKVLPQGFKNSPTLFQMQLAHILQPIRQAFPQCTILQYMDDILLASPSHEDLLLLSEATMASLISHGLPVSENKTQQTPGTIKFLGQIISPNHLTYDAVPTVPIRSRWALPELQALLGEIQWVSKGTPTLRQPLHSLYCALQPHTDPRDQIYLNPSQVQSLVQLRQALSQNCRSRLVQTLPLLGAIMLTLTGTTTVVFQSKEQWPLVWLHAPLPHTSQCPWGQLLASAVLLLDKYTLQSYGLLCQTIHHNISTQTFNQFIQTSDHPSVPILLHHSHRFKNLGAQTGELWNTFLKTAAPLAPVKALMPVFTLSPVIINTAPCLFSDGSTSRAAYILWDKQILSQRSFPLPPPHKSAQRAELLGLLHGLSSARSWRCLNIFLDSKYLYHYLRTLALGTFQGRSSQAPFQALLPRLLSRKVVYLHHVRSHTNLPDPISRLNALTDALLITPVLQLAGKRTADGSEFEKRTADGSEFESPKKKAKVE

SEQ ID NO: 1484 - protein, 2013 aa, synthetic construct
MPAAKRVKLDGGDKKYSIGLDIGTNSVGWAVITDEYKVPSKKFKVLGNTDRHSIKKNLIGALLFDSGETAEATRLKRTARRRYTRRKNRICYLQEIFSNEMAKVDDSFFHRLEESFLVEEDKKHERHPIFGNIVDEVAYHEKYPTIYHLRKKLVDSTDKADLRLIYLALAHMIKFRGHFLIEGDLNPDNSDVDKLFIQLVQTYNQLFEENPINASGVDAKAILSARLSKSRRLENLIAQLPGEKKNGLFGNLIALSLGLTPNFKSNFDLAEDAKLQLSKDTYDDDLDNLLAQIGDQYADLFLAAKNLSDAILLSDILRVNTEITKAPLSASMIKRYDEHHQDLTLLKALVRQQLPEKYKEIFFDQSKNGYAGYIDGGASQEEFYKFIKPILEKMDGTEELLVKLNREDLLRKQRTFDNGSIPHQIHLGELHAILRRQEDFYPFLKDNREKIEKILTFRIPYYVGPLARGNSRFAWMTRKSEETITPWNFEEVVDKGASAQSFIERMTNFDKNLPNEKVLPKHSLLYEYFTVYNELTKVKYVTEGMRKPAFLSGEQKKAIVDLLFKTNRKVTVKQLKEDYFKKIECFDSVEISGVEDRFNASLGTYHDLLKIIKDKDFLDNEENEDILEDIVLTLTLFEDREMIEERLKTYAHLFDDKVMKQLKRRRYTGWGRLSRKLINGIRDKQSGKTILDFLKSDGFANRNFMQLIHDDSLTFKEDIQKAQVSGQGDSLHEHIANLAGSPAIKKGILQTVKVVDELVKVMGRHKPENIVIEMARENQTTQKGQKNSRERMKRIEEGIKELGSQILKEHPVENTQLQNEKLYLYYLQNGRDMYVDQELDINRLSDYDVDHIVPQSFLKDDSIDNKVLTRSDKARGKSDNVPSEEVVKKMKNYWRQLLNAKLITQRKFDNLTKAERGGLSELDKAGFIKRQLVETRQITKHVAQILDSRMNTKYDENDKLIREVKVITLKSKLVSDFRKDFQFYKVREINNYHHAHDAYLNAVVGTALIKKYPKLESEFVYGDYKVYDVRKMIAKSEQEIGKATAKYFFYSNIMNFFKTEITLANGEIRKRPLIETNGETGEIVWDKGRDFATVRKVLSMPQVNIVKKTEVQTGGFSKESILPKRNSDKLIARKKDWDPKKYGGFDSPTVAYSVLVVAKVEKGKSKKLKSVKELLGITIMERSSFEKNPIDFLEAKGYKEVKKDLIIKLPKYSLFELENGRKRMLASAGELQKGNELALPSKYVNFLYLASHYEKLKGSPEDNEQKQLFVEQHKHYLDEIIEQISEFSKRVILADANLDKVLSAYNKHRDKPIREQAENIIHLFTLTNLGAPAAFKYFDTTIDRKRYTSTKEVLDATLIHQSITGLYETRIDLSQLGGDGGGGSEAAAKPAPGGAVLGLEHLPRPPQISQFPLNPERLQALQHLVRKALEAGHIEPYTGPGNNPVFPVKKANGTWRFIHDLRATNSLTIDLSSSSPGPPDLSSLPTTLAHLQTIDLRDAFFQIPLPKQFQPYFAFTVPQQCNYGPGTRYAWKVLPQGFKNSPTLFQMQLAHILQPIRQAFPQCTILQYMDDILLASPSHEDLLLLSEATMASLISHGLPVSENKTQQTPGTIKFLGQIISPNHLTYDAVPTVPIRSRWALPELQALLGEIQWVSKGTPTLRQPLHSLYCALQPHTDPRDQIYLNPSQVQSLVQLRQALSQNCRSRLVQTLPLLGAIMLTLTGTTTVVFQSKEQWPLVWLHAPLPHTSQCPWGQLLASAVLLLDKYTLQSYGLLCQTIHHNISTQTFNQFIQTSDHPSVPILLHHSHRFKNLGAQTGELWNTFLKTAAPLAPVKALMPVFTLSPVIINTAPCLFSDGSTSRAAYILWDKQILSQRSFPLPPPHKSAQRAELLGLLHGLSSARSWRCLNIFLDSKYLYHYLRTLALGTFQGRSSQAPFQALLPRLLSRKVVYLHHVRSHTNLPDPISRLNALTDALLITPVLQLAGKRTADGSEFEKRTADGSEFESPKKKAKVE

SEQ ID NO: 1485 - protein, 2011 aa, synthetic construct
MPAAKRVKLDGGDKKYSIGLDIGTNSVGWAVITDEYKVPSKKFKVLGNTDRHSIKKNLIGALLFDSGETAEATRLKRTARRRYTRRKNRICYLQEIFSNEMAKVDDSFFHRLEESFLVEEDKKHERHPIFGNIVDEVAYHEKYPTIYHLRKKLVDSTDKADLRLIYLALAHMIKFRGHFLIEGDLNPDNSDVDKLFIQLVQTYNQLFEENPINASGVDAKAILSARLSKSRRLENLIAQLPGEKKNGLFGNLIALSLGLTPNFKSNFDLAEDAKLQLSKDTYDDDLDNLLAQIGDQYADLFLAAKNLSDAILLSDILRVNTEITKAPLSASMIKRYDEHHQDLTLLKALVRQQLPEKYKEIFFDQSKNGYAGYIDGGASQEEFYKFIKPILEKMDGTEELLVKLNREDLLRKQRTFDNGSIPHQIHLGELHAILRRQEDFYPFLKDNREKIEKILTFRIPYYVGPLARGNSRFAWMTRKSEETITPWNFEEVVDKGASAQSFIERMTNFDKNLPNEKVLPKHSLLYEYFTVYNELTKVKYVTEGMRKPAFLSGEQKKAIVDLLFKTNRKVTVKQLKEDYFKKIECFDSVEISGVEDRFNASLGTYHDLLKIIKDKDFLDNEENEDILEDIVLTLTLFEDREMIEERLKTYAHLFDDKVMKQLKRRRYTGWGRLSRKLINGIRDKQSGKTILDFLKSDGFANRNFMQLIHDDSLTFKEDIQKAQVSGQGDSLHEHIANLAGSPAIKKGILQTVKVVDELVKVMGRHKPENIVIEMARENQTTQKGQKNSRERMKRIEEGIKELGSQILKEHPVENTQLQNEKLYLYYLQNGRDMYVDQELDINRLSDYDVDHIVPQSFLKDDSIDNKVLTRSDKARGKSDNVPSEEVVKKMKNYWRQLLNAKLITQRKFDNLTKAERGGLSELDKAGFIKRQLVETRQITKHVAQILDSRMNTKYDENDKLIREVKVITLKSKLVSDFRKDFQFYKVREINNYHHAHDAYLNAVVGTALIKKYPKLESEFVYGDYKVYDVRKMIAKSEQEIGKATAKYFFYSNIMNFFKTEITLANGEIRKRPLIETNGETGEIVWDKGRDFATVRKVLSMPQVNIVKKTEVQTGGFSKESILPKRNSDKLIARKKDWDPKKYGGFDSPTVAYSVLVVAKVEKGKSKKLKSVKELLGITIMERSSFEKNPIDFLEAKGYKEVKKDLIIKLPKYSLFELENGRKRMLASAGELQKGNELALPSKYVNFLYLASHYEKLKGSPEDNEQKQLFVEQHKHYLDEIIEQISEFSKRVILADANLDKVLSAYNKHRDKPIREQAENIIHLFTLTNLGAPAAFKYFDTTIDRKRYTSTKEVLDATLIHQSITGLYETRIDLSQLGGDGGGGGGGSGSSGGAVLGLEHLPRPPQISQFPLNPERLQALQHLVRKALEAGHIEPYTGPGNNPVFPVKKANGTWRFIHDLRATNSLTIDLSSSSPGPPDLSSPPTTLAHLQTIDLRDAFFQIPLPKQFQPYFAFTVPQQCNYGPGTRYAWKVLPQGFKNSPTLFQMQLAHILQPIRQAFPQCTILQYMDDILLASPSHEDLLLLSEATMASLISHGLPVSENKTQQTPGTIKFLGQIISPNHLTYDAVPTVPIRSRWALPELQALLGEIQWVSKGTPTLRQPLHSLYCALQPHTDPRDQIYLNPSQVQSLVQLRQALSQNCRSRLVQTLPLLGAIMLTLTGTTTVVFQSKEQWPLVWLHAPLPHTSQCPWGQLLASAVLLLDKYTLQSYGLLCQTIHHNISTQTFNQFIQTSDHPSVPILLHHSHRFKNLGAQTGELWNTFLKTAAPLAPVKALMPVFTLSPVIINTAPCLFSDGSTSRAAYILWDKQILSQRSFPLPPPHKSAQRAELLGLLHGLSSARSWRCLNIFLDSKYLYHYLRTLALGTFQGRSSQAPFQALLPRLLSRKVVYLHHVRSHTNLPDPISRLNALTDALLITPVLQLAGKRTADGSEFEKRTADGSEFESPKKKAKVE

SEQ ID NO: 1486 - protein, 2013 aa, synthetic construct
MPAAKRVKLDGGDKKYSIGLDIGTNSVGWAVITDEYKVPSKKFKVLGNTDRHSIKKNLIGALLFDSGETAEATRLKRTARRRYTRRKNRICYLQEIFSNEMAKVDDSFFHRLEESFLVEEDKKHERHPIFGNIVDEVAYHEKYPTIYHLRKKLVDSTDKADLRLIYLALAHMIKFRGHFLIEGDLNPDNSDVDKLFIQLVQTYNQLFEENPINASGVDAKAILSARLSKSRRLENLIAQLPGEKKNGLFGNLIALSLGLTPNFKSNFDLAEDAKLQLSKDTYDDDLDNLLAQIGDQYADLFLAAKNLSDAILLSDILRVNTEITKAPLSASMIKRYDEHHQDLTLLKALVRQQLPEKYKEIFFDQSKNGYAGYIDGGASQEEFYKFIKPILEKMDGTEELLVKLNREDLLRKQRTFDNGSIPHQIHLGELHAILRRQEDFYPFLKDNREKIEKILTFRIPYYVGPLARGNSRFAWMTRKSEETITPWNFEEVVDKGASAQSFIERMTNFDKNLPNEKVLPKHSLLYEYFTVYNELTKVKYVTEGMRKPAFLSGEQKKAIVDLLFKTNRKVTVKQLKEDYFKKIECFDSVEISGVEDRFNASLGTYHDLLKIIKDKDFLDNEENEDILEDIVLTLTLFEDREMIEERLKTYAHLFDDKVMKQLKRRRYTGWGRLSRKLINGIRDKQSGKTILDFLKSDGFANRNFMQLIHDDSLTFKEDIQKAQVSGQGDSLHEHIANLAGSPAIKKGILQTVKVVDELVKVMGRHKPENIVIEMARENQTTQKGQKNSRERMKRIEEGIKELGSQILKEHPVENTQLQNEKLYLYYLQNGRDMYVDQELDINRLSDYDVDHIVPQSFLKDDSIDNKVLTRSDKARGKSDNVPSEEVVKKMKNYWRQLLNAKLITQRKFDNLTKAERGGLSELDKAGFIKRQLVETRQITKHVAQILDSRMNTKYDENDKLIREVKVITLKSKLVSDFRKDFQFYKVREINNYHHAHDAYLNAVVGTALIKKYPKLESEFVYGDYKVYDVRKMIAKSEQEIGKATAKYFFYSNIMNFFKTEITLANGEIRKRPLIETNGETGEIVWDKGRDFATVRKVLSMPQVNIVKKTEVQTGGFSKESILPKRNSDKLIARKKDWDPKKYGGFDSPTVAYSVLVVAKVEKGKSKKLKSVKELLGITIMERSSFEKNPIDFLEAKGYKEVKKDLIIKLPKYSLFELENGRKRMLASAGELQKGNELALPSKYVNFLYLASHYEKLKGSPEDNEQKQLFVEQHKHYLDEIIEQISEFSKRVILADANLDKVLSAYNKHRDKPIREQAENIIHLFTLTNLGAPAAFKYFDTTIDRKRYTSTKEVLDATLIHQSITGLYETRIDLSQLGGDGGEAAAKGSSGGSGGAVLGLEHLPRPPQISQFPLNPERLQALQHLVRKALEAGHIEPYTGPGNNPVFPVKKANGTWRFIHDLRATNSLTIDLSSSSPGPPDLSSPPTTLAHLQTIDLRDAFFQIPLPKQFQPYFAFTVPQQCNYGPGTRYAWKVLPQGFKNSPTLFQMQLAHILQPIRQAFPQCTILQYMDDILLASPSHEDLLLLSEATMASLISHGLPVSENKTQQTPGTIKFLGQIISPNHLTYDAVPTVPIRSRWALPELQALLGEIQWVSKGTPTLRQPLHSLYCALQPHTDPRDQIYLNPSQVQSLVQLRQALSQNCRSRLVQTLPLLGAIMLTLTGTTTVVFQSKEQWPLVWLHAPLPHTSQCPWGQLLASAVLLLDKYTLQSYGLLCQTIHHNISTQTFNQFIQTSDHPSVPILLHHSHRFKNLGAQTGELWNTFLKTAAPLAPVKALMPVFTLSPVIINTAPCLFSDGSTSRAAYILWDKQILSQRSFPLPPPHKSAQRAELLGLLHGLSSARSWRCLNIFLDSKYLYHYLRTLALGTFQGRSSQAPFQALLPRLLSRKVVYLHHVRSHTNLPDPISRLNALTDALLITPVLQLAGKRTADGSEFEKRTADGSEFESPKKKAKVE

SEQ ID NO: 1487 - protein, 2013 aa, synthetic construct
MPAAKRVKLDGGDKKYSIGLDIGTNSVGWAVITDEYKVPSKKFKVLGNTDRHSIKKNLIGALLFDSGETAEATRLKRTARRRYTRRKNRICYLQEIFSNEMAKVDDSFFHRLEESFLVEEDKKHERHPIFGNIVDEVAYHEKYPTIYHLRKKLVDSTDKADLRLIYLALAHMIKFRGHFLIEGDLNPDNSDVDKLFIQLVQTYNQLFEENPINASGVDAKAILSARLSKSRRLENLIAQLPGEKKNGLFGNLIALSLGLTPNFKSNFDLAEDAKLQLSKDTYDDDLDNLLAQIGDQYADLFLAAKNLSDAILLSDILRVNTEITKAPLSASMIKRYDEHHQDLTLLKALVRQQLPEKYKEIFFDQSKNGYAGYIDGGASQEEFYKFIKPILEKMDGTEELLVKLNREDLLRKQRTFDNGSIPHQIHLGELHAILRRQEDFYPFLKDNREKIEKILTFRIPYYVGPLARGNSRFAWMTRKSEETITPWNFEEVVDKGASAQSFIERMTNFDKNLPNEKVLPKHSLLYEYFTVYNELTKVKYVTEGMRKPAFLSGEQKKAIVDLLFKTNRKVTVKQLKEDYFKKIECFDSVEISGVEDRFNASLGTYHDLLKIIKDKDFLDNEENEDILEDIVLTLTLFEDREMIEERLKTYAHLFDDKVMKQLKRRRYTGWGRLSRKLINGIRDKQSGKTILDFLKSDGFANRNFMQLIHDDSLTFKEDIQKAQVSGQGDSLHEHIANLAGSPAIKKGILQTVKVVDELVKVMGRHKPENIVIEMARENQTTQKGQKNSRERMKRIEEGIKELGSQILKEHPVENTQLQNEKLYLYYLQNGRDMYVDQELDINRLSDYDVDHIVPQSFLKDDSIDNKVLTRSDKARGKSDNVPSEEVVKKMKNYWRQLLNAKLITQRKFDNLTKAERGGLSELDKAGFIKRQLVETRQITKHVAQILDSRMNTKYDENDKLIREVKVITLKSKLVSDFRKDFQFYKVREINNYHHAHDAYLNAVVGTALIKKYPKLESEFVYGDYKVYDVRKMIAKSEQEIGKATAKYFFYSNIMNFFKTEITLANGEIRKRPLIETNGETGEIVWDKGRDFATVRKVLSMPQVNIVKKTEVQTGGFSKESILPKRNSDKLIARKKDWDPKKYGGFDSPTVAYSVLVVAKVEKGKSKKLKSVKELLGITIMERSSFEKNPIDFLEAKGYKEVKKDLIIKLPKYSLFELENGRKRMLASAGELQKGNELALPSKYVNFLYLASHYEKLKGSPEDNEQKQLFVEQHKHYLDEIIEQISEFSKRVILADANLDKVLSAYNKHRDKPIREQAENIIHLFTLTNLGAPAAFKYFDTTIDRKRYTSTKEVLDATLIHQSITGLYETRIDLSQLGGDGGPAPEAAAKGGGGGAVLGLEHLPRPPQISQFPLNPERLQALQHLVRKALEAGHIEPYTGPGNNPVFPVKKANGTWRFIHDLRATNSLTIDLSSSSPGPPDLSSPPTTLAHLQTIDLRDAFFQIPLPKQFQPYFAFTVPQQCNYGPGTRYAWKVLPQGFKNSPTLFQMQLAHILQPIRQAFPQCTILQYMDDILLASPSHEDLLLLSEATMASLISHGLPVSENKTQQTPGTIKFLGQIISPNHLTYDAVPTVPIRSRWALPELQALLGEIQWVSKGTPTLRQPLHSLYCALQPHTDPRDQIYLNPSQVQSLVQLRQALSQNCRSRLVQTLPLLGAIMLTLTGTTTVVFQSKEQWPLVWLHAPLPHTSQCPWGQLLASAVLLLDKYTLQSYGLLCQTIHHNISTQTFNQFIQTSDHPSVPILLHHSHRFKNLGAQTGELWNTFLKTAAPLAPVKALMPVFTLSPVIINTAPCLFSDGSTSRAAYILWDKQILSQRSFPLPPPHKSAQRAELLGLLHGLSSARSWRCLNIFLDSKYLYHYLRTLALGTFQGRSSQAPFQALLPRLLSRKVVYLHHVRSHTNLPDPISRLNALTDALLITPVLQLAGKRTADGSEFEKRTADGSEFESPKKKAKVE

SEQ ID NO: 1488 - protein, 2017 aa, synthetic construct
MPAAKRVKLDGGDKKYSIGLDIGTNSVGWAVITDEYKVPSKKFKVLGNTDRHSIKKNLIGALLFDSGETAEATRLKRTARRRYTRRKNRICYLQEIFSNEMAKVDDSFFHRLEESFLVEEDKKHERHPIFGNIVDEVAYHEKYPTIYHLRKKLVDSTDKADLRLIYLALAHMIKFRGHFLIEGDLNPDNSDVDKLFIQLVQTYNQLFEENPINASGVDAKAILSARLSKSRRLENLIAQLPGEKKNGLFGNLIALSLGLTPNFKSNFDLAEDAKLQLSKDTYDDDLDNLLAQIGDQYADLFLAAKNLSDAILLSDILRVNTEITKAPLSASMIKRYDEHHQDLTLLKALVRQQLPEKYKEIFFDQSKNGYAGYIDGGASQEEFYKFIKPILEKMDGTEELLVKLNREDLLRKQRTFDNGSIPHQIHLGELHAILRRQEDFYPFLKDNREKIEKILTFRIPYYVGPLARGNSRFAWMTRKSEETITPWNFEEVVDKGASAQSFIERMTNFDKNLPNEKVLPKHSLLYEYFTVYNELTKVKYVTEGMRKPAFLSGEQKKAIVDLLFKTNRKVTVKQLKEDYFKKIECFDSVEISGVEDRFNASLGTYHDLLKIIKDKDFLDNEENEDILEDIVLTLTLFEDREMIEERLKTYAHLFDDKVMKQLKRRRYTGWGRLSRKLINGIRDKQSGKTILDFLKSDGFANRNFMQLIHDDSLTFKEDIQKAQVSGQGDSLHEHIANLAGSPAIKKGILQTVKVVDELVKVMGRHKPENIVIEMARENQTTQKGQKNSRERMKRIEEGIKELGSQILKEHPVENTQLQNEKLYLYYLQNGRDMYVDQELDINRLSDYDVDHIVPQSFLKDDSIDNKVLTRSDKARGKSDNVPSEEVVKKMKNYWRQLLNAKLITQRKFDNLTKAERGGLSELDKAGFIKRQLVETRQITKHVAQILDSRMNTKYDENDKLIREVKVITLKSKLVSDFRKDFQFYKVREINNYHHAHDAYLNAVVGTALIKKYPKLESEFVYGDYKVYDVRKMIAKSEQEIGKATAKYFFYSNIMNFFKTEITLANGEIRKRPLIETNGETGEIVWDKGRDFATVRKVLSMPQVNIVKKTEVQTGGFSKESILPKRNSDKLIARKKDWDPKKYGGFDSPTVAYSVLVVAKVEKGKSKKLKSVKELLGITIMERSSFEKNPIDFLEAKGYKEVKKDLIIKLPKYSLFELENGRKRMLASAGELQKGNELALPSKYVNFLYLASHYEKLKGSPEDNEQKQLFVEQHKHYLDEIIEQISEFSKRVILADANLDKVLSAYNKHRDKPIREQAENIIHLFTLTNLGAPAAFKYFDTTIDRKRYTSTKEVLDATLIHQSITGLYETRIDLSQLGGDGGGGGGSEAAAKGGGGSGGAVLGLEHLPRPPEISQFPLNPERLQALQHLVRKALEAGHIEPYTGPGNNPVFPVKKANGTWRFIHDLRATNSLTIDLSSSSPGPPDLSSLPTTLAHLQTIDLKDAFFQIPLPKQFQPYFAFTVPQQCNYGPGTRYAWRVLPQGFKNSPTLFEMQLAHILQPIRQAFPQCTILQYMDDILLASPSHADLQLLSEATMASLISHGLPVSENKTQQTPGTIKFLGQIISPNHLTYDAVPKVPIRSRWALPELQALLGEIQWVSKGTPTLRQPLHSLYCALQRHTDPRDQIYLNPSQVQSLVQLRQALSQNCRSRLVQTLPLLGAIMLTLTGTTTVVFQSKQQWPLVWLHAPLPHTSQCPWGQLLASAVLLLDKYTLQSYGLLCQTIHHNISTQTFNQFIQTSDHPSVPILLHHSHRFKNLGAQTGELWNTFLKTTAPLAPVKALMPVFTLSPVIINTAPCLFSDGSTSQAAYILWDKHILSQRSFPLPPPHKSAQRAELLGLLHGLSSARSWRCLNIFLDSKYLYHYLRTLALGTFQGRSSQAPFQALLPRLLSRKVVYLHHVRSHTNLPDPISRLNALTDALLITPVLQLAGKRTADGSEFEKRTADGSEFESPKKKAKVE

SEQ ID NO: 1489 - protein, 2017 aa, synthetic construct
MPAAKRVKLDGGDKKYSIGLDIGTNSVGWAVITDEYKVPSKKFKVLGNTDRHSIKKNLIGALLFDSGETAEATRLKRTARRRYTRRKNRICYLQEIFSNEMAKVDDSFFHRLEESFLVEEDKKHERHPIFGNIVDEVAYHEKYPTIYHLRKKLVDSTDKADLRLIYLALAHMIKFRGHFLIEGDLNPDNSDVDKLFIQLVQTYNQLFEENPINASGVDAKAILSARLSKSRRLENLIAQLPGEKKNGLFGNLIALSLGLTPNFKSNFDLAEDAKLQLSKDTYDDDLDNLLAQIGDQYADLFLAAKNLSDAILLSDILRVNTEITKAPLSASMIKRYDEHHQDLTLLKALVRQQLPEKYKEIFFDQSKNGYAGYIDGGASQEEFYKFIKPILEKMDGTEELLVKLNREDLLRKQRTFDNGSIPHQIHLGELHAILRRQEDFYPFLKDNREKIEKILTFRIPYYVGPLARGNSRFAWMTRKSEETITPWNFEEVVDKGASAQSFIERMTNFDKNLPNEKVLPKHSLLYEYFTVYNELTKVKYVTEGMRKPAFLSGEQKKAIVDLLFKTNRKVTVKQLKEDYFKKIECFDSVEISGVEDRFNASLGTYHDLLKIIKDKDFLDNEENEDILEDIVLTLTLFEDREMIEERLKTYAHLFDDKVMKQLKRRRYTGWGRLSRKLINGIRDKQSGKTILDFLKSDGFANRNFMQLIHDDSLTFKEDIQKAQVSGQGDSLHEHIANLAGSPAIKKGILQTVKVVDELVKVMGRHKPENIVIEMARENQTTQKGQKNSRERMKRIEEGIKELGSQILKEHPVENTQLQNEKLYLYYLQNGRDMYVDQELDINRLSDYDVDHIVPQSFLKDDSIDNKVLTRSDKARGKSDNVPSEEVVKKMKNYWRQLLNAKLITQRKFDNLTKAERGGLSELDKAGFIKRQLVETRQITKHVAQILDSRMNTKYDENDKLIREVKVITLKSKLVSDFRKDFQFYKVREINNYHHAHDAYLNAVVGTALIKKYPKLESEFVYGDYKVYDVRKMIAKSEQEIGKATAKYFFYSNIMNFFKTEITLANGEIRKRPLIETNGETGEIVWDKGRDFATVRKVLSMPQVNIVKKTEVQTGGFSKESILPKRNSDKLIARKKDWDPKKYGGFDSPTVAYSVLVVAKVEKGKSKKLKSVKELLGITIMERSSFEKNPIDFLEAKGYKEVKKDLIIKLPKYSLFELENGRKRMLASAGELQKGNELALPSKYVNFLYLASHYEKLKGSPEDNEQKQLFVEQHKHYLDEIIEQISEFSKRVILADANLDKVLSAYNKHRDKPIREQAENIIHLFTLTNLGAPAAFKYFDTTIDRKRYTSTKEVLDATLIHQSITGLYETRIDLSQLGGDGGEAAAKEAAAKEAAAKGGAVLGLEHLPRPPEISQFPLNPERLQALQHLVRKALEAGHIEPYTGPGNNPVFPVKKANGTWRFIHDLRATNSLTIDLSSSSPGPPDLSSLPTTLAHLQTIDLKDAFFQIPLPKQFQPYFAFTVPQQCNYGPGTRYAWRVLPQGFKNSPTLFEMQLAHILQPIRQAFPQCTILQYMDDILLASPSHADLQLLSEATMASLISHGLPVSENKTQQTPGTIKFLGQIISPNHLTYDAVPKVPIRSRWALPELQALLGEIQWVSKGTPTLRQPLHSLYCALQRHTDPRDQIYLNPSQVQSLVQLRQALSQNCRSRLVQTLPLLGAIMLTLTGTTTVVFQSKQQWPLVWLHAPLPHTSQCPWGQLLASAVLLLDKYTLQSYGLLCQTIHHNISTQTFNQFIQTSDHPSVPILLHHSHRFKNLGAQTGELWNTFLKTTAPLAPVKALMPVFTLSPVIINTAPCLFSDGSTSQAAYILWDKHILSQRSFPLPPPHKSAQRAELLGLLHGLSSARSWRCLNIFLDSKYLYHYLRTLALGTFQGRSSQAPFQALLPRLLSRKVVYLHHVRSHTNLPDPISRLNALTDALLITPVLQLAGKRTADGSEFEKRTADGSEFESPKKKAKVE

SEQ ID NO: 1490 - protein, 2010 aa, synthetic construct
MPAAKRVKLDGGDKKYSIGLDIGTNSVGWAVITDEYKVPSKKFKVLGNTDRHSIKKNLIGALLFDSGETAEATRLKRTARRRYTRRKNRICYLQEIFSNEMAKVDDSFFHRLEESFLVEEDKKHERHPIFGNIVDEVAYHEKYPTIYHLRKKLVDSTDKADLRLIYLALAHMIKFRGHFLIEGDLNPDNSDVDKLFIQLVQTYNQLFEENPINASGVDAKAILSARLSKSRRLENLIAQLPGEKKNGLFGNLIALSLGLTPNFKSNFDLAEDAKLQLSKDTYDDDLDNLLAQIGDQYADLFLAAKNLSDAILLSDILRVNTEITKAPLSASMIKRYDEHHQDLTLLKALVRQQLPEKYKEIFFDQSKNGYAGYIDGGASQEEFYKFIKPILEKMDGTEELLVKLNREDLLRKQRTFDNGSIPHQIHLGELHAILRRQEDFYPFLKDNREKIEKILTFRIPYYVGPLARGNSRFAWMTRKSEETITPWNFEEVVDKGASAQSFIERMTNFDKNLPNEKVLPKHSLLYEYFTVYNELTKVKYVTEGMRKPAFLSGEQKKAIVDLLFKTNRKVTVKQLKEDYFKKIECFDSVEISGVEDRFNASLGTYHDLLKIIKDKDFLDNEENEDILEDIVLTLTLFEDREMIEERLKTYAHLFDDKVMKQLKRRRYTGWGRLSRKLINGIRDKQSGKTILDFLKSDGFANRNFMQLIHDDSLTFKEDIQKAQVSGQGDSLHEHIANLAGSPAIKKGILQTVKVVDELVKVMGRHKPENIVIEMARENQTTQKGQKNSRERMKRIEEGIKELGSQILKEHPVENTQLQNEKLYLYYLQNGRDMYVDQELDINRLSDYDVDHIVPQSFLKDDSIDNKVLTRSDKARGKSDNVPSEEVVKKMKNYWRQLLNAKLITQRKFDNLTKAERGGLSELDKAGFIKRQLVETRQITKHVAQILDSRMNTKYDENDKLIREVKVITLKSKLVSDFRKDFQFYKVREINNYHHAHDAYLNAVVGTALIKKYPKLESEFVYGDYKVYDVRKMIAKSEQEIGKATAKYFFYSNIMNFFKTEITLANGEIRKRPLIETNGETGEIVWDKGRDFATVRKVLSMPQVNIVKKTEVQTGGFSKESILPKRNSDKLIARKKDWDPKKYGGFDSPTVAYSVLVVAKVEKGKSKKLKSVKELLGITIMERSSFEKNPIDFLEAKGYKEVKKDLIIKLPKYSLFELENGRKRMLASAGELQKGNELALPSKYVNFLYLASHYEKLKGSPEDNEQKQLFVEQHKHYLDEIIEQISEFSKRVILADANLDKVLSAYNKHRDKPIREQAENIIHLFTLTNLGAPAAFKYFDTTIDRKRYTSTKEVLDATLIHQSITGLYETRIDLSQLGGDGGGGGEAAAKGGAVLGLEHLPRPPEISQFPLNPERLQALQHLVRKALEAGHIEPYTGPGNNPVFPVKKANGTWRFIHDLRATNSLTIDLSSSSPGPPDLSSLPTTLAHLQTIDLKDAFFQIPLPKQFQPYFAFTVPQQCNYGPGTRYAWRVLPQGFKNSPTLFEMQLAHILQPIRQAFPQCTILQYMDDILLASPSHADLQLLSEATMASLISHGLPVSENKTQQTPGTIKFLGQIISPNHLTYDAVPKVPIRSRWALPELQALLGEIQWVSKGTPTLRQPLHSLYCALQRHTDPRDQIYLNPSQVQSLVQLRQALSQNCRSRLVQTLPLLGAIMLTLTGTTTVVFQSKQQWPLVWLHAPLPHTSQCPWGQLLASAVLLLDKYTLQSYGLLCQTIHHNISTQTFNQFIQTSDHPSVPILLHHSHRFKNLGAQTGELWNTFLKTTAPLAPVKALMPVFTLSPVIINTAPCLFSDGSTSQAAYILWDKHILSQRSFPLPPPHKSAQRAELLGLLHGLSSARSWRCLNIFLDSKYLYHYLRTLALGTFQGRSSQAPFQALLPRLLSRKVVYLHHVRSHTNLPDPISRLNALTDALLITPVLQLAGKRTADGSEFEKRTADGSEFESPKKKAKVE

SEQ ID NO: 1491 - protein, 2027 aa, synthetic construct
MPAAKRVKLDGGDKKYSIGLDIGTNSVGWAVITDEYKVPSKKFKVLGNTDRHSIKKNLIGALLFDSGETAEATRLKRTARRRYTRRKNRICYLQEIFSNEMAKVDDSFFHRLEESFLVEEDKKHERHPIFGNIVDEVAYHEKYPTIYHLRKKLVDSTDKADLRLIYLALAHMIKFRGHFLIEGDLNPDNSDVDKLFIQLVQTYNQLFEENPINASGVDAKAILSARLSKSRRLENLIAQLPGEKKNGLFGNLIALSLGLTPNFKSNFDLAEDAKLQLSKDTYDDDLDNLLAQIGDQYADLFLAAKNLSDAILLSDILRVNTEITKAPLSASMIKRYDEHHQDLTLLKALVRQQLPEKYKEIFFDQSKNGYAGYIDGGASQEEFYKFIKPILEKMDGTEELLVKLNREDLLRKQRTFDNGSIPHQIHLGELHAILRRQEDFYPFLKDNREKIEKILTFRIPYYVGPLARGNSRFAWMTRKSEETITPWNFEEVVDKGASAQSFIERMTNFDKNLPNEKVLPKHSLLYEYFTVYNELTKVKYVTEGMRKPAFLSGEQKKAIVDLLFKTNRKVTVKQLKEDYFKKIECFDSVEISGVEDRFNASLGTYHDLLKIIKDKDFLDNEENEDILEDIVLTLTLFEDREMIEERLKTYAHLFDDKVMKQLKRRRYTGWGRLSRKLINGIRDKQSGKTILDFLKSDGFANRNFMQLIHDDSLTFKEDIQKAQVSGQGDSLHEHIANLAGSPAIKKGILQTVKVVDELVKVMGRHKPENIVIEMARENQTTQKGQKNSRERMKRIEEGIKELGSQILKEHPVENTQLQNEKLYLYYLQNGRDMYVDQELDINRLSDYDVDHIVPQSFLKDDSIDNKVLTRSDKARGKSDNVPSEEVVKKMKNYWRQLLNAKLITQRKFDNLTKAERGGLSELDKAGFIKRQLVETRQITKHVAQILDSRMNTKYDENDKLIREVKVITLKSKLVSDFRKDFQFYKVREINNYHHAHDAYLNAVVGTALIKKYPKLESEFVYGDYKVYDVRKMIAKSEQEIGKATAKYFFYSNIMNFFKTEITLANGEIRKRPLIETNGETGEIVWDKGRDFATVRKVLSMPQVNIVKKTEVQTGGFSKESILPKRNSDKLIARKKDWDPKKYGGFDSPTVAYSVLVVAKVEKGKSKKLKSVKELLGITIMERSSFEKNPIDFLEAKGYKEVKKDLIIKLPKYSLFELENGRKRMLASAGELQKGNELALPSKYVNFLYLASHYEKLKGSPEDNEQKQLFVEQHKHYLDEIIEQISEFSKRVILADANLDKVLSAYNKHRDKPIREQAENIIHLFTLTNLGAPAAFKYFDTTIDRKRYTSTKEVLDATLIHQSITGLYETRIDLSQLGGDGGGGGGSGGGGSGGGGSGGGGSGGGGSGGAVLGLEHLPRPPEISQFPLNPERLQALQHLVRKALEAGHIEPYTGPGNNPVFPVKKANGTWRFIHDLRATNSLTIDLSSSSPGPPDLSSLPTTLAHLQTIDLKDAFFQIPLPKQFQPYFAFTVPQQCNYGPGTRYAWRVLPQGFKNSPTLFEMQLAHILQPIRQAFPQCTILQYMDDILLASPSHADLQLLSEATMASLISHGLPVSENKTQQTPGTIKFLGQIISPNHLTYDAVPKVPIRSRWALPELQALLGEIQWVSKGTPTLRQPLHSLYCALQRHTDPRDQIYLNPSQVQSLVQLRQALSQNCRSRLVQTLPLLGAIMLTLTGTTTVVFQSKQQWPLVWLHAPLPHTSQCPWGQLLASAVLLLDKYTLQSYGLLCQTIHHNISTQTFNQFIQTSDHPSVPILLHHSHRFKNLGAQTGELWNTFLKTTAPLAPVKALMPVFTLSPVIINTAPCLFSDGSTSQAAYILWDKHILSQRSFPLPPPHKSAQRAELLGLLHGLSSARSWRCLNIFLDSKYLYHYLRTLALGTFQGRSSQAPFQALLPRLLSRKVVYLHHVRSHTNLPDPISRLNALTDALLITPVLQLAGKRTADGSEFEKRTADGSEFESPKKKAKVE

SEQ ID NO: 1492 - protein, 2011 aa, synthetic construct
MPAAKRVKLDGGDKKYSIGLDIGTNSVGWAVITDEYKVPSKKFKVLGNTDRHSIKKNLIGALLFDSGETAEATRLKRTARRRYTRRKNRICYLQEIFSNEMAKVDDSFFHRLEESFLVEEDKKHERHPIFGNIVDEVAYHEKYPTIYHLRKKLVDSTDKADLRLIYLALAHMIKFRGHFLIEGDLNPDNSDVDKLFIQLVQTYNQLFEENPINASGVDAKAILSARLSKSRRLENLIAQLPGEKKNGLFGNLIALSLGLTPNFKSNFDLAEDAKLQLSKDTYDDDLDNLLAQIGDQYADLFLAAKNLSDAILLSDILRVNTEITKAPLSASMIKRYDEHHQDLTLLKALVRQQLPEKYKEIFFDQSKNGYAGYIDGGASQEEFYKFIKPILEKMDGTEELLVKLNREDLLRKQRTFDNGSIPHQIHLGELHAILRRQEDFYPFLKDNREKIEKILTFRIPYYVGPLARGNSRFAWMTRKSEETITPWNFEEVVDKGASAQSFIERMTNFDKNLPNEKVLPKHSLLYEYFTVYNELTKVKYVTEGMRKPAFLSGEQKKAIVDLLFKTNRKVTVKQLKEDYFKKIECFDSVEISGVEDRFNASLGTYHDLLKIIKDKDFLDNEENEDILEDIVLTLTLFEDREMIEERLKTYAHLFDDKVMKQLKRRRYTGWGRLSRKLINGIRDKQSGKTILDFLKSDGFANRNFMQLIHDDSLTFKEDIQKAQVSGQGDSLHEHIANLAGSPAIKKGILQTVKVVDELVKVMGRHKPENIVIEMARENQTTQKGQKNSRERMKRIEEGIKELGSQILKEHPVENTQLQNEKLYLYYLQNGRDMYVDQELDINRLSDYDVDHIVPQSFLKDDSIDNKVLTRSDKARGKSDNVPSEEVVKKMKNYWRQLLNAKLITQRKFDNLTKAERGGLSELDKAGFIKRQLVETRQITKHVAQILDSRMNTKYDENDKLIREVKVITLKSKLVSDFRKDFQFYKVREINNYHHAHDAYLNAVVGTALIKKYPKLESEFVYGDYKVYDVRKMIAKSEQEIGKATAKYFFYSNIMNFFKTEITLANGEIRKRPLIETNGETGEIVWDKGRDFATVRKVLSMPQVNIVKKTEVQTGGFSKESILPKRNSDKLIARKKDWDPKKYGGFDSPTVAYSVLVVAKVEKGKSKKLKSVKELLGITIMERSSFEKNPIDFLEAKGYKEVKKDLIIKLPKYSLFELENGRKRMLASAGELQKGNELALPSKYVNFLYLASHYEKLKGSPEDNEQKQLFVEQHKHYLDEIIEQISEFSKRVILADANLDKVLSAYNKHRDKPIREQAENIIHLFTLTNLGAPAAFKYFDTTIDRKRYTSTKEVLDATLIHQSITGLYETRIDLSQLGGDGGGGGGGSPAPGGAVLGLEHLPRPPEISQFPLNPERLQALQHLVRKALEAGHIEPYTGPGNNPVFPVKKANGTWRFIHDLRATNSLTIDLSSSSPGPPDLSSLPTTLAHLQTIDLKDAFFQIPLPKQFQPYFAFTVPQQCNYGPGTRYAWRVLPQGFKNSPTLFQMQLAHILQPIRQAFPQCTILQYMDDILLASPSHADLQLLSEATMASLISHGLPVSENKTQQTPGTIKFLGQIISPNHLTYDAVPKVPIRSRWALPELQALLGEIQWVSKGTPTLRQPLHSLYCALQPHTDPRDQIYLNPSQVQSLVQLRQALSQNCRSRLVQTLPLLGAIMLTLTGTTTVVFQSKQQWPLVWLHAPLPHTSQCPWGQLLASAVLLLDKYTLQSYGLLCQTIHHNISTQTFNQFIQTSDHPSVPILLHHSHRFKNLGAQTGELWNTFLKTTAPLAPVKALMPVFTLSPVIINTAPCLFSDGSTSQAAYILWDKHILSQRSFPLPPPHKSAQRAELLGLLHGLSSARSWRCLNIFLDSKYLYHYLRTLALGTFQGRSSQAPFQALLPRLLSRKVVYLHHVRSHTNLPDPISRLNALTDALLITPVLQLAGKRTADGSEFEKRTADGSEFESPKKKAKVE

SEQ ID NO: 1493 - protein, 2008 aa, synthetic construct
MPAAKRVKLDGGDKKYSIGLDIGTNSVGWAVITDEYKVPSKKFKVLGNTDRHSIKKNLIGALLFDSGETAEATRLKRTARRRYTRRKNRICYLQEIFSNEMAKVDDSFFHRLEESFLVEEDKKHERHPIFGNIVDEVAYHEKYPTIYHLRKKLVDSTDKADLRLIYLALAHMIKFRGHFLIEGDLNPDNSDVDKLFIQLVQTYNQLFEENPINASGVDAKAILSARLSKSRRLENLIAQLPGEKKNGLFGNLIALSLGLTPNFKSNFDLAEDAKLQLSKDTYDDDLDNLLAQIGDQYADLFLAAKNLSDAILLSDILRVNTEITKAPLSASMIKRYDEHHQDLTLLKALVRQQLPEKYKEIFFDQSKNGYAGYIDGGASQEEFYKFIKPILEKMDGTEELLVKLNREDLLRKQRTFDNGSIPHQIHLGELHAILRRQEDFYPFLKDNREKIEKILTFRIPYYVGPLARGNSRFAWMTRKSEETITPWNFEEVVDKGASAQSFIERMTNFDKNLPNEKVLPKHSLLYEYFTVYNELTKVKYVTEGMRKPAFLSGEQKKAIVDLLFKTNRKVTVKQLKEDYFKKIECFDSVEISGVEDRFNASLGTYHDLLKIIKDKDFLDNEENEDILEDIVLTLTLFEDREMIEERLKTYAHLFDDKVMKQLKRRRYTGWGRLSRKLINGIRDKQSGKTILDFLKSDGFANRNFMQLIHDDSLTFKEDIQKAQVSGQGDSLHEHIANLAGSPAIKKGILQTVKVVDELVKVMGRHKPENIVIEMARENQTTQKGQKNSRERMKRIEEGIKELGSQILKEHPVENTQLQNEKLYLYYLQNGRDMYVDQELDINRLSDYDVDHIVPQSFLKDDSIDNKVLTRSDKARGKSDNVPSEEVVKKMKNYWRQLLNAKLITQRKFDNLTKAERGGLSELDKAGFIKRQLVETRQITKHVAQILDSRMNTKYDENDKLIREVKVITLKSKLVSDFRKDFQFYKVREINNYHHAHDAYLNAVVGTALIKKYPKLESEFVYGDYKVYDVRKMIAKSEQEIGKATAKYFFYSNIMNFFKTEITLANGEIRKRPLIETNGETGEIVWDKGRDFATVRKVLSMPQVNIVKKTEVQTGGFSKESILPKRNSDKLIARKKDWDPKKYGGFDSPTVAYSVLVVAKVEKGKSKKLKSVKELLGITIMERSSFEKNPIDFLEAKGYKEVKKDLIIKLPKYSLFELENGRKRMLASAGELQKGNELALPSKYVNFLYLASHYEKLKGSPEDNEQKQLFVEQHKHYLDEIIEQISEFSKRVILADANLDKVLSAYNKHRDKPIREQAENIIHLFTLTNLGAPAAFKYFDTTIDRKRYTSTKEVLDATLIHQSITGLYETRIDLSQLGGDGGPAPGGSGGAVLGLEHLPRPPEISQFPLNPERLQALQHLVRKALEAGHIEPYTGPGNNPVFPVKKANGTWRFIHDLRATNSLTIDLSSSSPGPPDLSSLPTTLAHLQTIDLKDAFFQIPLPKQFQPYFAFTVPQQCNYGPGTRYAWRVLPQGFKNSPTLFQMQLAHILQPIRQAFPQCTILQYMDDILLASPSHADLQLLSEATMASLISHGLPVSENKTQQTPGTIKFLGQIISPNHLTYDAVPKVPIRSRWALPELQALLGEIQWVSKGTPTLRQPLHSLYCALQPHTDPRDQIYLNPSQVQSLVQLRQALSQNCRSRLVQTLPLLGAIMLTLTGTTTVVFQSKQQWPLVWLHAPLPHTSQCPWGQLLASAVLLLDKYTLQSYGLLCQTIHHNISTQTFNQFIQTSDHPSVPILLHHSHRFKNLGAQTGELWNTFLKTTAPLAPVKALMPVFTLSPVIINTAPCLFSDGSTSQAAYILWDKHILSQRSFPLPPPHKSAQRAELLGLLHGLSSARSWRCLNIFLDSKYLYHYLRTLALGTFQGRSSQAPFQALLPRLLSRKVVYLHHVRSHTNLPDPISRLNALTDALLITPVLQLAGKRTADGSEFEKRTADGSEFESPKKKAKVE

SEQ ID NO: 1494 - protein, 2011 aa, synthetic construct
MPAAKRVKLDGGDKKYSIGLDIGTNSVGWAVITDEYKVPSKKFKVLGNTDRHSIKKNLIGALLFDSGETAEATRLKRTARRRYTRRKNRICYLQEIFSNEMAKVDDSFFHRLEESFLVEEDKKHERHPIFGNIVDEVAYHEKYPTIYHLRKKLVDSTDKADLRLIYLALAHMIKFRGHFLIEGDLNPDNSDVDKLFIQLVQTYNQLFEENPINASGVDAKAILSARLSKSRRLENLIAQLPGEKKNGLFGNLIALSLGLTPNFKSNFDLAEDAKLQLSKDTYDDDLDNLLAQIGDQYADLFLAAKNLSDAILLSDILRVNTEITKAPLSASMIKRYDEHHQDLTLLKALVRQQLPEKYKEIFFDQSKNGYAGYIDGGASQEEFYKFIKPILEKMDGTEELLVKLNREDLLRKQRTFDNGSIPHQIHLGELHAILRRQEDFYPFLKDNREKIEKILTFRIPYYVGPLARGNSRFAWMTRKSEETITPWNFEEVVDKGASAQSFIERMTNFDKNLPNEKVLPKHSLLYEYFTVYNELTKVKYVTEGMRKPAFLSGEQKKAIVDLLFKTNRKVTVKQLKEDYFKKIECFDSVEISGVEDRFNASLGTYHDLLKIIKDKDFLDNEENEDILEDIVLTLTLFEDREMIEERLKTYAHLFDDKVMKQLKRRRYTGWGRLSRKLINGIRDKQSGKTILDFLKSDGFANRNFMQLIHDDSLTFKEDIQKAQVSGQGDSLHEHIANLAGSPAIKKGILQTVKVVDELVKVMGRHKPENIVIEMARENQTTQKGQKNSRERMKRIEEGIKELGSQILKEHPVENTQLQNEKLYLYYLQNGRDMYVDQELDINRLSDYDVDHIVPQSFLKDDSIDNKVLTRSDKARGKSDNVPSEEVVKKMKNYWRQLLNAKLITQRKFDNLTKAERGGLSELDKAGFIKRQLVETRQITKHVAQILDSRMNTKYDENDKLIREVKVITLKSKLVSDFRKDFQFYKVREINNYHHAHDAYLNAVVGTALIKKYPKLESEFVYGDYKVYDVRKMIAKSEQEIGKATAKYFFYSNIMNFFKTEITLANGEIRKRPLIETNGETGEIVWDKGRDFATVRKVLSMPQVNIVKKTEVQTGGFSKESILPKRNSDKLIARKKDWDPKKYGGFDSPTVAYSVLVVAKVEKGKSKKLKSVKELLGITIMERSSFEKNPIDFLEAKGYKEVKKDLIIKLPKYSLFELENGRKRMLASAGELQKGNELALPSKYVNFLYLASHYEKLKGSPEDNEQKQLFVEQHKHYLDEIIEQISEFSKRVILADANLDKVLSAYNKHRDKPIREQAENIIHLFTLTNLGAPAAFKYFDTTIDRKRYTSTKEVLDATLIHQSITGLYETRIDLSQLGGDGGGGGPAPGGSGGAVLGLEHLPRPPEISQFPLNPERLQALQHLVRKALEAGHIEPYTGPGNNPVFPVKKANGTWRFIHDLRATNSLTIDLSSSSPGPPDLSSLPTTLAHLQTIDLKDAFFQIPLPKQFQPYFAFTVPQQCNYGPGTRYAWRVLPQGFKNSPTLFQMQLAHILQPIRQAFPQCTILQYMDDILLASPSHADLQLLSEATMASLISHGLPVSENKTQQTPGTIKFLGQIISPNHLTYDAVPKVPIRSRWALPELQALLGEIQWVSKGTPTLRQPLHSLYCALQPHTDPRDQIYLNPSQVQSLVQLRQALSQNCRSRLVQTLPLLGAIMLTLTGTTTVVFQSKQQWPLVWLHAPLPHTSQCPWGQLLASAVLLLDKYTLQSYGLLCQTIHHNISTQTFNQFIQTSDHPSVPILLHHSHRFKNLGAQTGELWNTFLKTTAPLAPVKALMPVFTLSPVIINTAPCLFSDGSTSQAAYILWDKHILSQRSFPLPPPHKSAQRAELLGLLHGLSSARSWRCLNIFLDSKYLYHYLRTLALGTFQGRSSQAPFQALLPRLLSRKVVYLHHVRSHTNLPDPISRLNALTDALLITPVLQLAGKRTADGSEFEKRTADGSEFESPKKKAKVE

SEQ ID NO: 1495 - protein, 2017 aa, synthetic construct
MPAAKRVKLDGGDKKYSIGLDIGTNSVGWAVITDEYKVPSKKFKVLGNTDRHSIKKNLIGALLFDSGETAEATRLKRTARRRYTRRKNRICYLQEIFSNEMAKVDDSFFHRLEESFLVEEDKKHERHPIFGNIVDEVAYHEKYPTIYHLRKKLVDSTDKADLRLIYLALAHMIKFRGHFLIEGDLNPDNSDVDKLFIQLVQTYNQLFEENPINASGVDAKAILSARLSKSRRLENLIAQLPGEKKNGLFGNLIALSLGLTPNFKSNFDLAEDAKLQLSKDTYDDDLDNLLAQIGDQYADLFLAAKNLSDAILLSDILRVNTEITKAPLSASMIKRYDEHHQDLTLLKALVRQQLPEKYKEIFFDQSKNGYAGYIDGGASQEEFYKFIKPILEKMDGTEELLVKLNREDLLRKQRTFDNGSIPHQIHLGELHAILRRQEDFYPFLKDNREKIEKILTFRIPYYVGPLARGNSRFAWMTRKSEETITPWNFEEVVDKGASAQSFIERMTNFDKNLPNEKVLPKHSLLYEYFTVYNELTKVKYVTEGMRKPAFLSGEQKKAIVDLLFKTNRKVTVKQLKEDYFKKIECFDSVEISGVEDRFNASLGTYHDLLKIIKDKDFLDNEENEDILEDIVLTLTLFEDREMIEERLKTYAHLFDDKVMKQLKRRRYTGWGRLSRKLINGIRDKQSGKTILDFLKSDGFANRNFMQLIHDDSLTFKEDIQKAQVSGQGDSLHEHIANLAGSPAIKKGILQTVKVVDELVKVMGRHKPENIVIEMARENQTTQKGQKNSRERMKRIEEGIKELGSQILKEHPVENTQLQNEKLYLYYLQNGRDMYVDQELDINRLSDYDVDHIVPQSFLKDDSIDNKVLTRSDKARGKSDNVPSEEVVKKMKNYWRQLLNAKLITQRKFDNLTKAERGGLSELDKAGFIKRQLVETRQITKHVAQILDSRMNTKYDENDKLIREVKVITLKSKLVSDFRKDFQFYKVREINNYHHAHDAYLNAVVGTALIKKYPKLESEFVYGDYKVYDVRKMIAKSEQEIGKATAKYFFYSNIMNFFKTEITLANGEIRKRPLIETNGETGEIVWDKGRDFATVRKVLSMPQVNIVKKTEVQTGGFSKESILPKRNSDKLIARKKDWDPKKYGGFDSPTVAYSVLVVAKVEKGKSKKLKSVKELLGITIMERSSFEKNPIDFLEAKGYKEVKKDLIIKLPKYSLFELENGRKRMLASAGELQKGNELALPSKYVNFLYLASHYEKLKGSPEDNEQKQLFVEQHKHYLDEIIEQISEFSKRVILADANLDKVLSAYNKHRDKPIREQAENIIHLFTLTNLGAPAAFKYFDTTIDRKRYTSTKEVLDATLIHQSITGLYETRIDLSQLGGDGGGSSGSSGSSGSSGSSGGAVLGLEHLPRPPEISQFPLNPERLQALQHLVRKALEAGHIEPYTGPGNNPVFPVKKANGTWRFIHDLRATNSLTIDLSSSSPGPPDLSSLPTTLAHLQTIDLKDAFFQIPLPKQFQPYFAFTVPQQCNYGPGTRYAWRVLPQGFKNSPTLFQMQLAHILQPIRQAFPQCTILQYMDDILLASPSHADLQLLSEATMASLISHGLPVSENKTQQTPGTIKFLGQIISPNHLTYDAVPKVPIRSRWALPELQALLGEIQWVSKGTPTLRQPLHSLYCALQPHTDPRDQIYLNPSQVQSLVQLRQALSQNCRSRLVQTLPLLGAIMLTLTGTTTVVFQSKQQWPLVWLHAPLPHTSQCPWGQLLASAVLLLDKYTLQSYGLLCQTIHHNISTQTFNQFIQTSDHPSVPILLHHSHRFKNLGAQTGELWNTFLKTTAPLAPVKALMPVFTLSPVIINTAPCLFSDGSTSQAAYILWDKHILSQRSFPLPPPHKSAQRAELLGLLHGLSSARSWRCLNIFLDSKYLYHYLRTLALGTFQGRSSQAPFQALLPRLLSRKVVYLHHVRSHTNLPDPISRLNALTDALLITPVLQLAGKRTADGSEFEKRTADGSEFESPKKKAKVE

SEQ ID NO: 1496 - protein, 2002 aa, synthetic construct
MPAAKRVKLDGGDKKYSIGLDIGTNSVGWAVITDEYKVPSKKFKVLGNTDRHSIKKNLIGALLFDSGETAEATRLKRTARRRYTRRKNRICYLQEIFSNEMAKVDDSFFHRLEESFLVEEDKKHERHPIFGNIVDEVAYHEKYPTIYHLRKKLVDSTDKADLRLIYLALAHMIKFRGHFLIEGDLNPDNSDVDKLFIQLVQTYNQLFEENPINASGVDAKAILSARLSKSRRLENLIAQLPGEKKNGLFGNLIALSLGLTPNFKSNFDLAEDAKLQLSKDTYDDDLDNLLAQIGDQYADLFLAAKNLSDAILLSDILRVNTEITKAPLSASMIKRYDEHHQDLTLLKALVRQQLPEKYKEIFFDQSKNGYAGYIDGGASQEEFYKFIKPILEKMDGTEELLVKLNREDLLRKQRTFDNGSIPHQIHLGELHAILRRQEDFYPFLKDNREKIEKILTFRIPYYVGPLARGNSRFAWMTRKSEETITPWNFEEVVDKGASAQSFIERMTNFDKNLPNEKVLPKHSLLYEYFTVYNELTKVKYVTEGMRKPAFLSGEQKKAIVDLLFKTNRKVTVKQLKEDYFKKIECFDSVEISGVEDRFNASLGTYHDLLKIIKDKDFLDNEENEDILEDIVLTLTLFEDREMIEERLKTYAHLFDDKVMKQLKRRRYTGWGRLSRKLINGIRDKQSGKTILDFLKSDGFANRNFMQLIHDDSLTFKEDIQKAQVSGQGDSLHEHIANLAGSPAIKKGILQTVKVVDELVKVMGRHKPENIVIEMARENQTTQKGQKNSRERMKRIEEGIKELGSQILKEHPVENTQLQNEKLYLYYLQNGRDMYVDQELDINRLSDYDVDHIVPQSFLKDDSIDNKVLTRSDKARGKSDNVPSEEVVKKMKNYWRQLLNAKLITQRKFDNLTKAERGGLSELDKAGFIKRQLVETRQITKHVAQILDSRMNTKYDENDKLIREVKVITLKSKLVSDFRKDFQFYKVREINNYHHAHDAYLNAVVGTALIKKYPKLESEFVYGDYKVYDVRKMIAKSEQEIGKATAKYFFYSNIMNFFKTEITLANGEIRKRPLIETNGETGEIVWDKGRDFATVRKVLSMPQVNIVKKTEVQTGGFSKESILPKRNSDKLIARKKDWDPKKYGGFDSPTVAYSVLVVAKVEKGKSKKLKSVKELLGITIMERSSFEKNPIDFLEAKGYKEVKKDLIIKLPKYSLFELENGRKRMLASAGELQKGNELALPSKYVNFLYLASHYEKLKGSPEDNEQKQLFVEQHKHYLDEIIEQISEFSKRVILADANLDKVLSAYNKHRDKPIREQAENIIHLFTLTNLGAPAAFKYFDTTIDRKRYTSTKEVLDATLIHQSITGLYETRIDLSQLGGDGGEAAAKGGGLEHLPRPPEISQFPLNPERLQALQHLVRKALEAGHIEPYTGPGNNPVFPVKKANGTWRFIHDLRATNSLTVDLSSSSPGPPDLSSLPTTLAHLQTIDLKDAFFQIPLPKQFQPYFAFTVPQQCNYGPGTRYAWKVLPQGFKNSPTLFEMQLASILQPIRQAFPQCVILQYMDDILLASPSPEDLQQLSEATMASLISHGLPVSQDKTQQTPGTIKFLGQIISPNHITYDAVPTVPIRSRWALPELQALLGEIQWVSKGTPTLRQPLHSLYCALQGHTDPRDQIYLNPSQVQSLMQLQQALSQNCRSRLAQTLPLLGAIMLTLTGTTTVVFQSKQQWPLVWLHAPLPHTSQCPWGQLLASAVLLLDKYTLQSYGLLCQTIHHNISIQTFNQFIQTSDHPSVPILLHHSHRFKNLGAQTGELWNTFLKTAAPLAPVKALTPVFTLSPIIINTAPCLFSDGSTSQAAYILWDKHILSQRSFPLPPPHKSAQQAELLGLLHGLSSARSWHCLNIFLDSKYLYHYLRTLALGTFQGKSSQAPFQALLPRLLAHKVIYLHHVRSHTNLPDPISKLNALTDALLITPILAGKRTADGSEFEKRTADGSEFESPKKKAKVE

SEQ ID NO: 1497 - protein, 2015 aa, synthetic construct
MPAAKRVKLDGGDKKYSIGLDIGTNSVGWAVITDEYKVPSKKFKVLGNTDRHSIKKNLIGALLFDSGETAEATRLKRTARRRYTRRKNRICYLQEIFSNEMAKVDDSFFHRLEESFLVEEDKKHERHPIFGNIVDEVAYHEKYPTIYHLRKKLVDSTDKADLRLIYLALAHMIKFRGHFLIEGDLNPDNSDVDKLFIQLVQTYNQLFEENPINASGVDAKAILSARLSKSRRLENLIAQLPGEKKNGLFGNLIALSLGLTPNFKSNFDLAEDAKLQLSKDTYDDDLDNLLAQIGDQYADLFLAAKNLSDAILLSDILRVNTEITKAPLSASMIKRYDEHHQDLTLLKALVRQQLPEKYKEIFFDQSKNGYAGYIDGGASQEEFYKFIKPILEKMDGTEELLVKLNREDLLRKQRTFDNGSIPHQIHLGELHAILRRQEDFYPFLKDNREKIEKILTFRIPYYVGPLARGNSRFAWMTRKSEETITPWNFEEVVDKGASAQSFIERMTNFDKNLPNEKVLPKHSLLYEYFTVYNELTKVKYVTEGMRKPAFLSGEQKKAIVDLLFKTNRKVTVKQLKEDYFKKIECFDSVEISGVEDRFNASLGTYHDLLKIIKDKDFLDNEENEDILEDIVLTLTLFEDREMIEERLKTYAHLFDDKVMKQLKRRRYTGWGRLSRKLINGIRDKQSGKTILDFLKSDGFANRNFMQLIHDDSLTFKEDIQKAQVSGQGDSLHEHIANLAGSPAIKKGILQTVKVVDELVKVMGRHKPENIVIEMARENQTTQKGQKNSRERMKRIEEGIKELGSQILKEHPVENTQLQNEKLYLYYLQNGRDMYVDQELDINRLSDYDVDHIVPQSFLKDDSIDNKVLTRSDKARGKSDNVPSEEVVKKMKNYWRQLLNAKLITQRKFDNLTKAERGGLSELDKAGFIKRQLVETRQITKHVAQILDSRMNTKYDENDKLIREVKVITLKSKLVSDFRKDFQFYKVREINNYHHAHDAYLNAVVGTALIKKYPKLESEFVYGDYKVYDVRKMIAKSEQEIGKATAKYFFYSNIMNFFKTEITLANGEIRKRPLIETNGETGEIVWDKGRDFATVRKVLSMPQVNIVKKTEVQTGGFSKESILPKRNSDKLIARKKDWDPKKYGGFDSPTVAYSVLVVAKVEKGKSKKLKSVKELLGITIMERSSFEKNPIDFLEAKGYKEVKKDLIIKLPKYSLFELENGRKRMLASAGELQKGNELALPSKYVNFLYLASHYEKLKGSPEDNEQKQLFVEQHKHYLDEIIEQISEFSKRVILADANLDKVLSAYNKHRDKPIREQAENIIHLFTLTNLGAPAAFKYFDTTIDRKRYTSTKEVLDATLIHQSITGLYETRIDLSQLGGDGGGSSGSSGSSGSSGSSGSSGGGLEHLPRPPEISQFPLNPERLQALQHLVRKALEAGHIEPYTGPGNNPVFPVKKANGTWRFIHDLRATNSLTVDLSSSSPGPPDLSSLPTTLAHLQTIDLKDAFFQIPLPKQFQPYFAFTVPQQCNYGPGTRYAWKVLPQGFKNSPTLFEMQLASILQPIRQAFPQCVILQYMDDILLASPSPEDLQQLSEATMASLISHGLPVSQDKTQQTPGTIKFLGQIISPNHITYDAVPTVPIRSRWALPELQALLGEIQWVSKGTPTLRQPLHSLYCALQGHTDPRDQIYLNPSQVQSLMQLQQALSQNCRSRLAQTLPLLGAIMLTLTGTTTVVFQSKQQWPLVWLHAPLPHTSQCPWGQLLASAVLLLDKYTLQSYGLLCQTIHHNISIQTFNQFIQTSDHPSVPILLHHSHRFKNLGAQTGELWNTFLKTAAPLAPVKALTPVFTLSPIIINTAPCLFSDGSTSQAAYILWDKHILSQRSFPLPPPHKSAQQAELLGLLHGLSSARSWHCLNIFLDSKYLYHYLRTLALGTFQGKSSQAPFQALLPRLLAHKVIYLHHVRSHTNLPDPISKLNALTDALLITPILAGKRTADGSEFEKRTADGSEFESPKKKAKVE

SEQ ID NO: 1498 - protein, 2008 aa, synthetic construct
MPAAKRVKLDGGDKKYSIGLDIGTNSVGWAVITDEYKVPSKKFKVLGNTDRHSIKKNLIGALLFDSGETAEATRLKRTARRRYTRRKNRICYLQEIFSNEMAKVDDSFFHRLEESFLVEEDKKHERHPIFGNIVDEVAYHEKYPTIYHLRKKLVDSTDKADLRLIYLALAHMIKFRGHFLIEGDLNPDNSDVDKLFIQLVQTYNQLFEENPINASGVDAKAILSARLSKSRRLENLIAQLPGEKKNGLFGNLIALSLGLTPNFKSNFDLAEDAKLQLSKDTYDDDLDNLLAQIGDQYADLFLAAKNLSDAILLSDILRVNTEITKAPLSASMIKRYDEHHQDLTLLKALVRQQLPEKYKEIFFDQSKNGYAGYIDGGASQEEFYKFIKPILEKMDGTEELLVKLNREDLLRKQRTFDNGSIPHQIHLGELHAILRRQEDFYPFLKDNREKIEKILTFRIPYYVGPLARGNSRFAWMTRKSEETITPWNFEEVVDKGASAQSFIERMTNFDKNLPNEKVLPKHSLLYEYFTVYNELTKVKYVTEGMRKPAFLSGEQKKAIVDLLFKTNRKVTVKQLKEDYFKKIECFDSVEISGVEDRFNASLGTYHDLLKIIKDKDFLDNEENEDILEDIVLTLTLFEDREMIEERLKTYAHLFDDKVMKQLKRRRYTGWGRLSRKLINGIRDKQSGKTILDFLKSDGFANRNFMQLIHDDSLTFKEDIQKAQVSGQGDSLHEHIANLAGSPAIKKGILQTVKVVDELVKVMGRHKPENIVIEMARENQTTQKGQKNSRERMKRIEEGIKELGSQILKEHPVENTQLQNEKLYLYYLQNGRDMYVDQELDINRLSDYDVDHIVPQSFLKDDSIDNKVLTRSDKARGKSDNVPSEEVVKKMKNYWRQLLNAKLITQRKFDNLTKAERGGLSELDKAGFIKRQLVETRQITKHVAQILDSRMNTKYDENDKLIREVKVITLKSKLVSDFRKDFQFYKVREINNYHHAHDAYLNAVVGTALIKKYPKLESEFVYGDYKVYDVRKMIAKSEQEIGKATAKYFFYSNIMNFFKTEITLANGEIRKRPLIETNGETGEIVWDKGRDFATVRKVLSMPQVNIVKKTEVQTGGFSKESILPKRNSDKLIARKKDWDPKKYGGFDSPTVAYSVLVVAKVEKGKSKKLKSVKELLGITIMERSSFEKNPIDFLEAKGYKEVKKDLIIKLPKYSLFELENGRKRMLASAGELQKGNELALPSKYVNFLYLASHYEKLKGSPEDNEQKQLFVEQHKHYLDEIIEQISEFSKRVILADANLDKVLSAYNKHRDKPIREQAENIIHLFTLTNLGAPAAFKYFDTTIDRKRYTSTKEVLDATLIHQSITGLYETRIDLSQLGGDGGEAAAKGGGGGSGGGLEHLPRPPEISQFPLNPERLQALQHLVRKALEAGHIEPYTGPGNNPVFPVKKANGTWRFIHDLRATNSLTVDLSSSSPGPPDLSSLPTTLAHLQTIDLKDAFFQIPLPKQFQPYFAFTVPQQCNYGPGTRYAWKVLPQGFKNSPTLFEMQLASILQPIRQAFPQCVILQYMDDILLASPSPEDLQQLSEATMASLISHGLPVSQDKTQQTPGTIKFLGQIISPNHITYDAVPTVPIRSRWALPELQALLGEIQWVSKGTPTLRQPLHSLYCALQGHTDPRDQIYLNPSQVQSLMQLQQALSQNCRSRLAQTLPLLGAIMLTLTGTTTVVFQSKQQWPLVWLHAPLPHTSQCPWGQLLASAVLLLDKYTLQSYGLLCQTIHHNISIQTFNQFIQTSDHPSVPILLHHSHRFKNLGAQTGELWNTFLKTAAPLAPVKALTPVFTLSPIIINTAPCLFSDGSTSQAAYILWDKHILSQRSFPLPPPHKSAQQAELLGLLHGLSSARSWHCLNIFLDSKYLYHYLRTLALGTFQGKSSQAPFQALLPRLLAHKVIYLHHVRSHTNLPDPISKLNALTDALLITPILAGKRTADGSEFEKRTADGSEFESPKKKAKVE

SEQ ID NO: 1499 - protein, 2008 aa, synthetic construct
MPAAKRVKLDGGDKKYSIGLDIGTNSVGWAVITDEYKVPSKKFKVLGNTDRHSIKKNLIGALLFDSGETAEATRLKRTARRRYTRRKNRICYLQEIFSNEMAKVDDSFFHRLEESFLVEEDKKHERHPIFGNIVDEVAYHEKYPTIYHLRKKLVDSTDKADLRLIYLALAHMIKFRGHFLIEGDLNPDNSDVDKLFIQLVQTYNQLFEENPINASGVDAKAILSARLSKSRRLENLIAQLPGEKKNGLFGNLIALSLGLTPNFKSNFDLAEDAKLQLSKDTYDDDLDNLLAQIGDQYADLFLAAKNLSDAILLSDILRVNTEITKAPLSASMIKRYDEHHQDLTLLKALVRQQLPEKYKEIFFDQSKNGYAGYIDGGASQEEFYKFIKPILEKMDGTEELLVKLNREDLLRKQRTFDNGSIPHQIHLGELHAILRRQEDFYPFLKDNREKIEKILTFRIPYYVGPLARGNSRFAWMTRKSEETITPWNFEEVVDKGASAQSFIERMTNFDKNLPNEKVLPKHSLLYEYFTVYNELTKVKYVTEGMRKPAFLSGEQKKAIVDLLFKTNRKVTVKQLKEDYFKKIECFDSVEISGVEDRFNASLGTYHDLLKIIKDKDFLDNEENEDILEDIVLTLTLFEDREMIEERLKTYAHLFDDKVMKQLKRRRYTGWGRLSRKLINGIRDKQSGKTILDFLKSDGFANRNFMQLIHDDSLTFKEDIQKAQVSGQGDSLHEHIANLAGSPAIKKGILQTVKVVDELVKVMGRHKPENIVIEMARENQTTQKGQKNSRERMKRIEEGIKELGSQILKEHPVENTQLQNEKLYLYYLQNGRDMYVDQELDINRLSDYDVDHIVPQSFLKDDSIDNKVLTRSDKARGKSDNVPSEEVVKKMKNYWRQLLNAKLITQRKFDNLTKAERGGLSELDKAGFIKRQLVETRQITKHVAQILDSRMNTKYDENDKLIREVKVITLKSKLVSDFRKDFQFYKVREINNYHHAHDAYLNAVVGTALIKKYPKLESEFVYGDYKVYDVRKMIAKSEQEIGKATAKYFFYSNIMNFFKTEITLANGEIRKRPLIETNGETGEIVWDKGRDFATVRKVLSMPQVNIVKKTEVQTGGFSKESILPKRNSDKLIARKKDWDPKKYGGFDSPTVAYSVLVVAKVEKGKSKKLKSVKELLGITIMERSSFEKNPIDFLEAKGYKEVKKDLIIKLPKYSLFELENGRKRMLASAGELQKGNELALPSKYVNFLYLASHYEKLKGSPEDNEQKQLFVEQHKHYLDEIIEQISEFSKRVILADANLDKVLSAYNKHRDKPIREQAENIIHLFTLTNLGAPAAFKYFDTTIDRKRYTSTKEVLDATLIHQSITGLYETRIDLSQLGGDGGEAAAKGGSGGGGGGLEHLPRPPEISQFPLNPERLQALQHLVRKALEAGHIEPYTGPGNNPVFPVKKANGTWRFIHDLRATNSLTVDLSSSSPGPPDLSSLPTTLAHLQTIDLKDAFFQIPLPKQFQPYFAFTVPQQCNYGPGTRYAWKVLPQGFKNSPTLFEMQLASILQPIRQAFPQCVILQYMDDILLASPSPEDLQQLSEATMASLISHGLPVSQDKTQQTPGTIKFLGQIISPNHITYDAVPTVPIRSRWALPELQALLGEIQWVSKGTPTLRQPLHSLYCALQGHTDPRDQIYLNPSQVQSLMQLQQALSQNCRSRLAQTLPLLGAIMLTLTGTTTVVFQSKQQWPLVWLHAPLPHTSQCPWGQLLASAVLLLDKYTLQSYGLLCQTIHHNISIQTFNQFIQTSDHPSVPILLHHSHRFKNLGAQTGELWNTFLKTAAPLAPVKALTPVFTLSPIIINTAPCLFSDGSTSQAAYILWDKHILSQRSFPLPPPHKSAQQAELLGLLHGLSSARSWHCLNIFLDSKYLYHYLRTLALGTFQGKSSQAPFQALLPRLLAHKVIYLHHVRSHTNLPDPISKLNALTDALLITPILAGKRTADGSEFEKRTADGSEFESPKKKAKVE

SEQ ID NO: 1500 - protein, 2008 aa, synthetic construct
MPAAKRVKLDGGDKKYSIGLDIGTNSVGWAVITDEYKVPSKKFKVLGNTDRHSIKKNLIGALLFDSGETAEATRLKRTARRRYTRRKNRICYLQEIFSNEMAKVDDSFFHRLEESFLVEEDKKHERHPIFGNIVDEVAYHEKYPTIYHLRKKLVDSTDKADLRLIYLALAHMIKFRGHFLIEGDLNPDNSDVDKLFIQLVQTYNQLFEENPINASGVDAKAILSARLSKSRRLENLIAQLPGEKKNGLFGNLIALSLGLTPNFKSNFDLAEDAKLQLSKDTYDDDLDNLLAQIGDQYADLFLAAKNLSDAILLSDILRVNTEITKAPLSASMIKRYDEHHQDLTLLKALVRQQLPEKYKEIFFDQSKNGYAGYIDGGASQEEFYKFIKPILEKMDGTEELLVKLNREDLLRKQRTFDNGSIPHQIHLGELHAILRRQEDFYPFLKDNREKIEKILTFRIPYYVGPLARGNSRFAWMTRKSEETITPWNFEEVVDKGASAQSFIERMTNFDKNLPNEKVLPKHSLLYEYFTVYNELTKVKYVTEGMRKPAFLSGEQKKAIVDLLFKTNRKVTVKQLKEDYFKKIECFDSVEISGVEDRFNASLGTYHDLLKIIKDKDFLDNEENEDILEDIVLTLTLFEDREMIEERLKTYAHLFDDKVMKQLKRRRYTGWGRLSRKLINGIRDKQSGKTILDFLKSDGFANRNFMQLIHDDSLTFKEDIQKAQVSGQGDSLHEHIANLAGSPAIKKGILQTVKVVDELVKVMGRHKPENIVIEMARENQTTQKGQKNSRERMKRIEEGIKELGSQILKEHPVENTQLQNEKLYLYYLQNGRDMYVDQELDINRLSDYDVDHIVPQSFLKDDSIDNKVLTRSDKARGKSDNVPSEEVVKKMKNYWRQLLNAKLITQRKFDNLTKAERGGLSELDKAGFIKRQLVETRQITKHVAQILDSRMNTKYDENDKLIREVKVITLKSKLVSDFRKDFQFYKVREINNYHHAHDAYLNAVVGTALIKKYPKLESEFVYGDYKVYDVRKMIAKSEQEIGKATAKYFFYSNIMNFFKTEITLANGEIRKRPLIETNGETGEIVWDKGRDFATVRKVLSMPQVNIVKKTEVQTGGFSKESILPKRNSDKLIARKKDWDPKKYGGFDSPTVAYSVLVVAKVEKGKSKKLKSVKELLGITIMERSSFEKNPIDFLEAKGYKEVKKDLIIKLPKYSLFELENGRKRMLASAGELQKGNELALPSKYVNFLYLASHYEKLKGSPEDNEQKQLFVEQHKHYLDEIIEQISEFSKRVILADANLDKVLSAYNKHRDKPIREQAENIIHLFTLTNLGAPAAFKYFDTTIDRKRYTSTKEVLDATLIHQSITGLYETRIDLSQLGGDGGPAPAPAPAPAPGGGLEHLPRPPEISQFPLNPERLQALQHLVRKALEAGHIEPYTGPGNNPVFPVKKANGTWRFIHDLRATNSLTVDLSSSSPGPPDLSSLPTTLAHLQTIDLKDAFFQIPLPKQFQPYFAFTVPQQCNYGPGTRYAWKVLPQGFKNSPTLFQMQLASILQPIRQAFPQCVILQYMDDILLASPSPEDLQQLSEATMASLISHGLPVSQDKTQQTPGTIKFLGQIISPNHITYDAVPTVPIRSRWALPELQALLGEIQWVSKGTPTLRQPLHSLYCALQGHTDPRDQIYLNPSQVQSLMQLQQALSQNCRSRLAQTLPLLGAIMLTLTGTTTVVFQSKQQWPLVWLHAPLPHTSQCPWGQLLASAVLLLDKYTLQSYGLLCQTIHHNISIQTFNQFIQTSDHPSVPILLHHSHRFKNLGAQTGELWNTFLKTAAPLAPVKALTPVFTLSPIIINTAPCLFSDGSTSQAAYILWDKHILSQRSFPLPPPHKSAQQAELLGLLHGLSSARSWHCLNIFLDSKYLYHYLRTLAWGTFQGKSSQAPFQALLPRLLAHKVIYLHHVRSHTNLPDPISKLNALTDALLITPILAGKRTADGSEFEKRTADGSEFESPKKKAKVE

SEQ ID NO: 1501 - protein, 2006 aa, synthetic construct
MPAAKRVKLDGGDKKYSIGLDIGTNSVGWAVITDEYKVPSKKFKVLGNTDRHSIKKNLIGALLFDSGETAEATRLKRTARRRYTRRKNRICYLQEIFSNEMAKVDDSFFHRLEESFLVEEDKKHERHPIFGNIVDEVAYHEKYPTIYHLRKKLVDSTDKADLRLIYLALAHMIKFRGHFLIEGDLNPDNSDVDKLFIQLVQTYNQLFEENPINASGVDAKAILSARLSKSRRLENLIAQLPGEKKNGLFGNLIALSLGLTPNFKSNFDLAEDAKLQLSKDTYDDDLDNLLAQIGDQYADLFLAAKNLSDAILLSDILRVNTEITKAPLSASMIKRYDEHHQDLTLLKALVRQQLPEKYKEIFFDQSKNGYAGYIDGGASQEEFYKFIKPILEKMDGTEELLVKLNREDLLRKQRTFDNGSIPHQIHLGELHAILRRQEDFYPFLKDNREKIEKILTFRIPYYVGPLARGNSRFAWMTRKSEETITPWNFEEVVDKGASAQSFIERMTNFDKNLPNEKVLPKHSLLYEYFTVYNELTKVKYVTEGMRKPAFLSGEQKKAIVDLLFKTNRKVTVKQLKEDYFKKIECFDSVEISGVEDRFNASLGTYHDLLKIIKDKDFLDNEENEDILEDIVLTLTLFEDREMIEERLKTYAHLFDDKVMKQLKRRRYTGWGRLSRKLINGIRDKQSGKTILDFLKSDGFANRNFMQLIHDDSLTFKEDIQKAQVSGQGDSLHEHIANLAGSPAIKKGILQTVKVVDELVKVMGRHKPENIVIEMARENQTTQKGQKNSRERMKRIEEGIKELGSQILKEHPVENTQLQNEKLYLYYLQNGRDMYVDQELDINRLSDYDVDHIVPQSFLKDDSIDNKVLTRSDKARGKSDNVPSEEVVKKMKNYWRQLLNAKLITQRKFDNLTKAERGGLSELDKAGFIKRQLVETRQITKHVAQILDSRMNTKYDENDKLIREVKVITLKSKLVSDFRKDFQFYKVREINNYHHAHDAYLNAVVGTALIKKYPKLESEFVYGDYKVYDVRKMIAKSEQEIGKATAKYFFYSNIMNFFKTEITLANGEIRKRPLIETNGETGEIVWDKGRDFATVRKVLSMPQVNIVKKTEVQTGGFSKESILPKRNSDKLIARKKDWDPKKYGGFDSPTVAYSVLVVAKVEKGKSKKLKSVKELLGITIMERSSFEKNPIDFLEAKGYKEVKKDLIIKLPKYSLFELENGRKRMLASAGELQKGNELALPSKYVNFLYLASHYEKLKGSPEDNEQKQLFVEQHKHYLDEIIEQISEFSKRVILADANLDKVLSAYNKHRDKPIREQAENIIHLFTLTNLGAPAAFKYFDTTIDRKRYTSTKEVLDATLIHQSITGLYETRIDLSQLGGDGGGGGGGSPAPGGGLEHLPRPPEISQFPLNPERLQALQHLVRKALEAGHIEPYTGPGNNPVFPVKKANGTWRFIHDLRATNSLTVDLSSSSPGPPDLSSLPTTLAHLQTIDLKDAFFQIPLPKQFQPYFAFTVPQQCNYGPGTRYAWKVLPQGFKNSPTLFQMQLASILQPIRQAFPQCVILQYMDDILLASPSPEDLQQLSEATMASLISHGLPVSQDKTQQTPGTIKFLGQIISPNHITYDAVPTVPIRSRWALPELQALLGEIQWVSKGTPTLRQPLHSLYCALQGHTDPRDQIYLNPSQVQSLMQLQQALSQNCRSRLAQTLPLLGAIMLTLTGTTTVVFQSKQQWPLVWLHAPLPHTSQCPWGQLLASAVLLLDKYTLQSYGLLCQTIHHNISIQTFNQFIQTSDHPSVPILLHHSHRFKNLGAQTGELWNTFLKTAAPLAPVKALTPVFTLSPIIINTAPCLFSDGSTSQAAYILWDKHILSQRSFPLPPPHKSAQQAELLGLLHGLSSARSWHCLNIFLDSKYLYHYLRTLAWGTFQGKSSQAPFQALLPRLLAHKVIYLHHVRSHTNLPDPISKLNALTDALLITPILAGKRTADGSEFEKRTADGSEFESPKKKAKVE

SEQ ID NO: 1502 - protein, 2012 aa, synthetic construct
MPAAKRVKLDGGDKKYSIGLDIGTNSVGWAVITDEYKVPSKKFKVLGNTDRHSIKKNLIGALLFDSGETAEATRLKRTARRRYTRRKNRICYLQEIFSNEMAKVDDSFFHRLEESFLVEEDKKHERHPIFGNIVDEVAYHEKYPTIYHLRKKLVDSTDKADLRLIYLALAHMIKFRGHFLIEGDLNPDNSDVDKLFIQLVQTYNQLFEENPINASGVDAKAILSARLSKSRRLENLIAQLPGEKKNGLFGNLIALSLGLTPNFKSNFDLAEDAKLQLSKDTYDDDLDNLLAQIGDQYADLFLAAKNLSDAILLSDILRVNTEITKAPLSASMIKRYDEHHQDLTLLKALVRQQLPEKYKEIFFDQSKNGYAGYIDGGASQEEFYKFIKPILEKMDGTEELLVKLNREDLLRKQRTFDNGSIPHQIHLGELHAILRRQEDFYPFLKDNREKIEKILTFRIPYYVGPLARGNSRFAWMTRKSEETITPWNFEEVVDKGASAQSFIERMTNFDKNLPNEKVLPKHSLLYEYFTVYNELTKVKYVTEGMRKPAFLSGEQKKAIVDLLFKTNRKVTVKQLKEDYFKKIECFDSVEISGVEDRFNASLGTYHDLLKIIKDKDFLDNEENEDILEDIVLTLTLFEDREMIEERLKTYAHLFDDKVMKQLKRRRYTGWGRLSRKLINGIRDKQSGKTILDFLKSDGFANRNFMQLIHDDSLTFKEDIQKAQVSGQGDSLHEHIANLAGSPAIKKGILQTVKVVDELVKVMGRHKPENIVIEMARENQTTQKGQKNSRERMKRIEEGIKELGSQILKEHPVENTQLQNEKLYLYYLQNGRDMYVDQELDINRLSDYDVDHIVPQSFLKDDSIDNKVLTRSDKARGKSDNVPSEEVVKKMKNYWRQLLNAKLITQRKFDNLTKAERGGLSELDKAGFIKRQLVETRQITKHVAQILDSRMNTKYDENDKLIREVKVITLKSKLVSDFRKDFQFYKVREINNYHHAHDAYLNAVVGTALIKKYPKLESEFVYGDYKVYDVRKMIAKSEQEIGKATAKYFFYSNIMNFFKTEITLANGEIRKRPLIETNGETGEIVWDKGRDFATVRKVLSMPQVNIVKKTEVQTGGFSKESILPKRNSDKLIARKKDWDPKKYGGFDSPTVAYSVLVVAKVEKGKSKKLKSVKELLGITIMERSSFEKNPIDFLEAKGYKEVKKDLIIKLPKYSLFELENGRKRMLASAGELQKGNELALPSKYVNFLYLASHYEKLKGSPEDNEQKQLFVEQHKHYLDEIIEQISEFSKRVILADANLDKVLSAYNKHRDKPIREQAENIIHLFTLTNLGAPAAFKYFDTTIDRKRYTSTKEVLDATLIHQSITGLYETRIDLSQLGGDGGGGSGGSGGSGGSGGSGGGLEHLPRPPEISQFPLNPERLQALQHLVRKALEAGHIEPYTGPGNNPVFPVKKANGTWRFIHDLRATNSLTVDLSSSSPGPPDLSSLPTTLAHLQTIDLKDAFFQIPLPKQFQPYFAFTVPQQCNYGPGTRYAWKVLPQGFKNSPTLFQMQLASILQPIRQAFPQCVILQYMDDILLASPSPEDLQQLSEATMASLISHGLPVSQDKTQQTPGTIKFLGQIISPNHITYDAVPTVPIRSRWALPELQALLGEIQWVSKGTPTLRQPLHSLYCALQGHTDPRDQIYLNPSQVQSLMQLQQALSQNCRSRLAQTLPLLGAIMLTLTGTTTVVFQSKQQWPLVWLHAPLPHTSQCPWGQLLASAVLLLDKYTLQSYGLLCQTIHHNISIQTFNQFIQTSDHPSVPILLHHSHRFKNLGAQTGELWNTFLKTAAPLAPVKALTPVFTLSPIIINTAPCLFSDGSTSQAAYILWDKHILSQRSFPLPPPHKSAQQAELLGLLHGLSSARSWHCLNIFLDSKYLYHYLRTLAWGTFQGKSSQAPFQALLPRLLAHKVIYLHHVRSHTNLPDPISKLNALTDALLITPILAGKRTADGSEFEKRTADGSEFESPKKKAKVE

SEQ ID NO: 1503 - protein, 2015 aa, synthetic construct
MPAAKRVKLDGGDKKYSIGLDIGTNSVGWAVITDEYKVPSKKFKVLGNTDRHSIKKNLIGALLFDSGETAEATRLKRTARRRYTRRKNRICYLQEIFSNEMAKVDDSFFHRLEESFLVEEDKKHERHPIFGNIVDEVAYHEKYPTIYHLRKKLVDSTDKADLRLIYLALAHMIKFRGHFLIEGDLNPDNSDVDKLFIQLVQTYNQLFEENPINASGVDAKAILSARLSKSRRLENLIAQLPGEKKNGLFGNLIALSLGLTPNFKSNFDLAEDAKLQLSKDTYDDDLDNLLAQIGDQYADLFLAAKNLSDAILLSDILRVNTEITKAPLSASMIKRYDEHHQDLTLLKALVRQQLPEKYKEIFFDQSKNGYAGYIDGGASQEEFYKFIKPILEKMDGTEELLVKLNREDLLRKQRTFDNGSIPHQIHLGELHAILRRQEDFYPFLKDNREKIEKILTFRIPYYVGPLARGNSRFAWMTRKSEETITPWNFEEVVDKGASAQSFIERMTNFDKNLPNEKVLPKHSLLYEYFTVYNELTKVKYVTEGMRKPAFLSGEQKKAIVDLLFKTNRKVTVKQLKEDYFKKIECFDSVEISGVEDRFNASLGTYHDLLKIIKDKDFLDNEENEDILEDIVLTLTLFEDREMIEERLKTYAHLFDDKVMKQLKRRRYTGWGRLSRKLINGIRDKQSGKTILDFLKSDGFANRNFMQLIHDDSLTFKEDIQKAQVSGQGDSLHEHIANLAGSPAIKKGILQTVKVVDELVKVMGRHKPENIVIEMARENQTTQKGQKNSRERMKRIEEGIKELGSQILKEHPVENTQLQNEKLYLYYLQNGRDMYVDQELDINRLSDYDVDHIVPQSFLKDDSIDNKVLTRSDKARGKSDNVPSEEVVKKMKNYWRQLLNAKLITQRKFDNLTKAERGGLSELDKAGFIKRQLVETRQITKHVAQILDSRMNTKYDENDKLIREVKVITLKSKLVSDFRKDFQFYKVREINNYHHAHDAYLNAVVGTALIKKYPKLESEFVYGDYKVYDVRKMIAKSEQEIGKATAKYFFYSNIMNFFKTEITLANGEIRKRPLIETNGETGEIVWDKGRDFATVRKVLSMPQVNIVKKTEVQTGGFSKESILPKRNSDKLIARKKDWDPKKYGGFDSPTVAYSVLVVAKVEKGKSKKLKSVKELLGITIMERSSFEKNPIDFLEAKGYKEVKKDLIIKLPKYSLFELENGRKRMLASAGELQKGNELALPSKYVNFLYLASHYEKLKGSPEDNEQKQLFVEQHKHYLDEIIEQISEFSKRVILADANLDKVLSAYNKHRDKPIREQAENIIHLFTLTNLGAPAAFKYFDTTIDRKRYTSTKEVLDATLIHQSITGLYETRIDLSQLGGDGGGGSGGSGGSGGSGGSGGSGGGLEHLPRPPEISQFPLNPERLQALQHLVRKALEAGHIEPYTGPGNNPVFPVKKANGTWRFIHDLRATNSLTVDLSSSSPGPPDLSSPPTTLAHLQTIDLKDAFFQIPLPKQFQPYFAFTVPQQCNYGPGTRYAWKVLPQGFKNSPTLFQMQLASILQPIRQAFPQCVILQYMDDILLASPSPEDLQQLSEATMASLISHGLPVSQDKTQQTPGTIKFLGQIISPNHITYDAVPTVPIRSRWALPELQALLGEIQWVSKGTPTLRQPLHSLYCALQGHTDPRDQIYLNPSQVQSLMQLQQALSQNCRSRLAQTLPLLGAIMLTLTGTTTVVFQSKQQWPLVWLHAPLPHTSQCPWGQLLASAVLLLDKYTLQSYGLLCQTIHHNISIQTFNQFIQTSDHPSVPILLHHSHRFKNLGAQTGELWNTFLKTAAPLAPVKALTPVFTLSPIIINTAPCLFSDGSTSQAAYILWDKHILSQRSFPLPPPHKSAQQAELLGLLHGLSSARSWHCLNIFLDSKYLYHYLRTLAWGTFQGKSSQAPFQALLPRLLAHKVIYLHHVRSHTNLPDPISKLNALTDALLITPILAGKRTADGSEFEKRTADGSEFESPKKKAKVE

SEQ ID NO: 1504 - protein, 2099 aa, synthetic construct
MPAAKRVKLDGGDKKYSIGLDIGTNSVGWAVITDEYKVPSKKFKVLGNTDRHSIKKNLIGALLFDSGETAEATRLKRTARRRYTRRKNRICYLQEIFSNEMAKVDDSFFHRLEESFLVEEDKKHERHPIFGNIVDEVAYHEKYPTIYHLRKKLVDSTDKADLRLIYLALAHMIKFRGHFLIEGDLNPDNSDVDKLFIQLVQTYNQLFEENPINASGVDAKAILSARLSKSRRLENLIAQLPGEKKNGLFGNLIALSLGLTPNFKSNFDLAEDAKLQLSKDTYDDDLDNLLAQIGDQYADLFLAAKNLSDAILLSDILRVNTEITKAPLSASMIKRYDEHHQDLTLLKALVRQQLPEKYKEIFFDQSKNGYAGYIDGGASQEEFYKFIKPILEKMDGTEELLVKLNREDLLRKQRTFDNGSIPHQIHLGELHAILRRQEDFYPFLKDNREKIEKILTFRIPYYVGPLARGNSRFAWMTRKSEETITPWNFEEVVDKGASAQSFIERMTNFDKNLPNEKVLPKHSLLYEYFTVYNELTKVKYVTEGMRKPAFLSGEQKKAIVDLLFKTNRKVTVKQLKEDYFKKIECFDSVEISGVEDRFNASLGTYHDLLKIIKDKDFLDNEENEDILEDIVLTLTLFEDREMIEERLKTYAHLFDDKVMKQLKRRRYTGWGRLSRKLINGIRDKQSGKTILDFLKSDGFANRNFMQLIHDDSLTFKEDIQKAQVSGQGDSLHEHIANLAGSPAIKKGILQTVKVVDELVKVMGRHKPENIVIEMARENQTTQKGQKNSRERMKRIEEGIKELGSQILKEHPVENTQLQNEKLYLYYLQNGRDMYVDQELDINRLSDYDVDHIVPQSFLKDDSIDNKVLTRSDKARGKSDNVPSEEVVKKMKNYWRQLLNAKLITQRKFDNLTKAERGGLSELDKAGFIKRQLVETRQITKHVAQILDSRMNTKYDENDKLIREVKVITLKSKLVSDFRKDFQFYKVREINNYHHAHDAYLNAVVGTALIKKYPKLESEFVYGDYKVYDVRKMIAKSEQEIGKATAKYFFYSNIMNFFKTEITLANGEIRKRPLIETNGETGEIVWDKGRDFATVRKVLSMPQVNIVKKTEVQTGGFSKESILPKRNSDKLIARKKDWDPKKYGGFDSPTVAYSVLVVAKVEKGKSKKLKSVKELLGITIMERSSFEKNPIDFLEAKGYKEVKKDLIIKLPKYSLFELENGRKRMLASAGELQKGNELALPSKYVNFLYLASHYEKLKGSPEDNEQKQLFVEQHKHYLDEIIEQISEFSKRVILADANLDKVLSAYNKHRDKPIREQAENIIHLFTLTNLGAPAAFKYFDTTIDRKRYTSTKEVLDATLIHQSITGLYETRIDLSQLGGDGGEAAAKPAPGGTVSLQDEHRLFDIPVTTSLPDVWLQDFPQAWAETGGLGRAKCQAPIIIDLKPTAVPVSIKQYPMSLEAHMGIRQHIIKFLELGVLRPCRSPWNTPLLPVKKPGTQDYRPVQDLREINKRTVDIHPTVPNPYNLLSTLKPDYSWYTVLDLKDAFFCLPLAPQSQELFAFEWKDPERGISGQLTWTRLPQGFKNSPTLFDEALHRDLTDFRTQHPEVTLLQYVDDLLLAAPTKKACTQGTRHLLQELGEKGYRASAKKAQICQTKVTYLGYILSEGKRWLTPGRIETVARIPPPRNPREVREFLGTAGFCRLWIPGFAELAAPLYALTKESTPFTWQTEHQLAFEALKKALLSAPALGLPDTSKPFTLFLDERQGIAKGVLTQKLGPWKRPVAYLSKKLDPVAAGWPPCLRIMAATAMLVKDSAKLTLGQPLTVITPHTLEAIVRQPPDRWITNARLTHYQALLLDTDRVQFGPPVTLNPATLLPVPENQPSPHDCRQVLAETHGTREDLKDQELPDADHTWYTDGSSYLDSGTRRAGAAVVDGHNTIWAQSLPPGTSAQKAELIALTKALELSKGKKANIYTDSRYAFATAHTHGSIYERRGLLTSEGKEIKNKAEIIALLKALFLPQEVAIIHCPGHQKGQDPVAVGNRQADRVARQAAMAEVLTLATEPDNTSHITAGKRTADGSEFEKRTADGSEFESPKKKAKVE

SEQ ID NO: 1505 - protein, 2100 aa, synthetic construct
MPAAKRVKLDGGDKKYSIGLDIGTNSVGWAVITDEYKVPSKKFKVLGNTDRHSIKKNLIGALLFDSGETAEATRLKRTARRRYTRRKNRICYLQEIFSNEMAKVDDSFFHRLEESFLVEEDKKHERHPIFGNIVDEVAYHEKYPTIYHLRKKLVDSTDKADLRLIYLALAHMIKFRGHFLIEGDLNPDNSDVDKLFIQLVQTYNQLFEENPINASGVDAKAILSARLSKSRRLENLIAQLPGEKKNGLFGNLIALSLGLTPNFKSNFDLAEDAKLQLSKDTYDDDLDNLLAQIGDQYADLFLAAKNLSDAILLSDILRVNTEITKAPLSASMIKRYDEHHQDLTLLKALVRQQLPEKYKEIFFDQSKNGYAGYIDGGASQEEFYKFIKPILEKMDGTEELLVKLNREDLLRKQRTFDNGSIPHQIHLGELHAILRRQEDFYPFLKDNREKIEKILTFRIPYYVGPLARGNSRFAWMTRKSEETITPWNFEEVVDKGASAQSFIERMTNFDKNLPNEKVLPKHSLLYEYFTVYNELTKVKYVTEGMRKPAFLSGEQKKAIVDLLFKTNRKVTVKQLKEDYFKKIECFDSVEISGVEDRFNASLGTYHDLLKIIKDKDFLDNEENEDILEDIVLTLTLFEDREMIEERLKTYAHLFDDKVMKQLKRRRYTGWGRLSRKLINGIRDKQSGKTILDFLKSDGFANRNFMQLIHDDSLTFKEDIQKAQVSGQGDSLHEHIANLAGSPAIKKGILQTVKVVDELVKVMGRHKPENIVIEMARENQTTQKGQKNSRERMKRIEEGIKELGSQILKEHPVENTQLQNEKLYLYYLQNGRDMYVDQELDINRLSDYDVDHIVPQSFLKDDSIDNKVLTRSDKARGKSDNVPSEEVVKKMKNYWRQLLNAKLITQRKFDNLTKAERGGLSELDKAGFIKRQLVETRQITKHVAQILDSRMNTKYDENDKLIREVKVITLKSKLVSDFRKDFQFYKVREINNYHHAHDAYLNAVVGTALIKKYPKLESEFVYGDYKVYDVRKMIAKSEQEIGKATAKYFFYSNIMNFFKTEITLANGEIRKRPLIETNGETGEIVWDKGRDFATVRKVLSMPQVNIVKKTEVQTGGFSKESILPKRNSDKLIARKKDWDPKKYGGFDSPTVAYSVLVVAKVEKGKSKKLKSVKELLGITIMERSSFEKNPIDFLEAKGYKEVKKDLIIKLPKYSLFELENGRKRMLASAGELQKGNELALPSKYVNFLYLASHYEKLKGSPEDNEQKQLFVEQHKHYLDEIIEQISEFSKRVILADANLDKVLSAYNKHRDKPIREQAENIIHLFTLTNLGAPAAFKYFDTTIDRKRYTSTKEVLDATLIHQSITGLYETRIDLSQLGGDGGGGGGSSPAPGGTVSLQDEHRLFDIPVTTSLPDVWLQDFPQAWAETGGLGRAKCQAPIIIDLKPTAVPVSIKQYPMSLEAHMGIRQHIIKFLELGVLRPCRSPWNTPLLPVKKPGTQDYRPVQDLREINKRTVDIHPTVPNPYNLLSTLKPDYSWYTVLDLKDAFFCLPLAPQSQELFAFEWKDPERGISGQLTWTRLPQGFKNSPTLFDEALHRDLTDFRTQHPEVTLLQYVDDLLLAAPTKKACTQGTRHLLQELGEKGYRASAKKAQICQTKVTYLGYILSEGKRWLTPGRIETVARIPPPRNPREVREFLGTAGFCRLWIPGFAELAAPLYALTKESTPFTWQTEHQLAFEALKKALLSAPALGLPDTSKPFTLFLDERQGIAKGVLTQKLGPWKRPVAYLSKKLDPVAAGWPPCLRIMAATAMLVKDSAKLTLGQPLTVITPHTLEAIVRQPPDRWITNARLTHYQALLLDTDRVQFGPPVTLNPATLLPVPENQPSPHDCRQVLAETHGTREDLKDQELPDADHTWYTDGSSYLDSGTRRAGAAVVDGHNTIWAQSLPPGTSAQKAELIALTKALELSKGKKANIYTDSRYAFATAHTHGSIYERRGLLTSEGKEIKNKAEIIALLKALFLPQEVAIIHCPGHQKGQDPVAVGNRQADRVARQAAMAEVLTLATEPDNTSHITAGKRTADGSEFEKRTADGSEFESPKKKAKVE

SEQ ID NO: 1506 - protein, 2100 aa, synthetic construct
MPAAKRVKLDGGDKKYSIGLDIGTNSVGWAVITDEYKVPSKKFKVLGNTDRHSIKKNLIGALLFDSGETAEATRLKRTARRRYTRRKNRICYLQEIFSNEMAKVDDSFFHRLEESFLVEEDKKHERHPIFGNIVDEVAYHEKYPTIYHLRKKLVDSTDKADLRLIYLALAHMIKFRGHFLIEGDLNPDNSDVDKLFIQLVQTYNQLFEENPINASGVDAKAILSARLSKSRRLENLIAQLPGEKKNGLFGNLIALSLGLTPNFKSNFDLAEDAKLQLSKDTYDDDLDNLLAQIGDQYADLFLAAKNLSDAILLSDILRVNTEITKAPLSASMIKRYDEHHQDLTLLKALVRQQLPEKYKEIFFDQSKNGYAGYIDGGASQEEFYKFIKPILEKMDGTEELLVKLNREDLLRKQRTFDNGSIPHQIHLGELHAILRRQEDFYPFLKDNREKIEKILTFRIPYYVGPLARGNSRFAWMTRKSEETITPWNFEEVVDKGASAQSFIERMTNFDKNLPNEKVLPKHSLLYEYFTVYNELTKVKYVTEGMRKPAFLSGEQKKAIVDLLFKTNRKVTVKQLKEDYFKKIECFDSVEISGVEDRFNASLGTYHDLLKIIKDKDFLDNEENEDILEDIVLTLTLFEDREMIEERLKTYAHLFDDKVMKQLKRRRYTGWGRLSRKLINGIRDKQSGKTILDFLKSDGFANRNFMQLIHDDSLTFKEDIQKAQVSGQGDSLHEHIANLAGSPAIKKGILQTVKVVDELVKVMGRHKPENIVIEMARENQTTQKGQKNSRERMKRIEEGIKELGSQILKEHPVENTQLQNEKLYLYYLQNGRDMYVDQELDINRLSDYDVDHIVPQSFLKDDSIDNKVLTRSDKARGKSDNVPSEEVVKKMKNYWRQLLNAKLITQRKFDNLTKAERGGLSELDKAGFIKRQLVETRQITKHVAQILDSRMNTKYDENDKLIREVKVITLKSKLVSDFRKDFQFYKVREINNYHHAHDAYLNAVVGTALIKKYPKLESEFVYGDYKVYDVRKMIAKSEQEIGKATAKYFFYSNIMNFFKTEITLANGEIRKRPLIETNGETGEIVWDKGRDFATVRKVLSMPQVNIVKKTEVQTGGFSKESILPKRNSDKLIARKKDWDPKKYGGFDSPTVAYSVLVVAKVEKGKSKKLKSVKELLGITIMERSSFEKNPIDFLEAKGYKEVKKDLIIKLPKYSLFELENGRKRMLASAGELQKGNELALPSKYVNFLYLASHYEKLKGSPEDNEQKQLFVEQHKHYLDEIIEQISEFSKRVILADANLDKVLSAYNKHRDKPIREQAENIIHLFTLTNLGAPAAFKYFDTTIDRKRYTSTKEVLDATLIHQSITGLYETRIDLSQLGGDGGPAPGGSGGGGGTVSLQDEHRLFDIPVTTSLPDVWLQDFPQAWAETGGLGRAKCQAPIIIDLKPTAVPVSIKQYPMSLEAHMGIRQHIIKFLELGVLRPCRSPWNTPLLPVKKPGTQDYRPVQDLREINKRTVDIHPTVPNPYNLLSTLKPDYSWYTVLDLKDAFFCLPLAPQSQELFAFEWKDPERGISGQLTWTRLPQGFKNSPTLFDEALHRDLTDFRTQHPEVTLLQYVDDLLLAAPTKKACTQGTRHLLQELGEKGYRASAKKAQICQTKVTYLGYILSEGKRWLTPGRIETVARIPPPRNPREVREFLGTAGFCRLWIPGFAELAAPLYALTKESTPFTWQTEHQLAFEALKKALLSAPALGLPDTSKPFTLFLDERQGIAKGVLTQKLGPWKRPVAYLSKKLDPVAAGWPPCLRIMAATAMLVKDSAKLTLGQPLTVITPHTLEAIVRQPPDRWITNARLTHYQALLLDTDRVQFGPPVTLNPATLLPVPENQPSPHDCRQVLAETHGTREDLKDQELPDADHTWYTDGSSYLDSGTRRAGAAVVDGHNTIWAQSLPPGTSAQKAELIALTKALELSKGKKANIYTDSRYAFATAHTHGSIYERRGLLTSEGKEIKNKAEIIALLKALFLPQEVAIIHCPGHQKGQDPVAVGNRQADRVARQAAMAEVLTLATEPDNTSHITAGKRTADGSEFEKRTADGSEFESPKKKAKVE

SEQ ID NO: 1507 - protein, 2106 aa, synthetic construct
MPAAKRVKLDGGDKKYSIGLDIGTNSVGWAVITDEYKVPSKKFKVLGNTDRHSIKKNLIGALLFDSGETAEATRLKRTARRRYTRRKNRICYLQEIFSNEMAKVDDSFFHRLEESFLVEEDKKHERHPIFGNIVDEVAYHEKYPTIYHLRKKLVDSTDKADLRLIYLALAHMIKFRGHFLIEGDLNPDNSDVDKLFIQLVQTYNQLFEENPINASGVDAKAILSARLSKSRRLENLIAQLPGEKKNGLFGNLIALSLGLTPNFKSNFDLAEDAKLQLSKDTYDDDLDNLLAQIGDQYADLFLAAKNLSDAILLSDILRVNTEITKAPLSASMIKRYDEHHQDLTLLKALVRQQLPEKYKEIFFDQSKNGYAGYIDGGASQEEFYKFIKPILEKMDGTEELLVKLNREDLLRKQRTFDNGSIPHQIHLGELHAILRRQEDFYPFLKDNREKIEKILTFRIPYYVGPLARGNSRFAWMTRKSEETITPWNFEEVVDKGASAQSFIERMTNFDKNLPNEKVLPKHSLLYEYFTVYNELTKVKYVTEGMRKPAFLSGEQKKAIVDLLFKTNRKVTVKQLKEDYFKKIECFDSVEISGVEDRFNASLGTYHDLLKIIKDKDFLDNEENEDILEDIVLTLTLFEDREMIEERLKTYAHLFDDKVMKQLKRRRYTGWGRLSRKLINGIRDKQSGKTILDFLKSDGFANRNFMQLIHDDSLTFKEDIQKAQVSGQGDSLHEHIANLAGSPAIKKGILQTVKVVDELVKVMGRHKPENIVIEMARENQTTQKGQKNSRERMKRIEEGIKELGSQILKEHPVENTQLQNEKLYLYYLQNGRDMYVDQELDINRLSDYDVDHIVPQSFLKDDSIDNKVLTRSDKARGKSDNVPSEEVVKKMKNYWRQLLNAKLITQRKFDNLTKAERGGLSELDKAGFIKRQLVETRQITKHVAQILDSRMNTKYDENDKLIREVKVITLKSKLVSDFRKDFQFYKVREINNYHHAHDAYLNAVVGTALIKKYPKLESEFVYGDYKVYDVRKMIAKSEQEIGKATAKYFFYSNIMNFFKTEITLANGEIRKRPLIETNGETGEIVWDKGRDFATVRKVLSMPQVNIVKKTEVQTGGFSKESILPKRNSDKLIARKKDWDPKKYGGFDSPTVAYSVLVVAKVEKGKSKKLKSVKELLGITIMERSSFEKNPIDFLEAKGYKEVKKDLIIKLPKYSLFELENGRKRMLASAGELQKGNELALPSKYVNFLYLASHYEKLKGSPEDNEQKQLFVEQHKHYLDEIIEQISEFSKRVILADANLDKVLSAYNKHRDKPIREQAENIIHLFTLTNLGAPAAFKYFDTTIDRKRYTSTKEVLDATLIHQSITGLYETRIDLSQLGGDGGGGSGGSGGSGGSGGSGGTVSLQDEHRLFDIPVTTSLPDVWLQDFPQAWAETGGLGRAKCQAPIIIDLKPTAVPVSIKQYPMSLEAHMGIRQHIIKFLELGVLRPCRSPWNTPLLPVKKPGTQDYRPVQDLREINKRTVDIHPTVPNPYNLLSTLKPDYSWYTVLDLKDAFFCLPLAPQSQELFAFEWKDPERGISGQLTWTRLPQGFKNSPTLFDEALHRDLTDFRTQHPEVTLLQYVDDLLLAAPTKKACTQGTRHLLQELGEKGYRASAKKAQICQTKVTYLGYILSEGKRWLTPGRIETVARIPPPRNPREVREFLGTAGFCRLWIPGFAELAAPLYALTKESTPFTWQTEHQLAFEALKKALLSAPALGLPDTSKPFTLFLDERQGIAKGVLTQKLGPWKRPVAYLSKKLDPVAAGWPPCLRIMAATAMLVKDSAKLTLGQPLTVITPHTLEAIVRQPPDRWITNARLTHYQALLLDTDRVQFGPPVTLNPATLLPVPENQPSPHDCRQVLAETHGTREDLKDQELPDADHTWYTDGSSYLDSGTRRAGAAVVDGHNTIWAQSLPPGTSAQKAELIALTKALELSKGKKANIYTDSRYAFATAHTHGSIYERRGLLTSEGKEIKNKAEIIALLKALFLPQEVAIIHCPGHQKGQDPVAVGNRQADRVARQAAMAEVLTLATEPDNTSHITAGKRTADGSEFEKRTADGSEFESPKKKAKVE

SEQ ID NO: 1508 - protein, 2100 aa, synthetic construct
MPAAKRVKLDGGDKKYSIGLDIGTNSVGWAVITDEYKVPSKKFKVLGNTDRHSIKKNLIGALLFDSGETAEATRLKRTARRRYTRRKNRICYLQEIFSNEMAKVDDSFFHRLEESFLVEEDKKHERHPIFGNIVDEVAYHEKYPTIYHLRKKLVDSTDKADLRLIYLALAHMIKFRGHFLIEGDLNPDNSDVDKLFIQLVQTYNQLFEENPINASGVDAKAILSARLSKSRRLENLIAQLPGEKKNGLFGNLIALSLGLTPNFKSNFDLAEDAKLQLSKDTYDDDLDNLLAQIGDQYADLFLAAKNLSDAILLSDILRVNTEITKAPLSASMIKRYDEHHQDLTLLKALVRQQLPEKYKEIFFDQSKNGYAGYIDGGASQEEFYKFIKPILEKMDGTEELLVKLNREDLLRKQRTFDNGSIPHQIHLGELHAILRRQEDFYPFLKDNREKIEKILTFRIPYYVGPLARGNSRFAWMTRKSEETITPWNFEEVVDKGASAQSFIERMTNFDKNLPNEKVLPKHSLLYEYFTVYNELTKVKYVTEGMRKPAFLSGEQKKAIVDLLFKTNRKVTVKQLKEDYFKKIECFDSVEISGVEDRFNASLGTYHDLLKIIKDKDFLDNEENEDILEDIVLTLTLFEDREMIEERLKTYAHLFDDKVMKQLKRRRYTGWGRLSRKLINGIRDKQSGKTILDFLKSDGFANRNFMQLIHDDSLTFKEDIQKAQVSGQGDSLHEHIANLAGSPAIKKGILQTVKVVDELVKVMGRHKPENIVIEMARENQTTQKGQKNSRERMKRIEEGIKELGSQILKEHPVENTQLQNEKLYLYYLQNGRDMYVDQELDINRLSDYDVDHIVPQSFLKDDSIDNKVLTRSDKARGKSDNVPSEEVVKKMKNYWRQLLNAKLITQRKFDNLTKAERGGLSELDKAGFIKRQLVETRQITKHVAQILDSRMNTKYDENDKLIREVKVITLKSKLVSDFRKDFQFYKVREINNYHHAHDAYLNAVVGTALIKKYPKLESEFVYGDYKVYDVRKMIAKSEQEIGKATAKYFFYSNIMNFFKTEITLANGEIRKRPLIETNGETGEIVWDKGRDFATVRKVLSMPQVNIVKKTEVQTGGFSKESILPKRNSDKLIARKKDWDPKKYGGFDSPTVAYSVLVVAKVEKGKSKKLKSVKELLGITIMERSSFEKNPIDFLEAKGYKEVKKDLIIKLPKYSLFELENGRKRMLASAGELQKGNELALPSKYVNFLYLASHYEKLKGSPEDNEQKQLFVEQHKHYLDEIIEQISEFSKRVILADANLDKVLSAYNKHRDKPIREQAENIIHLFTLTNLGAPAAFKYFDTTIDRKRYTSTKEVLDATLIHQSITGLYETRIDLSQLGGDGGGSSGGSPAPGGTVSLQDEHRLFDIPVTTSLPDVWLQDFPQAWAETGGLGRAKCQAPIIIDLKPTAVPVSIKQYPMSLEAHMGIRQHIIKFLELGVLRPCRSPWNTPLLPVKKPGTQDYRPVQDLREINKRTVDIHPTVPNPYNLLSTLKPDYSWYTVLDLKDAFFCLPLAPQSQELFAFEWKDPERGISGQLTWTRLPQGFKNSPTLFDEALHRDLTDFRTQHPEVTLLQYVDDLLLAAPTKKACTQGTRHLLQELGEKGYRASAKKAQICQTKVTYLGYILSEGKRWLTPGRIETVARIPPPRNPREVREFLGTAGFCRLWIPGFAELAAPLYALTKESTPFTWQTEHQLAFEALKKALLSAPALGLPDTSKPFTLFLDERQGIAKGVLTQKLGPWKRPVAYLSKKLDPVAAGWPPCLRIMAATAMLVKDSAKLTLGQPLTVITPHTLEAIVRQPPDRWITNARLTHYQALLLDTDRVQFGPPVTLNPATLLPVPENQPSPHDCRQVLAETHGTREDLKDQELPDADHTWYTDGSSYLDSGTRRAGAAVVDGHNTIWAQSLPPGTSAQKAELIALTKALELSKGKKANIYTDSRYAFATAHTHGSIYERRGLLTSEGKEIKNKAEIIALLKALFLPQEVAIIHCPGHQKGQDPVAVGNRQADRVARQAAMAEVLTLATEPDNTSHITAGKRTADGSEFEKRTADGSEFESPKKKAKVE

SEQ ID NO: 1509 - protein, 2097 aa, synthetic construct
MPAAKRVKLDGGDKKYSIGLDIGTNSVGWAVITDEYKVPSKKFKVLGNTDRHSIKKNLIGALLFDSGETAEATRLKRTARRRYTRRKNRICYLQEIFSNEMAKVDDSFFHRLEESFLVEEDKKHERHPIFGNIVDEVAYHEKYPTIYHLRKKLVDSTDKADLRLIYLALAHMIKFRGHFLIEGDLNPDNSDVDKLFIQLVQTYNQLFEENPINASGVDAKAILSARLSKSRRLENLIAQLPGEKKNGLFGNLIALSLGLTPNFKSNFDLAEDAKLQLSKDTYDDDLDNLLAQIGDQYADLFLAAKNLSDAILLSDILRVNTEITKAPLSASMIKRYDEHHQDLTLLKALVRQQLPEKYKEIFFDQSKNGYAGYIDGGASQEEFYKFIKPILEKMDGTEELLVKLNREDLLRKQRTFDNGSIPHQIHLGELHAILRRQEDFYPFLKDNREKIEKILTFRIPYYVGPLARGNSRFAWMTRKSEETITPWNFEEVVDKGASAQSFIERMTNFDKNLPNEKVLPKHSLLYEYFTVYNELTKVKYVTEGMRKPAFLSGEQKKAIVDLLFKTNRKVTVKQLKEDYFKKIECFDSVEISGVEDRFNASLGTYHDLLKIIKDKDFLDNEENEDILEDIVLTLTLFEDREMIEERLKTYAHLFDDKVMKQLKRRRYTGWGRLSRKLINGIRDKQSGKTILDFLKSDGFANRNFMQLIHDDSLTFKEDIQKAQVSGQGDSLHEHIANLAGSPAIKKGILQTVKVVDELVKVMGRHKPENIVIEMARENQTTQKGQKNSRERMKRIEEGIKELGSQILKEHPVENTQLQNEKLYLYYLQNGRDMYVDQELDINRLSDYDVDHIVPQSFLKDDSIDNKVLTRSDKARGKSDNVPSEEVVKKMKNYWRQLLNAKLITQRKFDNLTKAERGGLSELDKAGFIKRQLVETRQITKHVAQILDSRMNTKYDENDKLIREVKVITLKSKLVSDFRKDFQFYKVREINNYHHAHDAYLNAVVGTALIKKYPKLESEFVYGDYKVYDVRKMIAKSEQEIGKATAKYFFYSNIMNFFKTEITLANGEIRKRPLIETNGETGEIVWDKGRDFATVRKVLSMPQVNIVKKTEVQTGGFSKESILPKRNSDKLIARKKDWDPKKYGGFDSPTVAYSVLVVAKVEKGKSKKLKSVKELLGITIMERSSFEKNPIDFLEAKGYKEVKKDLIIKLPKYSLFELENGRKRMLASAGELQKGNELALPSKYVNFLYLASHYEKLKGSPEDNEQKQLFVEQHKHYLDEIIEQISEFSKRVILADANLDKVLSAYNKHRDKPIREQAENIIHLFTLTNLGAPAAFKYFDTTIDRKRYTSTKEVLDATLIHQSITGLYETRIDLSQLGGDGGPAPGSSGGTVSLQDEHRLFDIPVTTSLPDVWLQDFPQAWAETGGLGRAKCQAPIIIDLKPTAVPVSIKQYPMSLEAHMGIRQHIIKFLELGVLRPCRSPWNTPLLPVKKPGTQDYRPVQDLREINKRTVDIHPTVPNPYNLLSTLKPDYSWYTVLDLKDAFFCLPLAPQSQELFAFEWKDPERGISGQLTWTRLPQGFKNSPTLFDEALHRDLTDFRTQHPEVTLLQYVDDLLLAAPTKKACTQGTRHLLQELGEKGYRASAKKAQICQTKVTYLGYILSEGKRWLTPGRIETVARIPPPRNPREVREFLGTAGFCRLWIPGFAELAAPLYALTKESTPFTWQTEHQLAFEALKKALLSAPALGLPDTSKPFTLFLDERQGIAKGVLTQKLGPWKRPVAYLSKKLDPVAAGWPPCLRIMAATAMLVKDSAKLTLGQPLTVITPHTLEAIVRQPPDRWITNARLTHYQALLLDTDRVQFGPPVTLNPATLLPVPENQPSPHDCRQVLAETHGTREDLKDQELPDADHTWYTDGSSYLDSGTRRAGAAVVDGHNTIWAQSLPPGTSAQKAELIALTKALELSKGKKANIYTDSRYAFATAHTHGSIYERRGLLTSEGKEIKNKAEIIALLKALFLPQEVAIIHCPGHQKGQDPVAVGNRQADRVARQAAMAEVLTLATEPDNTSHITAGKRTADGSEFEKRTADGSEFESPKKKAKVE

SEQ ID NO: 1510 - protein, 2009 aa, synthetic construct
MPAAKRVKLDGGDKKYSIGLDIGTNSVGWAVITDEYKVPSKKFKVLGNTDRHSIKKNLIGALLFDSGETAEATRLKRTARRRYTRRKNRICYLQEIFSNEMAKVDDSFFHRLEESFLVEEDKKHERHPIFGNIVDEVAYHEKYPTIYHLRKKLVDSTDKADLRLIYLALAHMIKFRGHFLIEGDLNPDNSDVDKLFIQLVQTYNQLFEENPINASGVDAKAILSARLSKSRRLENLIAQLPGEKKNGLFGNLIALSLGLTPNFKSNFDLAEDAKLQLSKDTYDDDLDNLLAQIGDQYADLFLAAKNLSDAILLSDILRVNTEITKAPLSASMIKRYDEHHQDLTLLKALVRQQLPEKYKEIFFDQSKNGYAGYIDGGASQEEFYKFIKPILEKMDGTEELLVKLNREDLLRKQRTFDNGSIPHQIHLGELHAILRRQEDFYPFLKDNREKIEKILTFRIPYYVGPLARGNSRFAWMTRKSEETITPWNFEEVVDKGASAQSFIERMTNFDKNLPNEKVLPKHSLLYEYFTVYNELTKVKYVTEGMRKPAFLSGEQKKAIVDLLFKTNRKVTVKQLKEDYFKKIECFDSVEISGVEDRFNASLGTYHDLLKIIKDKDFLDNEENEDILEDIVLTLTLFEDREMIEERLKTYAHLFDDKVMKQLKRRRYTGWGRLSRKLINGIRDKQSGKTILDFLKSDGFANRNFMQLIHDDSLTFKEDIQKAQVSGQGDSLHEHIANLAGSPAIKKGILQTVKVVDELVKVMGRHKPENIVIEMARENQTTQKGQKNSRERMKRIEEGIKELGSQILKEHPVENTQLQNEKLYLYYLQNGRDMYVDQELDINRLSDYDVDHIVPQSFLKDDSIDNKVLTRSDKARGKSDNVPSEEVVKKMKNYWRQLLNAKLITQRKFDNLTKAERGGLSELDKAGFIKRQLVETRQITKHVAQILDSRMNTKYDENDKLIREVKVITLKSKLVSDFRKDFQFYKVREINNYHHAHDAYLNAVVGTALIKKYPKLESEFVYGDYKVYDVRKMIAKSEQEIGKATAKYFFYSNIMNFFKTEITLANGEIRKRPLIETNGETGEIVWDKGRDFATVRKVLSMPQVNIVKKTEVQTGGFSKESILPKRNSDKLIARKKDWDPKKYGGFDSPTVAYSVLVVAKVEKGKSKKLKSVKELLGITIMERSSFEKNPIDFLEAKGYKEVKKDLIIKLPKYSLFELENGRKRMLASAGELQKGNELALPSKYVNFLYLASHYEKLKGSPEDNEQKQLFVEQHKHYLDEIIEQISEFSKRVILADANLDKVLSAYNKHRDKPIREQAENIIHLFTLTNLGAPAAFKYFDTTIDRKRYTSTKEVLDATLIHQSITGLYETRIDLSQLGGDGGEAAAKGGGPAPGGGLEHLPPPPEVSQFPLNPERLQALTDLVSRALEAKHIEPYQGPGNNPIFPVKKPNGKWRFIHDLRATNSVTRDLASPSPGPPDLTSLPQGLPHLRTIDLTDAFFQIPLPTIFQPYFAFTLPQPNNYGPGTRYSWRVLPQGFKNSPTLFEQQLSHILTPVRKTFPNSLIIQYMDDILLASPAPGELAALTDKVTNALTKEGLPLSPEKTQATPGPIHFLGQVISQDCITYETLPSINVKSTWSLAELQSMLGELQWVSKGTPVLRSSLHQLYLALRGHRDPRDTIKLTSIQVQALRTIQKALTLNCRSRLVNQLPILALIMLRPTGTTAVLFQTKQKWPLVWLHTPHPATSLRPWGQLLANAVIILDKYSLQHYGQVCKSFHHNISNQALTYYLHTSDQSSVAILLQHSHRFHNLGAQPSGPWRSLLQMPQIFQNIDVLRPPFTISPVVINHAPCLFSDGSASKAAFIIWDRQVIHQQVLSLPSTCSAQAGELFGLLAGLQKSQPWVALNIFLDSKFLIGHLRRMALGAFPGPSTQCELHTQLLPLLQGKTVYVHHVRSHTLLQDPISRLNEATDALMLAPLLPLAGKRTADGSEFEKRTADGSEFESPKKKAKVE

SEQ ID NO: 1511 - protein, 2001 aa, synthetic construct
MPAAKRVKLDGGDKKYSIGLDIGTNSVGWAVITDEYKVPSKKFKVLGNTDRHSIKKNLIGALLFDSGETAEATRLKRTARRRYTRRKNRICYLQEIFSNEMAKVDDSFFHRLEESFLVEEDKKHERHPIFGNIVDEVAYHEKYPTIYHLRKKLVDSTDKADLRLIYLALAHMIKFRGHFLIEGDLNPDNSDVDKLFIQLVQTYNQLFEENPINASGVDAKAILSARLSKSRRLENLIAQLPGEKKNGLFGNLIALSLGLTPNFKSNFDLAEDAKLQLSKDTYDDDLDNLLAQIGDQYADLFLAAKNLSDAILLSDILRVNTEITKAPLSASMIKRYDEHHQDLTLLKALVRQQLPEKYKEIFFDQSKNGYAGYIDGGASQEEFYKFIKPILEKMDGTEELLVKLNREDLLRKQRTFDNGSIPHQIHLGELHAILRRQEDFYPFLKDNREKIEKILTFRIPYYVGPLARGNSRFAWMTRKSEETITPWNFEEVVDKGASAQSFIERMTNFDKNLPNEKVLPKHSLLYEYFTVYNELTKVKYVTEGMRKPAFLSGEQKKAIVDLLFKTNRKVTVKQLKEDYFKKIECFDSVEISGVEDRFNASLGTYHDLLKIIKDKDFLDNEENEDILEDIVLTLTLFEDREMIEERLKTYAHLFDDKVMKQLKRRRYTGWGRLSRKLINGIRDKQSGKTILDFLKSDGFANRNFMQLIHDDSLTFKEDIQKAQVSGQGDSLHEHIANLAGSPAIKKGILQTVKVVDELVKVMGRHKPENIVIEMARENQTTQKGQKNSRERMKRIEEGIKELGSQILKEHPVENTQLQNEKLYLYYLQNGRDMYVDQELDINRLSDYDVDHIVPQSFLKDDSIDNKVLTRSDKARGKSDNVPSEEVVKKMKNYWRQLLNAKLITQRKFDNLTKAERGGLSELDKAGFIKRQLVETRQITKHVAQILDSRMNTKYDENDKLIREVKVITLKSKLVSDFRKDFQFYKVREINNYHHAHDAYLNAVVGTALIKKYPKLESEFVYGDYKVYDVRKMIAKSEQEIGKATAKYFFYSNIMNFFKTEITLANGEIRKRPLIETNGETGEIVWDKGRDFATVRKVLSMPQVNIVKKTEVQTGGFSKESILPKRNSDKLIARKKDWDPKKYGGFDSPTVAYSVLVVAKVEKGKSKKLKSVKELLGITIMERSSFEKNPIDFLEAKGYKEVKKDLIIKLPKYSLFELENGRKRMLASAGELQKGNELALPSKYVNFLYLASHYEKLKGSPEDNEQKQLFVEQHKHYLDEIIEQISEFSKRVILADANLDKVLSAYNKHRDKPIREQAENIIHLFTLTNLGAPAAFKYFDTTIDRKRYTSTKEVLDATLIHQSITGLYETRIDLSQLGGDGGGGSGGGLEHLPPPPEVSQFPLNPERLQALTDLVSRALEAKHIEPYQGPGNNPIFPVKKPNGKWRFIHDLRATNSVTRDLASPSPGPPDLTSLPQGLPHLRTIDLTDAFFQIPLPTIFQPYFAFTLPQPNNYGPGTRYSWRVLPQGFKNSPTLFQQQLSHILTPVRKTFPNSLIIQYMDDILLASPAPGELAALTDKVTNALTKEGLPLSPEKTQATPGPIHFLGQVISQDCITYETLPSINVKSTWSLAELQSMLGELQWVSKGTPVLRSSLHQLYLALRGHRDPRDTIKLTSIQVQALRTIQKALTLNCRSRLVNQLPILALIMLRPTGTTAVLFQTKQKWPLVWLHTPHPATSLRPWGQLLANAVIILDKYSLQHYGQVCKSFHHNISNQALTYYLHTSDQSSVAILLQHSHRFHNLGAQPSGPWRSLLQMPQIFQNIDVLRPPFTISPVVINHAPCLFSDGSASKAAFIIWDRQVIHQQVLSLPSTCSAQAGELFGLLAGLQKSQPWVALNIFLDSKFLIGHLRRMAWGAFPGPSTQCELHTQLLPLLQGKTVYVHHVRSHTLLQDPISRLNEATDALMLAPLLPLAGKRTADGSEFEKRTADGSEFESPKKKAKVE

SEQ ID NO: 1512 - protein, 2004 aa, synthetic construct
MPAAKRVKLDGGDKKYSIGLDIGTNSVGWAVITDEYKVPSKKFKVLGNTDRHSIKKNLIGALLFDSGETAEATRLKRTARRRYTRRKNRICYLQEIFSNEMAKVDDSFFHRLEESFLVEEDKKHERHPIFGNIVDEVAYHEKYPTIYHLRKKLVDSTDKADLRLIYLALAHMIKFRGHFLIEGDLNPDNSDVDKLFIQLVQTYNQLFEENPINASGVDAKAILSARLSKSRRLENLIAQLPGEKKNGLFGNLIALSLGLTPNFKSNFDLAEDAKLQLSKDTYDDDLDNLLAQIGDQYADLFLAAKNLSDAILLSDILRVNTEITKAPLSASMIKRYDEHHQDLTLLKALVRQQLPEKYKEIFFDQSKNGYAGYIDGGASQEEFYKFIKPILEKMDGTEELLVKLNREDLLRKQRTFDNGSIPHQIHLGELHAILRRQEDFYPFLKDNREKIEKILTFRIPYYVGPLARGNSRFAWMTRKSEETITPWNFEEVVDKGASAQSFIERMTNFDKNLPNEKVLPKHSLLYEYFTVYNELTKVKYVTEGMRKPAFLSGEQKKAIVDLLFKTNRKVTVKQLKEDYFKKIECFDSVEISGVEDRFNASLGTYHDLLKIIKDKDFLDNEENEDILEDIVLTLTLFEDREMIEERLKTYAHLFDDKVMKQLKRRRYTGWGRLSRKLINGIRDKQSGKTILDFLKSDGFANRNFMQLIHDDSLTFKEDIQKAQVSGQGDSLHEHIANLAGSPAIKKGILQTVKVVDELVKVMGRHKPENIVIEMARENQTTQKGQKNSRERMKRIEEGIKELGSQILKEHPVENTQLQNEKLYLYYLQNGRDMYVDQELDINRLSDYDVDHIVPQSFLKDDSIDNKVLTRSDKARGKSDNVPSEEVVKKMKNYWRQLLNAKLITQRKFDNLTKAERGGLSELDKAGFIKRQLVETRQITKHVAQILDSRMNTKYDENDKLIREVKVITLKSKLVSDFRKDFQFYKVREINNYHHAHDAYLNAVVGTALIKKYPKLESEFVYGDYKVYDVRKMIAKSEQEIGKATAKYFFYSNIMNFFKTEITLANGEIRKRPLIETNGETGEIVWDKGRDFATVRKVLSMPQVNIVKKTEVQTGGFSKESILPKRNSDKLIARKKDWDPKKYGGFDSPTVAYSVLVVAKVEKGKSKKLKSVKELLGITIMERSSFEKNPIDFLEAKGYKEVKKDLIIKLPKYSLFELENGRKRMLASAGELQKGNELALPSKYVNFLYLASHYEKLKGSPEDNEQKQLFVEQHKHYLDEIIEQISEFSKRVILADANLDKVLSAYNKHRDKPIREQAENIIHLFTLTNLGAPAAFKYFDTTIDRKRYTSTKEVLDATLIHQSITGLYETRIDLSQLGGDGGGGSGGGGGGLEHLPPPPEVSQFPLNPERLQALTDLVSRALEAKHIEPYQGPGNNPIFPVKKPNGKWRFIHDLRATNSVTRDLASPSPGPPDLTSLPQGLPHLRTIDLTDAFFQIPLPTIFQPYFAFTLPQPNNYGPGTRYSWRVLPQGFKNSPTLFQQQLSHILTPVRKTFPNSLIIQYMDDILLASPAPGELAALTDKVTNALTKEGLPLSPEKTQATPGPIHFLGQVISQDCITYETLPSINVKSTWSLAELQSMLGELQWVSKGTPVLRSSLHQLYLALRGHRDPRDTIKLTSIQVQALRTIQKALTLNCRSRLVNQLPILALIMLRPTGTTAVLFQTKQKWPLVWLHTPHPATSLRPWGQLLANAVIILDKYSLQHYGQVCKSFHHNISNQALTYYLHTSDQSSVAILLQHSHRFHNLGAQPSGPWRSLLQMPQIFQNIDVLRPPFTISPVVINHAPCLFSDGSASKAAFIIWDRQVIHQQVLSLPSTCSAQAGELFGLLAGLQKSQPWVALNIFLDSKFLIGHLRRMAWGAFPGPSTQCELHTQLLPLLQGKTVYVHHVRSHTLLQDPISRLNEATDALMLAPLLPLAGKRTADGSEFEKRTADGSEFESPKKKAKVE

SEQ ID NO: 1513 - protein, 2007 aa, synthetic construct
MPAAKRVKLDGGDKKYSIGLDIGTNSVGWAVITDEYKVPSKKFKVLGNTDRHSIKKNLIGALLFDSGETAEATRLKRTARRRYTRRKNRICYLQEIFSNEMAKVDDSFFHRLEESFLVEEDKKHERHPIFGNIVDEVAYHEKYPTIYHLRKKLVDSTDKADLRLIYLALAHMIKFRGHFLIEGDLNPDNSDVDKLFIQLVQTYNQLFEENPINASGVDAKAILSARLSKSRRLENLIAQLPGEKKNGLFGNLIALSLGLTPNFKSNFDLAEDAKLQLSKDTYDDDLDNLLAQIGDQYADLFLAAKNLSDAILLSDILRVNTEITKAPLSASMIKRYDEHHQDLTLLKALVRQQLPEKYKEIFFDQSKNGYAGYIDGGASQEEFYKFIKPILEKMDGTEELLVKLNREDLLRKQRTFDNGSIPHQIHLGELHAILRRQEDFYPFLKDNREKIEKILTFRIPYYVGPLARGNSRFAWMTRKSEETITPWNFEEVVDKGASAQSFIERMTNFDKNLPNEKVLPKHSLLYEYFTVYNELTKVKYVTEGMRKPAFLSGEQKKAIVDLLFKTNRKVTVKQLKEDYFKKIECFDSVEISGVEDRFNASLGTYHDLLKIIKDKDFLDNEENEDILEDIVLTLTLFEDREMIEERLKTYAHLFDDKVMKQLKRRRYTGWGRLSRKLINGIRDKQSGKTILDFLKSDGFANRNFMQLIHDDSLTFKEDIQKAQVSGQGDSLHEHIANLAGSPAIKKGILQTVKVVDELVKVMGRHKPENIVIEMARENQTTQKGQKNSRERMKRIEEGIKELGSQILKEHPVENTQLQNEKLYLYYLQNGRDMYVDQELDINRLSDYDVDHIVPQSFLKDDSIDNKVLTRSDKARGKSDNVPSEEVVKKMKNYWRQLLNAKLITQRKFDNLTKAERGGLSELDKAGFIKRQLVETRQITKHVAQILDSRMNTKYDENDKLIREVKVITLKSKLVSDFRKDFQFYKVREINNYHHAHDAYLNAVVGTALIKKYPKLESEFVYGDYKVYDVRKMIAKSEQEIGKATAKYFFYSNIMNFFKTEITLANGEIRKRPLIETNGETGEIVWDKGRDFATVRKVLSMPQVNIVKKTEVQTGGFSKESILPKRNSDKLIARKKDWDPKKYGGFDSPTVAYSVLVVAKVEKGKSKKLKSVKELLGITIMERSSFEKNPIDFLEAKGYKEVKKDLIIKLPKYSLFELENGRKRMLASAGELQKGNELALPSKYVNFLYLASHYEKLKGSPEDNEQKQLFVEQHKHYLDEIIEQISEFSKRVILADANLDKVLSAYNKHRDKPIREQAENIIHLFTLTNLGAPAAFKYFDTTIDRKRYTSTKEVLDATLIHQSITGLYETRIDLSQLGGDGGPAPGGGGSSGGGLEHLPPPPEVSQFPLNPERLQALTDLVSRALEAKHIEPYQGPGNNPIFPVKKPNGKWRFIHDLRATNSVTRDLASPSPGPPDLTSLPQGLPHLRTIDLTDAFFQIPLPTIFQPYFAFTLPQPNNYGPGTRYSWRVLPQGFKNSPTLFQQQLSHILTPVRKTFPNSLIIQYMDDILLASPAPGELAALTDKVTNALTKEGLPLSPEKTQATPGPIHFLGQVISQDCITYETLPSINVKSTWSLAELQSMLGELQWVSKGTPVLRSSLHQLYLALRGHRDPRDTIKLTSIQVQALRTIQKALTLNCRSRLVNQLPILALIMLRPTGTTAVLFQTKQKWPLVWLHTPHPATSLRPWGQLLANAVIILDKYSLQHYGQVCKSFHHNISNQALTYYLHTSDQSSVAILLQHSHRFHNLGAQPSGPWRSLLQMPQIFQNIDVLRPPFTISPVVINHAPCLFSDGSASKAAFIIWDRQVIHQQVLSLPSTCSAQAGELFGLLAGLQKSQPWVALNIFLDSKFLIGHLRRMAWGAFPGPSTQCELHTQLLPLLQGKTVYVHHVRSHTLLQDPISRLNEATDALMLAPLLPLAGKRTADGSEFEKRTADGSEFESPKKKAKVE

SEQ ID NO: 1514 - protein, 2007 aa, synthetic construct
MPAAKRVKLDGGDKKYSIGLDIGTNSVGWAVITDEYKVPSKKFKVLGNTDRHSIKKNLIGALLFDSGETAEATRLKRTARRRYTRRKNRICYLQEIFSNEMAKVDDSFFHRLEESFLVEEDKKHERHPIFGNIVDEVAYHEKYPTIYHLRKKLVDSTDKADLRLIYLALAHMIKFRGHFLIEGDLNPDNSDVDKLFIQLVQTYNQLFEENPINASGVDAKAILSARLSKSRRLENLIAQLPGEKKNGLFGNLIALSLGLTPNFKSNFDLAEDAKLQLSKDTYDDDLDNLLAQIGDQYADLFLAAKNLSDAILLSDILRVNTEITKAPLSASMIKRYDEHHQDLTLLKALVRQQLPEKYKEIFFDQSKNGYAGYIDGGASQEEFYKFIKPILEKMDGTEELLVKLNREDLLRKQRTFDNGSIPHQIHLGELHAILRRQEDFYPFLKDNREKIEKILTFRIPYYVGPLARGNSRFAWMTRKSEETITPWNFEEVVDKGASAQSFIERMTNFDKNLPNEKVLPKHSLLYEYFTVYNELTKVKYVTEGMRKPAFLSGEQKKAIVDLLFKTNRKVTVKQLKEDYFKKIECFDSVEISGVEDRFNASLGTYHDLLKIIKDKDFLDNEENEDILEDIVLTLTLFEDREMIEERLKTYAHLFDDKVMKQLKRRRYTGWGRLSRKLINGIRDKQSGKTILDFLKSDGFANRNFMQLIHDDSLTFKEDIQKAQVSGQGDSLHEHIANLAGSPAIKKGILQTVKVVDELVKVMGRHKPENIVIEMARENQTTQKGQKNSRERMKRIEEGIKELGSQILKEHPVENTQLQNEKLYLYYLQNGRDMYVDQELDINRLSDYDVDHIVPQSFLKDDSIDNKVLTRSDKARGKSDNVPSEEVVKKMKNYWRQLLNAKLITQRKFDNLTKAERGGLSELDKAGFIKRQLVETRQITKHVAQILDSRMNTKYDENDKLIREVKVITLKSKLVSDFRKDFQFYKVREINNYHHAHDAYLNAVVGTALIKKYPKLESEFVYGDYKVYDVRKMIAKSEQEIGKATAKYFFYSNIMNFFKTEITLANGEIRKRPLIETNGETGEIVWDKGRDFATVRKVLSMPQVNIVKKTEVQTGGFSKESILPKRNSDKLIARKKDWDPKKYGGFDSPTVAYSVLVVAKVEKGKSKKLKSVKELLGITIMERSSFEKNPIDFLEAKGYKEVKKDLIIKLPKYSLFELENGRKRMLASAGELQKGNELALPSKYVNFLYLASHYEKLKGSPEDNEQKQLFVEQHKHYLDEIIEQISEFSKRVILADANLDKVLSAYNKHRDKPIREQAENIIHLFTLTNLGAPAAFKYFDTTIDRKRYTSTKEVLDATLIHQSITGLYETRIDLSQLGGDGGGGGPAPGSSGGGLEHLPPPPEVSQFPLNPERLQALTDLVSRALEAKHIEPYQGPGNNPIFPVKKPNGKWRFIHDLRATNSVTRDLASPSPGPPDLTSPPQGLPHLRTIDLTDAFFQIPLPTIFQPYFAFTLPQPNNYGPGTRYSWRVLPQGFKNSPTLFQQQLSHILTPVRKTFPNSLIIQYMDDILLASPAPGELAALTDKVTNALTKEGLPLSPEKTQATPGPIHFLGQVISQDCITYETLPSINVKSTWSLAELQSMLGELQWVSKGTPVLRSSLHQLYLALRGHRDPRDTIKLTSIQVQALRTIQKALTLNCRSRLVNQLPILALIMLRPTGTTAVLFQTKQKWPLVWLHTPHPATSLRPWGQLLANAVIILDKYSLQHYGQVCKSFHHNISNQALTYYLHTSDQSSVAILLQHSHRFHNLGAQPSGPWRSLLQMPQIFQNIDVLRPPFTISPVVINHAPCLFSDGSASKAAFIIWDRQVIHQQVLSLPSTCSAQAGELFGLLAGLQKSQPWVALNIFLDSKFLIGHLRRMAWGAFPGPSTQCELHTQLLPLLQGKTVYVHHVRSHTLLQDPISRLNEATDALMLAPLLPLAGKRTADGSEFEKRTADGSEFESPKKKAKVE

SEQ ID NO: 1515 - protein, 2007 aa, synthetic construct
MPAAKRVKLDGGDKKYSIGLDIGTNSVGWAVITDEYKVPSKKFKVLGNTDRHSIKKNLIGALLFDSGETAEATRLKRTARRRYTRRKNRICYLQEIFSNEMAKVDDSFFHRLEESFLVEEDKKHERHPIFGNIVDEVAYHEKYPTIYHLRKKLVDSTDKADLRLIYLALAHMIKFRGHFLIEGDLNPDNSDVDKLFIQLVQTYNQLFEENPINASGVDAKAILSARLSKSRRLENLIAQLPGEKKNGLFGNLIALSLGLTPNFKSNFDLAEDAKLQLSKDTYDDDLDNLLAQIGDQYADLFLAAKNLSDAILLSDILRVNTEITKAPLSASMIKRYDEHHQDLTLLKALVRQQLPEKYKEIFFDQSKNGYAGYIDGGASQEEFYKFIKPILEKMDGTEELLVKLNREDLLRKQRTFDNGSIPHQIHLGELHAILRRQEDFYPFLKDNREKIEKILTFRIPYYVGPLARGNSRFAWMTRKSEETITPWNFEEVVDKGASAQSFIERMTNFDKNLPNEKVLPKHSLLYEYFTVYNELTKVKYVTEGMRKPAFLSGEQKKAIVDLLFKTNRKVTVKQLKEDYFKKIECFDSVEISGVEDRFNASLGTYHDLLKIIKDKDFLDNEENEDILEDIVLTLTLFEDREMIEERLKTYAHLFDDKVMKQLKRRRYTGWGRLSRKLINGIRDKQSGKTILDFLKSDGFANRNFMQLIHDDSLTFKEDIQKAQVSGQGDSLHEHIANLAGSPAIKKGILQTVKVVDELVKVMGRHKPENIVIEMARENQTTQKGQKNSRERMKRIEEGIKELGSQILKEHPVENTQLQNEKLYLYYLQNGRDMYVDQELDINRLSDYDVDHIVPQSFLKDDSIDNKVLTRSDKARGKSDNVPSEEVVKKMKNYWRQLLNAKLITQRKFDNLTKAERGGLSELDKAGFIKRQLVETRQITKHVAQILDSRMNTKYDENDKLIREVKVITLKSKLVSDFRKDFQFYKVREINNYHHAHDAYLNAVVGTALIKKYPKLESEFVYGDYKVYDVRKMIAKSEQEIGKATAKYFFYSNIMNFFKTEITLANGEIRKRPLIETNGETGEIVWDKGRDFATVRKVLSMPQVNIVKKTEVQTGGFSKESILPKRNSDKLIARKKDWDPKKYGGFDSPTVAYSVLVVAKVEKGKSKKLKSVKELLGITIMERSSFEKNPIDFLEAKGYKEVKKDLIIKLPKYSLFELENGRKRMLASAGELQKGNELALPSKYVNFLYLASHYEKLKGSPEDNEQKQLFVEQHKHYLDEIIEQISEFSKRVILADANLDKVLSAYNKHRDKPIREQAENIIHLFTLTNLGAPAAFKYFDTTIDRKRYTSTKEVLDATLIHQSITGLYETRIDLSQLGGDGGGSSGGGPAPGGGLEHLPPPPEVSQFPLNPERLQALTDLVSRALEAKHIEPYQGPGNNPIFPVKKPNGKWRFIHDLRATNSVTRDLASPSPGPPDLTSPPQGLPHLRTIDLTDAFFQIPLPTIFQPYFAFTLPQPNNYGPGTRYSWRVLPQGFKNSPTLFQQQLSHILTPVRKTFPNSLIIQYMDDILLASPAPGELAALTDKVTNALTKEGLPLSPEKTQATPGPIHFLGQVISQDCITYETLPSINVKSTWSLAELQSMLGELQWVSKGTPVLRSSLHQLYLALRGHRDPRDTIKLTSIQVQALRTIQKALTLNCRSRLVNQLPILALIMLRPTGTTAVLFQTKQKWPLVWLHTPHPATSLRPWGQLLANAVIILDKYSLQHYGQVCKSFHHNISNQALTYYLHTSDQSSVAILLQHSHRFHNLGAQPSGPWRSLLQMPQIFQNIDVLRPPFTISPVVINHAPCLFSDGSASKAAFIIWDRQVIHQQVLSLPSTCSAQAGELFGLLAGLQKSQPWVALNIFLDSKFLIGHLRRMAWGAFPGPSTQCELHTQLLPLLQGKTVYVHHVRSHTLLQDPISRLNEATDALMLAPLLPLAGKRTADGSEFEKRTADGSEFESPKKKAKVE

SEQ ID NO: 1516 - protein, 2006 aa, synthetic construct
MPAAKRVKLDGGDKKYSIGLDIGTNSVGWAVITDEYKVPSKKFKVLGNTDRHSIKKNLIGALLFDSGETAEATRLKRTARRRYTRRKNRICYLQEIFSNEMAKVDDSFFHRLEESFLVEEDKKHERHPIFGNIVDEVAYHEKYPTIYHLRKKLVDSTDKADLRLIYLALAHMIKFRGHFLIEGDLNPDNSDVDKLFIQLVQTYNQLFEENPINASGVDAKAILSARLSKSRRLENLIAQLPGEKKNGLFGNLIALSLGLTPNFKSNFDLAEDAKLQLSKDTYDDDLDNLLAQIGDQYADLFLAAKNLSDAILLSDILRVNTEITKAPLSASMIKRYDEHHQDLTLLKALVRQQLPEKYKEIFFDQSKNGYAGYIDGGASQEEFYKFIKPILEKMDGTEELLVKLNREDLLRKQRTFDNGSIPHQIHLGELHAILRRQEDFYPFLKDNREKIEKILTFRIPYYVGPLARGNSRFAWMTRKSEETITPWNFEEVVDKGASAQSFIERMTNFDKNLPNEKVLPKHSLLYEYFTVYNELTKVKYVTEGMRKPAFLSGEQKKAIVDLLFKTNRKVTVKQLKEDYFKKIECFDSVEISGVEDRFNASLGTYHDLLKIIKDKDFLDNEENEDILEDIVLTLTLFEDREMIEERLKTYAHLFDDKVMKQLKRRRYTGWGRLSRKLINGIRDKQSGKTILDFLKSDGFANRNFMQLIHDDSLTFKEDIQKAQVSGQGDSLHEHIANLAGSPAIKKGILQTVKVVDELVKVMGRHKPENIVIEMARENQTTQKGQKNSRERMKRIEEGIKELGSQILKEHPVENTQLQNEKLYLYYLQNGRDMYVDQELDINRLSDYDVDHIVPQSFLKDDSIDNKVLTRSDKARGKSDNVPSEEVVKKMKNYWRQLLNAKLITQRKFDNLTKAERGGLSELDKAGFIKRQLVETRQITKHVAQILDSRMNTKYDENDKLIREVKVITLKSKLVSDFRKDFQFYKVREINNYHHAHDAYLNAVVGTALIKKYPKLESEFVYGDYKVYDVRKMIAKSEQEIGKATAKYFFYSNIMNFFKTEITLANGEIRKRPLIETNGETGEIVWDKGRDFATVRKVLSMPQVNIVKKTEVQTGGFSKESILPKRNSDKLIARKKDWDPKKYGGFDSPTVAYSVLVVAKVEKGKSKKLKSVKELLGITIMERSSFEKNPIDFLEAKGYKEVKKDLIIKLPKYSLFELENGRKRMLASAGELQKGNELALPSKYVNFLYLASHYEKLKGSPEDNEQKQLFVEQHKHYLDEIIEQISEFSKRVILADANLDKVLSAYNKHRDKPIREQAENIIHLFTLTNLGAPAAFKYFDTTIDRKRYTSTKEVLDATLIHQSITGLYETRIDLSQLGGDGGGGSEAAAKGGGLEHLPPPPEVSQFPLNPERLQALTDLVSRALEAKHIEPYQGPGNNPIFPVKKPNGKWRFIHDLRATNSVTRDLASPSPGPPDLTSPPQGLPHLRTIDLTDAFFQIPLPTIFQPYFAFTLPQPNNYGPGTRYSWRVLPQGFKNSPTLFQQQLSHILTPVRKTFPNSLIIQYMDDILLASPAPGELAALTDKVTNALTKEGLPLSPEKTQATPGPIHFLGQVISQDCITYETLPSINVKSTWSLAELQSMLGELQWVSKGTPVLRSSLHQLYLALRGHRDPRDTIKLTSIQVQALRTIQKALTLNCRSRLVNQLPILALIMLRPTGTTAVLFQTKQKWPLVWLHTPHPATSLRPWGQLLANAVIILDKYSLQHYGQVCKSFHHNISNQALTYYLHTSDQSSVAILLQHSHRFHNLGAQPSGPWRSLLQMPQIFQNIDVLRPPFTISPVVINHAPCLFSDGSASKAAFIIWDRQVIHQQVLSLPSTCSAQAGELFGLLAGLQKSQPWVALNIFLDSKFLIGHLRRMAWGAFPGPSTQCELHTQLLPLLQGKTVYVHHVRSHTLLQDPISRLNEATDALMLAPLLPLAGKRTADGSEFEKRTADGSEFESPKKKAKVE

SEQ ID NO: 1517 - protein, 2009 aa, synthetic construct
MPAAKRVKLDGGDKKYSIGLDIGTNSVGWAVITDEYKVPSKKFKVLGNTDRHSIKKNLIGALLFDSGETAEATRLKRTARRRYTRRKNRICYLQEIFSNEMAKVDDSFFHRLEESFLVEEDKKHERHPIFGNIVDEVAYHEKYPTIYHLRKKLVDSTDKADLRLIYLALAHMIKFRGHFLIEGDLNPDNSDVDKLFIQLVQTYNQLFEENPINASGVDAKAILSARLSKSRRLENLIAQLPGEKKNGLFGNLIALSLGLTPNFKSNFDLAEDAKLQLSKDTYDDDLDNLLAQIGDQYADLFLAAKNLSDAILLSDILRVNTEITKAPLSASMIKRYDEHHQDLTLLKALVRQQLPEKYKEIFFDQSKNGYAGYIDGGASQEEFYKFIKPILEKMDGTEELLVKLNREDLLRKQRTFDNGSIPHQIHLGELHAILRRQEDFYPFLKDNREKIEKILTFRIPYYVGPLARGNSRFAWMTRKSEETITPWNFEEVVDKGASAQSFIERMTNFDKNLPNEKVLPKHSLLYEYFTVYNELTKVKYVTEGMRKPAFLSGEQKKAIVDLLFKTNRKVTVKQLKEDYFKKIECFDSVEISGVEDRFNASLGTYHDLLKIIKDKDFLDNEENEDILEDIVLTLTLFEDREMIEERLKTYAHLFDDKVMKQLKRRRYTGWGRLSRKLINGIRDKQSGKTILDFLKSDGFANRNFMQLIHDDSLTFKEDIQKAQVSGQGDSLHEHIANLAGSPAIKKGILQTVKVVDELVKVMGRHKPENIVIEMARENQTTQKGQKNSRERMKRIEEGIKELGSQILKEHPVENTQLQNEKLYLYYLQNGRDMYVDQELDINRLSDYDVDHIVPQSFLKDDSIDNKVLTRSDKARGKSDNVPSEEVVKKMKNYWRQLLNAKLITQRKFDNLTKAERGGLSELDKAGFIKRQLVETRQITKHVAQILDSRMNTKYDENDKLIREVKVITLKSKLVSDFRKDFQFYKVREINNYHHAHDAYLNAVVGTALIKKYPKLESEFVYGDYKVYDVRKMIAKSEQEIGKATAKYFFYSNIMNFFKTEITLANGEIRKRPLIETNGETGEIVWDKGRDFATVRKVLSMPQVNIVKKTEVQTGGFSKESILPKRNSDKLIARKKDWDPKKYGGFDSPTVAYSVLVVAKVEKGKSKKLKSVKELLGITIMERSSFEKNPIDFLEAKGYKEVKKDLIIKLPKYSLFELENGRKRMLASAGELQKGNELALPSKYVNFLYLASHYEKLKGSPEDNEQKQLFVEQHKHYLDEIIEQISEFSKRVILADANLDKVLSAYNKHRDKPIREQAENIIHLFTLTNLGAPAAFKYFDTTIDRKRYTSTKEVLDATLIHQSITGLYETRIDLSQLGGDGGPAPEAAAKGSSGGGLEHLPPPPEVSQFPLNPERLQALTDLVSRALEAKHIEPYQGPGNNPIFPVKKPNGKWRFIHDLRATNSVTRDLASPSPGPPDLTSPPQGLPHLRTIDLTDAFFQIPLPTIFQPYFAFTLPQPNNYGPGTRYSWRVLPQGFKNSPTLFQQQLSHILTPVRKTFPNSLIIQYMDDILLASPAPGELAALTDKVTNALTKEGLPLSPEKTQATPGPIHFLGQVISQDCITYETLPSINVKSTWSLAELQSMLGELQWVSKGTPVLRSSLHQLYLALRGHRDPRDTIKLTSIQVQALRTIQKALTLNCRSRLVNQLPILALIMLRPTGTTAVLFQTKQKWPLVWLHTPHPATSLRPWGQLLANAVIILDKYSLQHYGQVCKSFHHNISNQALTYYLHTSDQSSVAILLQHSHRFHNLGAQPSGPWRSLLQMPQIFQNIDVLRPPFTISPVVINHAPCLFSDGSASKAAFIIWDRQVIHQQVLSLPSTCSAQAGELFGLLAGLQKSQPWVALNIFLDSKFLIGHLRRMAWGAFPGPSTQCELHTQLLPLLQGKTVYVHHVRSHTLLQDPISRLNEATDALMLAPLLPLAGKRTADGSEFEKRTADGSEFESPKKKAKVE

SEQ ID NO: 1518 - protein, 2007 aa, synthetic construct
MPAAKRVKLDGGDKKYSIGLDIGTNSVGWAVITDEYKVPSKKFKVLGNTDRHSIKKNLIGALLFDSGETAEATRLKRTARRRYTRRKNRICYLQEIFSNEMAKVDDSFFHRLEESFLVEEDKKHERHPIFGNIVDEVAYHEKYPTIYHLRKKLVDSTDKADLRLIYLALAHMIKFRGHFLIEGDLNPDNSDVDKLFIQLVQTYNQLFEENPINASGVDAKAILSARLSKSRRLENLIAQLPGEKKNGLFGNLIALSLGLTPNFKSNFDLAEDAKLQLSKDTYDDDLDNLLAQIGDQYADLFLAAKNLSDAILLSDILRVNTEITKAPLSASMIKRYDEHHQDLTLLKALVRQQLPEKYKEIFFDQSKNGYAGYIDGGASQEEFYKFIKPILEKMDGTEELLVKLNREDLLRKQRTFDNGSIPHQIHLGELHAILRRQEDFYPFLKDNREKIEKILTFRIPYYVGPLARGNSRFAWMTRKSEETITPWNFEEVVDKGASAQSFIERMTNFDKNLPNEKVLPKHSLLYEYFTVYNELTKVKYVTEGMRKPAFLSGEQKKAIVDLLFKTNRKVTVKQLKEDYFKKIECFDSVEISGVEDRFNASLGTYHDLLKIIKDKDFLDNEENEDILEDIVLTLTLFEDREMIEERLKTYAHLFDDKVMKQLKRRRYTGWGRLSRKLINGIRDKQSGKTILDFLKSDGFANRNFMQLIHDDSLTFKEDIQKAQVSGQGDSLHEHIANLAGSPAIKKGILQTVKVVDELVKVMGRHKPENIVIEMARENQTTQKGQKNSRERMKRIEEGIKELGSQILKEHPVENTQLQNEKLYLYYLQNGRDMYVDQELDINRLSDYDVDHIVPQSFLKDDSIDNKVLTRSDKARGKSDNVPSEEVVKKMKNYWRQLLNAKLITQRKFDNLTKAERGGLSELDKAGFIKRQLVETRQITKHVAQILDSRMNTKYDENDKLIREVKVITLKSKLVSDFRKDFQFYKVREINNYHHAHDAYLNAVVGTALIKKYPKLESEFVYGDYKVYDVRKMIAKSEQEIGKATAKYFFYSNIMNFFKTEITLANGEIRKRPLIETNGETGEIVWDKGRDFATVRKVLSMPQVNIVKKTEVQTGGFSKESILPKRNSDKLIARKKDWDPKKYGGFDSPTVAYSVLVVAKVEKGKSKKLKSVKELLGITIMERSSFEKNPIDFLEAKGYKEVKKDLIIKLPKYSLFELENGRKRMLASAGELQKGNELALPSKYVNFLYLASHYEKLKGSPEDNEQKQLFVEQHKHYLDEIIEQISEFSKRVILADANLDKVLSAYNKHRDKPIREQAENIIHLFTLTNLGAPAAFKYFDTTIDRKRYTSTKEVLDATLIHQSITGLYETRIDLSQLGGDGGGGGGSSGGSGGGLEHLPPPPEVSQFPLNPERLQALTDLVSRALEAKHIEPYQGPGNNPIFPVKKPNGKWRFIHDLRATNSLTRDLASPSPGPPDLTSLPQDLPHLRTIDLTDAFFQIPLPAVFQPYFAFTLPQPNNHGPGTRYSWRVLPQGFKNSPTLFEQQLSHILAPVRKAFPNSLIIQYMDDILLASPALRELTALTDKVTNALTKEGLPMSLEKTQATPGSIHFLGQVISPDCITYETLPSIHVKSIWSLAELQSMLGELQWVSKGTPVLRSSLHQLYLALRGHRDPRDTIELTSTQVQALKTIQKALALNCRSRLVSQLPILALIILRPTGTTAVLFQTKQKWPLVWLHTPHPATSLRPWGQLLANAIITLDKYSLQHYGQICKSFHHNISNQALTYYLHTSDQSSVAILLQHSHRFHNLGAQPSGPWRSLLQVPQIFQNIDVLRPPFIISPVVIDHAPCLFSDGATSKAAFILWDKQVIHQQVLPLPSTCSAQAGELFGLLAGLQKSKPWPALNIFLDSKFLIGHLRRMALGAFLGPSTQCDLHARLFPLLQGKTVYVHHVRSHTLLQDPISRLNEATDALMLAPLLPLAGKRTADGSEFEKRTADGSEFESPKKKAKVE

SEQ ID NO: 1519 - protein, 2007 aa, synthetic construct
MPAAKRVKLDGGDKKYSIGLDIGTNSVGWAVITDEYKVPSKKFKVLGNTDRHSIKKNLIGALLFDSGETAEATRLKRTARRRYTRRKNRICYLQEIFSNEMAKVDDSFFHRLEESFLVEEDKKHERHPIFGNIVDEVAYHEKYPTIYHLRKKLVDSTDKADLRLIYLALAHMIKFRGHFLIEGDLNPDNSDVDKLFIQLVQTYNQLFEENPINASGVDAKAILSARLSKSRRLENLIAQLPGEKKNGLFGNLIALSLGLTPNFKSNFDLAEDAKLQLSKDTYDDDLDNLLAQIGDQYADLFLAAKNLSDAILLSDILRVNTEITKAPLSASMIKRYDEHHQDLTLLKALVRQQLPEKYKEIFFDQSKNGYAGYIDGGASQEEFYKFIKPILEKMDGTEELLVKLNREDLLRKQRTFDNGSIPHQIHLGELHAILRRQEDFYPFLKDNREKIEKILTFRIPYYVGPLARGNSRFAWMTRKSEETITPWNFEEVVDKGASAQSFIERMTNFDKNLPNEKVLPKHSLLYEYFTVYNELTKVKYVTEGMRKPAFLSGEQKKAIVDLLFKTNRKVTVKQLKEDYFKKIECFDSVEISGVEDRFNASLGTYHDLLKIIKDKDFLDNEENEDILEDIVLTLTLFEDREMIEERLKTYAHLFDDKVMKQLKRRRYTGWGRLSRKLINGIRDKQSGKTILDFLKSDGFANRNFMQLIHDDSLTFKEDIQKAQVSGQGDSLHEHIANLAGSPAIKKGILQTVKVVDELVKVMGRHKPENIVIEMARENQTTQKGQKNSRERMKRIEEGIKELGSQILKEHPVENTQLQNEKLYLYYLQNGRDMYVDQELDINRLSDYDVDHIVPQSFLKDDSIDNKVLTRSDKARGKSDNVPSEEVVKKMKNYWRQLLNAKLITQRKFDNLTKAERGGLSELDKAGFIKRQLVETRQITKHVAQILDSRMNTKYDENDKLIREVKVITLKSKLVSDFRKDFQFYKVREINNYHHAHDAYLNAVVGTALIKKYPKLESEFVYGDYKVYDVRKMIAKSEQEIGKATAKYFFYSNIMNFFKTEITLANGEIRKRPLIETNGETGEIVWDKGRDFATVRKVLSMPQVNIVKKTEVQTGGFSKESILPKRNSDKLIARKKDWDPKKYGGFDSPTVAYSVLVVAKVEKGKSKKLKSVKELLGITIMERSSFEKNPIDFLEAKGYKEVKKDLIIKLPKYSLFELENGRKRMLASAGELQKGNELALPSKYVNFLYLASHYEKLKGSPEDNEQKQLFVEQHKHYLDEIIEQISEFSKRVILADANLDKVLSAYNKHRDKPIREQAENIIHLFTLTNLGAPAAFKYFDTTIDRKRYTSTKEVLDATLIHQSITGLYETRIDLSQLGGDGGGGGGSSPAPGGGLEHLPPPPEVSQFPLNPERLQALTDLVSRALEAKHIEPYQGPGNNPIFPVKKPNGKWRFIHDLRATNSLTRDLASPSPGPPDLTSLPQDLPHLRTIDLTDAFFQIPLPAVFQPYFAFTLPQPNNHGPGTRYSWRVLPQGFKNSPTLFQQQLSHILAPVRKAFPNSLIIQYMDDILLASPALRELTALTDKVTNALTKEGLPMSLEKTQATPGSIHFLGQVISPDCITYETLPSIHVKSIWSLAELQSMLGELQWVSKGTPVLRSSLHQLYLALRGHRDPRDTIELTSTQVQALKTIQKALALNCRSRLVSQLPILALIILRPTGTTAVLFQTKQKWPLVWLHTPHPATSLRPWGQLLANAIITLDKYSLQHYGQICKSFHHNISNQALTYYLHTSDQSSVAILLQHSHRFHNLGAQPSGPWRSLLQVPQIFQNIDVLRPPFIISPVVIDHAPCLFSDGATSKAAFILWDKQVIHQQVLPLPSTCSAQAGELFGLLAGLQKSKPWPALNIFLDSKFLIGHLRRMAWGAFLGPSTQCDLHARLFPLLQGKTVYVHHVRSHTLLQDPISRLNEATDALMLAPLLPLAGKRTADGSEFEKRTADGSEFESPKKKAKVE

SEQ ID NO: 1520 - protein, 2009 aa, synthetic construct
MPAAKRVKLDGGDKKYSIGLDIGTNSVGWAVITDEYKVPSKKFKVLGNTDRHSIKKNLIGALLFDSGETAEATRLKRTARRRYTRRKNRICYLQEIFSNEMAKVDDSFFHRLEESFLVEEDKKHERHPIFGNIVDEVAYHEKYPTIYHLRKKLVDSTDKADLRLIYLALAHMIKFRGHFLIEGDLNPDNSDVDKLFIQLVQTYNQLFEENPINASGVDAKAILSARLSKSRRLENLIAQLPGEKKNGLFGNLIALSLGLTPNFKSNFDLAEDAKLQLSKDTYDDDLDNLLAQIGDQYADLFLAAKNLSDAILLSDILRVNTEITKAPLSASMIKRYDEHHQDLTLLKALVRQQLPEKYKEIFFDQSKNGYAGYIDGGASQEEFYKFIKPILEKMDGTEELLVKLNREDLLRKQRTFDNGSIPHQIHLGELHAILRRQEDFYPFLKDNREKIEKILTFRIPYYVGPLARGNSRFAWMTRKSEETITPWNFEEVVDKGASAQSFIERMTNFDKNLPNEKVLPKHSLLYEYFTVYNELTKVKYVTEGMRKPAFLSGEQKKAIVDLLFKTNRKVTVKQLKEDYFKKIECFDSVEISGVEDRFNASLGTYHDLLKIIKDKDFLDNEENEDILEDIVLTLTLFEDREMIEERLKTYAHLFDDKVMKQLKRRRYTGWGRLSRKLINGIRDKQSGKTILDFLKSDGFANRNFMQLIHDDSLTFKEDIQKAQVSGQGDSLHEHIANLAGSPAIKKGILQTVKVVDELVKVMGRHKPENIVIEMARENQTTQKGQKNSRERMKRIEEGIKELGSQILKEHPVENTQLQNEKLYLYYLQNGRDMYVDQELDINRLSDYDVDHIVPQSFLKDDSIDNKVLTRSDKARGKSDNVPSEEVVKKMKNYWRQLLNAKLITQRKFDNLTKAERGGLSELDKAGFIKRQLVETRQITKHVAQILDSRMNTKYDENDKLIREVKVITLKSKLVSDFRKDFQFYKVREINNYHHAHDAYLNAVVGTALIKKYPKLESEFVYGDYKVYDVRKMIAKSEQEIGKATAKYFFYSNIMNFFKTEITLANGEIRKRPLIETNGETGEIVWDKGRDFATVRKVLSMPQVNIVKKTEVQTGGFSKESILPKRNSDKLIARKKDWDPKKYGGFDSPTVAYSVLVVAKVEKGKSKKLKSVKELLGITIMERSSFEKNPIDFLEAKGYKEVKKDLIIKLPKYSLFELENGRKRMLASAGELQKGNELALPSKYVNFLYLASHYEKLKGSPEDNEQKQLFVEQHKHYLDEIIEQISEFSKRVILADANLDKVLSAYNKHRDKPIREQAENIIHLFTLTNLGAPAAFKYFDTTIDRKRYTSTKEVLDATLIHQSITGLYETRIDLSQLGGDGGPAPEAAAKGGGGGGLEHLPPPPEVSQFPLNPERLQALTDLVSRALEAKHIEPYQGPGNNPIFPVKKPNGKWRFIHDLRATNSLTRDLASPSPGPPDLTSLPQDLPHLRTIDLTDAFFQIPLPAVFQPYFAFTLPQPNNHGPGTRYSWRVLPQGFKNSPTLFQQQLSHILAPVRKAFPNSLIIQYMDDILLASPALRELTALTDKVTNALTKEGLPMSLEKTQATPGSIHFLGQVISPDCITYETLPSIHVKSIWSLAELQSMLGELQWVSKGTPVLRSSLHQLYLALRGHRDPRDTIELTSTQVQALKTIQKALALNCRSRLVSQLPILALIILRPTGTTAVLFQTKQKWPLVWLHTPHPATSLRPWGQLLANAIITLDKYSLQHYGQICKSFHHNISNQALTYYLHTSDQSSVAILLQHSHRFHNLGAQPSGPWRSLLQVPQIFQNIDVLRPPFIISPVVIDHAPCLFSDGATSKAAFILWDKQVIHQQVLPLPSTCSAQAGELFGLLAGLQKSKPWPALNIFLDSKFLIGHLRRMAWGAFLGPSTQCDLHARLFPLLQGKTVYVHHVRSHTLLQDPISRLNEATDALMLAPLLPLAGKRTADGSEFEKRTADGSEFESPKKKAKVE

SEQ ID NO: 1521 - protein, 2023 aa, synthetic construct
MPAAKRVKLDGGDKKYSIGLDIGTNSVGWAVITDEYKVPSKKFKVLGNTDRHSIKKNLIGALLFDSGETAEATRLKRTARRRYTRRKNRICYLQEIFSNEMAKVDDSFFHRLEESFLVEEDKKHERHPIFGNIVDEVAYHEKYPTIYHLRKKLVDSTDKADLRLIYLALAHMIKFRGHFLIEGDLNPDNSDVDKLFIQLVQTYNQLFEENPINASGVDAKAILSARLSKSRRLENLIAQLPGEKKNGLFGNLIALSLGLTPNFKSNFDLAEDAKLQLSKDTYDDDLDNLLAQIGDQYADLFLAAKNLSDAILLSDILRVNTEITKAPLSASMIKRYDEHHQDLTLLKALVRQQLPEKYKEIFFDQSKNGYAGYIDGGASQEEFYKFIKPILEKMDGTEELLVKLNREDLLRKQRTFDNGSIPHQIHLGELHAILRRQEDFYPFLKDNREKIEKILTFRIPYYVGPLARGNSRFAWMTRKSEETITPWNFEEVVDKGASAQSFIERMTNFDKNLPNEKVLPKHSLLYEYFTVYNELTKVKYVTEGMRKPAFLSGEQKKAIVDLLFKTNRKVTVKQLKEDYFKKIECFDSVEISGVEDRFNASLGTYHDLLKIIKDKDFLDNEENEDILEDIVLTLTLFEDREMIEERLKTYAHLFDDKVMKQLKRRRYTGWGRLSRKLINGIRDKQSGKTILDFLKSDGFANRNFMQLIHDDSLTFKEDIQKAQVSGQGDSLHEHIANLAGSPAIKKGILQTVKVVDELVKVMGRHKPENIVIEMARENQTTQKGQKNSRERMKRIEEGIKELGSQILKEHPVENTQLQNEKLYLYYLQNGRDMYVDQELDINRLSDYDVDHIVPQSFLKDDSIDNKVLTRSDKARGKSDNVPSEEVVKKMKNYWRQLLNAKLITQRKFDNLTKAERGGLSELDKAGFIKRQLVETRQITKHVAQILDSRMNTKYDENDKLIREVKVITLKSKLVSDFRKDFQFYKVREINNYHHAHDAYLNAVVGTALIKKYPKLESEFVYGDYKVYDVRKMIAKSEQEIGKATAKYFFYSNIMNFFKTEITLANGEIRKRPLIETNGETGEIVWDKGRDFATVRKVLSMPQVNIVKKTEVQTGGFSKESILPKRNSDKLIARKKDWDPKKYGGFDSPTVAYSVLVVAKVEKGKSKKLKSVKELLGITIMERSSFEKNPIDFLEAKGYKEVKKDLIIKLPKYSLFELENGRKRMLASAGELQKGNELALPSKYVNFLYLASHYEKLKGSPEDNEQKQLFVEQHKHYLDEIIEQISEFSKRVILADANLDKVLSAYNKHRDKPIREQAENIIHLFTLTNLGAPAAFKYFDTTIDRKRYTSTKEVLDATLIHQSITGLYETRIDLSQLGGDGGGGGGSGGGGSGGGGSGGGGSGGGGSGGGLEHLPPPPEVSQFPLNPERLQALTDLVSRALEAKHIEPYQGPGNNPIFPVKKPNGKWRFIHDLRATNSLTRDLASPSPGPPDLTSLPQDLPHLRTIDLTDAFFQIPLPAVFQPYFAFTLPQPNNHGPGTRYSWRVLPQGFKNSPTLFQQQLSHILAPVRKAFPNSLIIQYMDDILLASPALRELTALTDKVTNALTKEGLPMSLEKTQATPGSIHFLGQVISPDCITYETLPSIHVKSIWSLAELQSMLGELQWVSKGTPVLRSSLHQLYLALRGHRDPRDTIELTSTQVQALKTIQKALALNCRSRLVSQLPILALIILRPTGTTAVLFQTKQKWPLVWLHTPHPATSLRPWGQLLANAIITLDKYSLQHYGQICKSFHHNISNQALTYYLHTSDQSSVAILLQHSHRFHNLGAQPSGPWRSLLQVPQIFQNIDVLRPPFIISPVVIDHAPCLFSDGATSKAAFILWDKQVIHQQVLPLPSTCSAQAGELFGLLAGLQKSKPWPALNIFLDSKFLIGHLRRMAWGAFLGPSTQCDLHARLFPLLQGKTVYVHHVRSHTLLQDPISRLNEATDALMLAPLLPLAGKRTADGSEFEKRTADGSEFESPKKKAKVE

SEQ ID NO: 1522 - protein, 2006 aa, synthetic construct
MPAAKRVKLDGGDKKYSIGLDIGTNSVGWAVITDEYKVPSKKFKVLGNTDRHSIKKNLIGALLFDSGETAEATRLKRTARRRYTRRKNRICYLQEIFSNEMAKVDDSFFHRLEESFLVEEDKKHERHPIFGNIVDEVAYHEKYPTIYHLRKKLVDSTDKADLRLIYLALAHMIKFRGHFLIEGDLNPDNSDVDKLFIQLVQTYNQLFEENPINASGVDAKAILSARLSKSRRLENLIAQLPGEKKNGLFGNLIALSLGLTPNFKSNFDLAEDAKLQLSKDTYDDDLDNLLAQIGDQYADLFLAAKNLSDAILLSDILRVNTEITKAPLSASMIKRYDEHHQDLTLLKALVRQQLPEKYKEIFFDQSKNGYAGYIDGGASQEEFYKFIKPILEKMDGTEELLVKLNREDLLRKQRTFDNGSIPHQIHLGELHAILRRQEDFYPFLKDNREKIEKILTFRIPYYVGPLARGNSRFAWMTRKSEETITPWNFEEVVDKGASAQSFIERMTNFDKNLPNEKVLPKHSLLYEYFTVYNELTKVKYVTEGMRKPAFLSGEQKKAIVDLLFKTNRKVTVKQLKEDYFKKIECFDSVEISGVEDRFNASLGTYHDLLKIIKDKDFLDNEENEDILEDIVLTLTLFEDREMIEERLKTYAHLFDDKVMKQLKRRRYTGWGRLSRKLINGIRDKQSGKTILDFLKSDGFANRNFMQLIHDDSLTFKEDIQKAQVSGQGDSLHEHIANLAGSPAIKKGILQTVKVVDELVKVMGRHKPENIVIEMARENQTTQKGQKNSRERMKRIEEGIKELGSQILKEHPVENTQLQNEKLYLYYLQNGRDMYVDQELDINRLSDYDVDHIVPQSFLKDDSIDNKVLTRSDKARGKSDNVPSEEVVKKMKNYWRQLLNAKLITQRKFDNLTKAERGGLSELDKAGFIKRQLVETRQITKHVAQILDSRMNTKYDENDKLIREVKVITLKSKLVSDFRKDFQFYKVREINNYHHAHDAYLNAVVGTALIKKYPKLESEFVYGDYKVYDVRKMIAKSEQEIGKATAKYFFYSNIMNFFKTEITLANGEIRKRPLIETNGETGEIVWDKGRDFATVRKVLSMPQVNIVKKTEVQTGGFSKESILPKRNSDKLIARKKDWDPKKYGGFDSPTVAYSVLVVAKVEKGKSKKLKSVKELLGITIMERSSFEKNPIDFLEAKGYKEVKKDLIIKLPKYSLFELENGRKRMLASAGELQKGNELALPSKYVNFLYLASHYEKLKGSPEDNEQKQLFVEQHKHYLDEIIEQISEFSKRVILADANLDKVLSAYNKHRDKPIREQAENIIHLFTLTNLGAPAAFKYFDTTIDRKRYTSTKEVLDATLIHQSITGLYETRIDLSQLGGDGGEAAAKGGSGGGLEHLPPPPEVSQFPLNPERLQALTDLVSRALEAKHIEPYQGPGNNPIFPVKKPNGKWRFIHDLRATNSLTRDLASPSPGPPDLTSLPQDLPHLRTIDLTDAFFQIPLPAVFQPYFAFTLPQPNNHGPGTRYSWRVLPQGFKNSPTLFQQQLSHILAPVRKAFPNSLIIQYMDDILLASPALRELTALTDKVTNALTKEGLPMSLEKTQATPGSIHFLGQVISPDCITYETLPSIHVKSIWSLAELQSMLGELQWVSKGTPVLRSSLHQLYLALRGHRDPRDTIELTSTQVQALKTIQKALALNCRSRLVSQLPILALIILRPTGTTAVLFQTKQKWPLVWLHTPHPATSLRPWGQLLANAIITLDKYSLQHYGQICKSFHHNISNQALTYYLHTSDQSSVAILLQHSHRFHNLGAQPSGPWRSLLQVPQIFQNIDVLRPPFIISPVVIDHAPCLFSDGATSKAAFILWDKQVIHQQVLPLPSTCSAQAGELFGLLAGLQKSKPWPALNIFLDSKFLIGHLRRMAWGAFLGPSTQCDLHARLFPLLQGKTVYVHHVRSHTLLQDPISRLNEATDALMLAPLLPLAGKRTADGSEFEKRTADGSEFESPKKKAKVE

SEQ ID NO: 1523 - protein, 2007 aa, synthetic construct
MPAAKRVKLDGGDKKYSIGLDIGTNSVGWAVITDEYKVPSKKFKVLGNTDRHSIKKNLIGALLFDSGETAEATRLKRTARRRYTRRKNRICYLQEIFSNEMAKVDDSFFHRLEESFLVEEDKKHERHPIFGNIVDEVAYHEKYPTIYHLRKKLVDSTDKADLRLIYLALAHMIKFRGHFLIEGDLNPDNSDVDKLFIQLVQTYNQLFEENPINASGVDAKAILSARLSKSRRLENLIAQLPGEKKNGLFGNLIALSLGLTPNFKSNFDLAEDAKLQLSKDTYDDDLDNLLAQIGDQYADLFLAAKNLSDAILLSDILRVNTEITKAPLSASMIKRYDEHHQDLTLLKALVRQQLPEKYKEIFFDQSKNGYAGYIDGGASQEEFYKFIKPILEKMDGTEELLVKLNREDLLRKQRTFDNGSIPHQIHLGELHAILRRQEDFYPFLKDNREKIEKILTFRIPYYVGPLARGNSRFAWMTRKSEETITPWNFEEVVDKGASAQSFIERMTNFDKNLPNEKVLPKHSLLYEYFTVYNELTKVKYVTEGMRKPAFLSGEQKKAIVDLLFKTNRKVTVKQLKEDYFKKIECFDSVEISGVEDRFNASLGTYHDLLKIIKDKDFLDNEENEDILEDIVLTLTLFEDREMIEERLKTYAHLFDDKVMKQLKRRRYTGWGRLSRKLINGIRDKQSGKTILDFLKSDGFANRNFMQLIHDDSLTFKEDIQKAQVSGQGDSLHEHIANLAGSPAIKKGILQTVKVVDELVKVMGRHKPENIVIEMARENQTTQKGQKNSRERMKRIEEGIKELGSQILKEHPVENTQLQNEKLYLYYLQNGRDMYVDQELDINRLSDYDVDHIVPQSFLKDDSIDNKVLTRSDKARGKSDNVPSEEVVKKMKNYWRQLLNAKLITQRKFDNLTKAERGGLSELDKAGFIKRQLVETRQITKHVAQILDSRMNTKYDENDKLIREVKVITLKSKLVSDFRKDFQFYKVREINNYHHAHDAYLNAVVGTALIKKYPKLESEFVYGDYKVYDVRKMIAKSEQEIGKATAKYFFYSNIMNFFKTEITLANGEIRKRPLIETNGETGEIVWDKGRDFATVRKVLSMPQVNIVKKTEVQTGGFSKESILPKRNSDKLIARKKDWDPKKYGGFDSPTVAYSVLVVAKVEKGKSKKLKSVKELLGITIMERSSFEKNPIDFLEAKGYKEVKKDLIIKLPKYSLFELENGRKRMLASAGELQKGNELALPSKYVNFLYLASHYEKLKGSPEDNEQKQLFVEQHKHYLDEIIEQISEFSKRVILADANLDKVLSAYNKHRDKPIREQAENIIHLFTLTNLGAPAAFKYFDTTIDRKRYTSTKEVLDATLIHQSITGLYETRIDLSQLGGDGGGGGGSSGGSGGGLEHLPPPPEVSQFPLNPERLQALTDLVSRALEAKHIEPYQGPGNNPIFPVKKPNGKWRFIHDLRATNSLTRDLASPSPGPPDLTSLPQDLPHLRTIDLTDAFFQIPLPAVFQPYFAFTLPQPNNHGPGTRYSWRVLPQGFKNSPTLFQQQLSHILAPVRKAFPNSLIIQYMDDILLASPALRELTALTDKVTNALTKEGLPMSLEKTQATPGSIHFLGQVISPDCITYETLPSIHVKSIWSLAELQSMLGELQWVSKGTPVLRSSLHQLYLALRGHRDPRDTIELTSTQVQALKTIQKALALNCRSRLVSQLPILALIILRPTGTTAVLFQTKQKWPLVWLHTPHPATSLRPWGQLLANAIITLDKYSLQHYGQICKSFHHNISNQALTYYLHTSDQSSVAILLQHSHRFHNLGAQPSGPWRSLLQVPQIFQNIDVLRPPFIISPVVIDHAPCLFSDGATSKAAFILWDKQVIHQQVLPLPSTCSAQAGELFGLLAGLQKSKPWPALNIFLDSKFLIGHLRRMAWGAFLGPSTQCDLHARLFPLLQGKTVYVHHVRSHTLLQDPISRLNEATDALMLAPLLPLAGKRTADGSEFEKRTADGSEFESPKKKAKVE

SEQ ID NO: 1524 - protein, 2009 aa, synthetic construct
MPAAKRVKLDGGDKKYSIGLDIGTNSVGWAVITDEYKVPSKKFKVLGNTDRHSIKKNLIGALLFDSGETAEATRLKRTARRRYTRRKNRICYLQEIFSNEMAKVDDSFFHRLEESFLVEEDKKHERHPIFGNIVDEVAYHEKYPTIYHLRKKLVDSTDKADLRLIYLALAHMIKFRGHFLIEGDLNPDNSDVDKLFIQLVQTYNQLFEENPINASGVDAKAILSARLSKSRRLENLIAQLPGEKKNGLFGNLIALSLGLTPNFKSNFDLAEDAKLQLSKDTYDDDLDNLLAQIGDQYADLFLAAKNLSDAILLSDILRVNTEITKAPLSASMIKRYDEHHQDLTLLKALVRQQLPEKYKEIFFDQSKNGYAGYIDGGASQEEFYKFIKPILEKMDGTEELLVKLNREDLLRKQRTFDNGSIPHQIHLGELHAILRRQEDFYPFLKDNREKIEKILTFRIPYYVGPLARGNSRFAWMTRKSEETITPWNFEEVVDKGASAQSFIERMTNFDKNLPNEKVLPKHSLLYEYFTVYNELTKVKYVTEGMRKPAFLSGEQKKAIVDLLFKTNRKVTVKQLKEDYFKKIECFDSVEISGVEDRFNASLGTYHDLLKIIKDKDFLDNEENEDILEDIVLTLTLFEDREMIEERLKTYAHLFDDKVMKQLKRRRYTGWGRLSRKLINGIRDKQSGKTILDFLKSDGFANRNFMQLIHDDSLTFKEDIQKAQVSGQGDSLHEHIANLAGSPAIKKGILQTVKVVDELVKVMGRHKPENIVIEMARENQTTQKGQKNSRERMKRIEEGIKELGSQILKEHPVENTQLQNEKLYLYYLQNGRDMYVDQELDINRLSDYDVDHIVPQSFLKDDSIDNKVLTRSDKARGKSDNVPSEEVVKKMKNYWRQLLNAKLITQRKFDNLTKAERGGLSELDKAGFIKRQLVETRQITKHVAQILDSRMNTKYDENDKLIREVKVITLKSKLVSDFRKDFQFYKVREINNYHHAHDAYLNAVVGTALIKKYPKLESEFVYGDYKVYDVRKMIAKSEQEIGKATAKYFFYSNIMNFFKTEITLANGEIRKRPLIETNGETGEIVWDKGRDFATVRKVLSMPQVNIVKKTEVQTGGFSKESILPKRNSDKLIARKKDWDPKKYGGFDSPTVAYSVLVVAKVEKGKSKKLKSVKELLGITIMERSSFEKNPIDFLEAKGYKEVKKDLIIKLPKYSLFELENGRKRMLASAGELQKGNELALPSKYVNFLYLASHYEKLKGSPEDNEQKQLFVEQHKHYLDEIIEQISEFSKRVILADANLDKVLSAYNKHRDKPIREQAENIIHLFTLTNLGAPAAFKYFDTTIDRKRYTSTKEVLDATLIHQSITGLYETRIDLSQLGGDGGEAAAKGGSGGGGGGLEHLPPPPEVSQFPLNPERLQALTDLVSRALEAKHIEPYQGPGNNPIFPVKKPNGKWRFIHDLRATNSLTRDLASPSPGPPDLTSLPQDLPHLRTIDLTDAFFQIPLPAVFQPYFAFTLPQPNNHGPGTRYSWRVLPQGFKNSPTLFQQQLSHILAPVRKAFPNSLIIQYMDDILLASPALRELTALTDKVTNALTKEGLPMSLEKTQATPGSIHFLGQVISPDCITYETLPSIHVKSIWSLAELQSMLGELQWVSKGTPVLRSSLHQLYLALRGHRDPRDTIELTSTQVQALKTIQKALALNCRSRLVSQLPILALIILRPTGTTAVLFQTKQKWPLVWLHTPHPATSLRPWGQLLANAIITLDKYSLQHYGQICKSFHHNISNQALTYYLHTSDQSSVAILLQHSHRFHNLGAQPSGPWRSLLQVPQIFQNIDVLRPPFIISPVVIDHAPCLFSDGATSKAAFILWDKQVIHQQVLPLPSTCSAQAGELFGLLAGLQKSKPWPALNIFLDSKFLIGHLRRMAWGAFLGPSTQCDLHARLFPLLQGKTVYVHHVRSHTLLQDPISRLNEATDALMLAPLLPLAGKRTADGSEFEKRTADGSEFESPKKKAKVE

SEQ ID NO: 1525 - protein, 2007 aa, synthetic construct
MPAAKRVKLDGGDKKYSIGLDIGTNSVGWAVITDEYKVPSKKFKVLGNTDRHSIKKNLIGALLFDSGETAEATRLKRTARRRYTRRKNRICYLQEIFSNEMAKVDDSFFHRLEESFLVEEDKKHERHPIFGNIVDEVAYHEKYPTIYHLRKKLVDSTDKADLRLIYLALAHMIKFRGHFLIEGDLNPDNSDVDKLFIQLVQTYNQLFEENPINASGVDAKAILSARLSKSRRLENLIAQLPGEKKNGLFGNLIALSLGLTPNFKSNFDLAEDAKLQLSKDTYDDDLDNLLAQIGDQYADLFLAAKNLSDAILLSDILRVNTEITKAPLSASMIKRYDEHHQDLTLLKALVRQQLPEKYKEIFFDQSKNGYAGYIDGGASQEEFYKFIKPILEKMDGTEELLVKLNREDLLRKQRTFDNGSIPHQIHLGELHAILRRQEDFYPFLKDNREKIEKILTFRIPYYVGPLARGNSRFAWMTRKSEETITPWNFEEVVDKGASAQSFIERMTNFDKNLPNEKVLPKHSLLYEYFTVYNELTKVKYVTEGMRKPAFLSGEQKKAIVDLLFKTNRKVTVKQLKEDYFKKIECFDSVEISGVEDRFNASLGTYHDLLKIIKDKDFLDNEENEDILEDIVLTLTLFEDREMIEERLKTYAHLFDDKVMKQLKRRRYTGWGRLSRKLINGIRDKQSGKTILDFLKSDGFANRNFMQLIHDDSLTFKEDIQKAQVSGQGDSLHEHIANLAGSPAIKKGILQTVKVVDELVKVMGRHKPENIVIEMARENQTTQKGQKNSRERMKRIEEGIKELGSQILKEHPVENTQLQNEKLYLYYLQNGRDMYVDQELDINRLSDYDVDHIVPQSFLKDDSIDNKVLTRSDKARGKSDNVPSEEVVKKMKNYWRQLLNAKLITQRKFDNLTKAERGGLSELDKAGFIKRQLVETRQITKHVAQILDSRMNTKYDENDKLIREVKVITLKSKLVSDFRKDFQFYKVREINNYHHAHDAYLNAVVGTALIKKYPKLESEFVYGDYKVYDVRKMIAKSEQEIGKATAKYFFYSNIMNFFKTEITLANGEIRKRPLIETNGETGEIVWDKGRDFATVRKVLSMPQVNIVKKTEVQTGGFSKESILPKRNSDKLIARKKDWDPKKYGGFDSPTVAYSVLVVAKVEKGKSKKLKSVKELLGITIMERSSFEKNPIDFLEAKGYKEVKKDLIIKLPKYSLFELENGRKRMLASAGELQKGNELALPSKYVNFLYLASHYEKLKGSPEDNEQKQLFVEQHKHYLDEIIEQISEFSKRVILADANLDKVLSAYNKHRDKPIREQAENIIHLFTLTNLGAPAAFKYFDTTIDRKRYTSTKEVLDATLIHQSITGLYETRIDLSQLGGDGGGSSPAPGGGGGGLEHLPPPPEVSQFPLNPERLQALTDLVSRALEAKHIEPYQGPGNNPIFPVKKPNGKWRFIHDLRATNSLTRDLASPSPGPPDLTSLPQDLPHLRTIDLTDAFFQIPLPAVFQPYFAFTLPQPNNHGPGTRYSWRVLPQGFKNSPTLFQQQLSHILAPVRKAFPNSLIIQYMDDILLASPALRELTALTDKVTNALTKEGLPMSLEKTQATPGSIHFLGQVISPDCITYETLPSIHVKSIWSLAELQSMLGELQWVSKGTPVLRSSLHQLYLALRGHRDPRDTIELTSTQVQALKTIQKALALNCRSRLVSQLPILALIILRPTGTTAVLFQTKQKWPLVWLHTPHPATSLRPWGQLLANAIITLDKYSLQHYGQICKSFHHNISNQALTYYLHTSDQSSVAILLQHSHRFHNLGAQPSGPWRSLLQVPQIFQNIDVLRPPFIISPVVIDHAPCLFSDGATSKAAFILWDKQVIHQQVLPLPSTCSAQAGELFGLLAGLQKSKPWPALNIFLDSKFLIGHLRRMAWGAFLGPSTQCDLHARLFPLLQGKTVYVHHVRSHTLLQDPISRLNEATDALMLAPLLPLAGKRTADGSEFEKRTADGSEFESPKKKAKVE

SEQ ID NO: 1526 - protein, 2009 aa, synthetic construct
MPAAKRVKLDGGDKKYSIGLDIGTNSVGWAVITDEYKVPSKKFKVLGNTDRHSIKKNLIGALLFDSGETAEATRLKRTARRRYTRRKNRICYLQEIFSNEMAKVDDSFFHRLEESFLVEEDKKHERHPIFGNIVDEVAYHEKYPTIYHLRKKLVDSTDKADLRLIYLALAHMIKFRGHFLIEGDLNPDNSDVDKLFIQLVQTYNQLFEENPINASGVDAKAILSARLSKSRRLENLIAQLPGEKKNGLFGNLIALSLGLTPNFKSNFDLAEDAKLQLSKDTYDDDLDNLLAQIGDQYADLFLAAKNLSDAILLSDILRVNTEITKAPLSASMIKRYDEHHQDLTLLKALVRQQLPEKYKEIFFDQSKNGYAGYIDGGASQEEFYKFIKPILEKMDGTEELLVKLNREDLLRKQRTFDNGSIPHQIHLGELHAILRRQEDFYPFLKDNREKIEKILTFRIPYYVGPLARGNSRFAWMTRKSEETITPWNFEEVVDKGASAQSFIERMTNFDKNLPNEKVLPKHSLLYEYFTVYNELTKVKYVTEGMRKPAFLSGEQKKAIVDLLFKTNRKVTVKQLKEDYFKKIECFDSVEISGVEDRFNASLGTYHDLLKIIKDKDFLDNEENEDILEDIVLTLTLFEDREMIEERLKTYAHLFDDKVMKQLKRRRYTGWGRLSRKLINGIRDKQSGKTILDFLKSDGFANRNFMQLIHDDSLTFKEDIQKAQVSGQGDSLHEHIANLAGSPAIKKGILQTVKVVDELVKVMGRHKPENIVIEMARENQTTQKGQKNSRERMKRIEEGIKELGSQILKEHPVENTQLQNEKLYLYYLQNGRDMYVDQELDINRLSDYDVDHIVPQSFLKDDSIDNKVLTRSDKARGKSDNVPSEEVVKKMKNYWRQLLNAKLITQRKFDNLTKAERGGLSELDKAGFIKRQLVETRQITKHVAQILDSRMNTKYDENDKLIREVKVITLKSKLVSDFRKDFQFYKVREINNYHHAHDAYLNAVVGTALIKKYPKLESEFVYGDYKVYDVRKMIAKSEQEIGKATAKYFFYSNIMNFFKTEITLANGEIRKRPLIETNGETGEIVWDKGRDFATVRKVLSMPQVNIVKKTEVQTGGFSKESILPKRNSDKLIARKKDWDPKKYGGFDSPTVAYSVLVVAKVEKGKSKKLKSVKELLGITIMERSSFEKNPIDFLEAKGYKEVKKDLIIKLPKYSLFELENGRKRMLASAGELQKGNELALPSKYVNFLYLASHYEKLKGSPEDNEQKQLFVEQHKHYLDEIIEQISEFSKRVILADANLDKVLSAYNKHRDKPIREQAENIIHLFTLTNLGAPAAFKYFDTTIDRKRYTSTKEVLDATLIHQSITGLYETRIDLSQLGGDGGEAAAKGGGGSSGGGLEHLPPPPEVSQFPLNPERLQALTDLVSRALEAKHIEPYQGPGNNPIFPVKKPNGKWRFIHDLRATNSLTRDLASPSPGPPDLTSLPQDLPHLRTIDLTDAFFQIPLPAVFQPYFAFTLPQPNNHGPGTRYSWRVLPQGFKNSPTLFQQQLSHILAPVRKAFPNSLIIQYMDDILLASPALRELTALTDKVTNALTKEGLPMSLEKTQATPGSIHFLGQVISPDCITYETLPSIHVKSIWSLAELQSMLGELQWVSKGTPVLRSSLHQLYLALRGHRDPRDTIELTSTQVQALKTIQKALALNCRSRLVSQLPILALIILRPTGTTAVLFQTKQKWPLVWLHTPHPATSLRPWGQLLANAIITLDKYSLQHYGQICKSFHHNISNQALTYYLHTSDQSSVAILLQHSHRFHNLGAQPSGPWRSLLQVPQIFQNIDVLRPPFIISPVVIDHAPCLFSDGATSKAAFILWDKQVIHQQVLPLPSTCSAQAGELFGLLAGLQKSKPWPALNIFLDSKFLIGHLRRMAWGAFLGPSTQCDLHARLFPLLQGKTVYVHHVRSHTLLQDPISRLNEATDALMLAPLLPLAGKRTADGSEFEKRTADGSEFESPKKKAKVE

SEQ ID NO: 1527 - protein, 2007 aa, synthetic construct
MPAAKRVKLDGGDKKYSIGLDIGTNSVGWAVITDEYKVPSKKFKVLGNTDRHSIKKNLIGALLFDSGETAEATRLKRTARRRYTRRKNRICYLQEIFSNEMAKVDDSFFHRLEESFLVEEDKKHERHPIFGNIVDEVAYHEKYPTIYHLRKKLVDSTDKADLRLIYLALAHMIKFRGHFLIEGDLNPDNSDVDKLFIQLVQTYNQLFEENPINASGVDAKAILSARLSKSRRLENLIAQLPGEKKNGLFGNLIALSLGLTPNFKSNFDLAEDAKLQLSKDTYDDDLDNLLAQIGDQYADLFLAAKNLSDAILLSDILRVNTEITKAPLSASMIKRYDEHHQDLTLLKALVRQQLPEKYKEIFFDQSKNGYAGYIDGGASQEEFYKFIKPILEKMDGTEELLVKLNREDLLRKQRTFDNGSIPHQIHLGELHAILRRQEDFYPFLKDNREKIEKILTFRIPYYVGPLARGNSRFAWMTRKSEETITPWNFEEVVDKGASAQSFIERMTNFDKNLPNEKVLPKHSLLYEYFTVYNELTKVKYVTEGMRKPAFLSGEQKKAIVDLLFKTNRKVTVKQLKEDYFKKIECFDSVEISGVEDRFNASLGTYHDLLKIIKDKDFLDNEENEDILEDIVLTLTLFEDREMIEERLKTYAHLFDDKVMKQLKRRRYTGWGRLSRKLINGIRDKQSGKTILDFLKSDGFANRNFMQLIHDDSLTFKEDIQKAQVSGQGDSLHEHIANLAGSPAIKKGILQTVKVVDELVKVMGRHKPENIVIEMARENQTTQKGQKNSRERMKRIEEGIKELGSQILKEHPVENTQLQNEKLYLYYLQNGRDMYVDQELDINRLSDYDVDHIVPQSFLKDDSIDNKVLTRSDKARGKSDNVPSEEVVKKMKNYWRQLLNAKLITQRKFDNLTKAERGGLSELDKAGFIKRQLVETRQITKHVAQILDSRMNTKYDENDKLIREVKVITLKSKLVSDFRKDFQFYKVREINNYHHAHDAYLNAVVGTALIKKYPKLESEFVYGDYKVYDVRKMIAKSEQEIGKATAKYFFYSNIMNFFKTEITLANGEIRKRPLIETNGETGEIVWDKGRDFATVRKVLSMPQVNIVKKTEVQTGGFSKESILPKRNSDKLIARKKDWDPKKYGGFDSPTVAYSVLVVAKVEKGKSKKLKSVKELLGITIMERSSFEKNPIDFLEAKGYKEVKKDLIIKLPKYSLFELENGRKRMLASAGELQKGNELALPSKYVNFLYLASHYEKLKGSPEDNEQKQLFVEQHKHYLDEIIEQISEFSKRVILADANLDKVLSAYNKHRDKPIREQAENIIHLFTLTNLGAPAAFKYFDTTIDRKRYTSTKEVLDATLIHQSITGLYETRIDLSQLGGDGGPAPGGGGSSGGGLEHLPPPPEVSQFPLNPERLQALTDLVSRALEAKHIEPYQGPGNNPIFPVKKPNGKWRFIHDLRATNSLTRDLASPSPGPPDLTSPPQDLPHLRTIDLTDAFFQIPLPAVFQPYFAFTLPQPNNHGPGTRYSWRVLPQGFKNSPTLFQQQLSHILAPVRKAFPNSLIIQYMDDILLASPALRELTALTDKVTNALTKEGLPMSLEKTQATPGSIHFLGQVISPDCITYETLPSIHVKSIWSLAELQSMLGELQWVSKGTPVLRSSLHQLYLALRGHRDPRDTIELTSTQVQALKTIQKALALNCRSRLVSQLPILALIILRPTGTTAVLFQTKQKWPLVWLHTPHPATSLRPWGQLLANAIITLDKYSLQHYGQICKSFHHNISNQALTYYLHTSDQSSVAILLQHSHRFHNLGAQPSGPWRSLLQVPQIFQNIDVLRPPFIISPVVIDHAPCLFSDGATSKAAFILWDKQVIHQQVLPLPSTCSAQAGELFGLLAGLQKSKPWPALNIFLDSKFLIGHLRRMAWGAFLGPSTQCDLHARLFPLLQGKTVYVHHVRSHTLLQDPISRLNEATDALMLAPLLPLAGKRTADGSEFEKRTADGSEFESPKKKAKVE

SEQ ID NO: 1528 - protein, 2028 aa, synthetic construct
MPAAKRVKLDGGDKKYSIGLDIGTNSVGWAVITDEYKVPSKKFKVLGNTDRHSIKKNLIGALLFDSGETAEATRLKRTARRRYTRRKNRICYLQEIFSNEMAKVDDSFFHRLEESFLVEEDKKHERHPIFGNIVDEVAYHEKYPTIYHLRKKLVDSTDKADLRLIYLALAHMIKFRGHFLIEGDLNPDNSDVDKLFIQLVQTYNQLFEENPINASGVDAKAILSARLSKSRRLENLIAQLPGEKKNGLFGNLIALSLGLTPNFKSNFDLAEDAKLQLSKDTYDDDLDNLLAQIGDQYADLFLAAKNLSDAILLSDILRVNTEITKAPLSASMIKRYDEHHQDLTLLKALVRQQLPEKYKEIFFDQSKNGYAGYIDGGASQEEFYKFIKPILEKMDGTEELLVKLNREDLLRKQRTFDNGSIPHQIHLGELHAILRRQEDFYPFLKDNREKIEKILTFRIPYYVGPLARGNSRFAWMTRKSEETITPWNFEEVVDKGASAQSFIERMTNFDKNLPNEKVLPKHSLLYEYFTVYNELTKVKYVTEGMRKPAFLSGEQKKAIVDLLFKTNRKVTVKQLKEDYFKKIECFDSVEISGVEDRFNASLGTYHDLLKIIKDKDFLDNEENEDILEDIVLTLTLFEDREMIEERLKTYAHLFDDKVMKQLKRRRYTGWGRLSRKLINGIRDKQSGKTILDFLKSDGFANRNFMQLIHDDSLTFKEDIQKAQVSGQGDSLHEHIANLAGSPAIKKGILQTVKVVDELVKVMGRHKPENIVIEMARENQTTQKGQKNSRERMKRIEEGIKELGSQILKEHPVENTQLQNEKLYLYYLQNGRDMYVDQELDINRLSDYDVDHIVPQSFLKDDSIDNKVLTRSDKARGKSDNVPSEEVVKKMKNYWRQLLNAKLITQRKFDNLTKAERGGLSELDKAGFIKRQLVETRQITKHVAQILDSRMNTKYDENDKLIREVKVITLKSKLVSDFRKDFQFYKVREINNYHHAHDAYLNAVVGTALIKKYPKLESEFVYGDYKVYDVRKMIAKSEQEIGKATAKYFFYSNIMNFFKTEITLANGEIRKRPLIETNGETGEIVWDKGRDFATVRKVLSMPQVNIVKKTEVQTGGFSKESILPKRNSDKLIARKKDWDPKKYGGFDSPTVAYSVLVVAKVEKGKSKKLKSVKELLGITIMERSSFEKNPIDFLEAKGYKEVKKDLIIKLPKYSLFELENGRKRMLASAGELQKGNELALPSKYVNFLYLASHYEKLKGSPEDNEQKQLFVEQHKHYLDEIIEQISEFSKRVILADANLDKVLSAYNKHRDKPIREQAENIIHLFTLTNLGAPAAFKYFDTTIDRKRYTSTKEVLDATLIHQSITGLYETRIDLSQLGGDGGGGGGSGGGGSGGGGSGGGGSGGGGSGGGGSGGGLEHLPPPPEVSQFPLNPERLQALTDLVSRALEAKHIEPYQGPGNNPIFPVKKPNGKWRFIHDLRATNSLTRDLASPSPGPPDLTSPPQDLPHLRTIDLTDAFFQIPLPAVFQPYFAFTLPQPNNHGPGTRYSWRVLPQGFKNSPTLFQQQLSHILAPVRKAFPNSLIIQYMDDILLASPALRELTALTDKVTNALTKEGLPMSLEKTQATPGSIHFLGQVISPDCITYETLPSIHVKSIWSLAELQSMLGELQWVSKGTPVLRSSLHQLYLALRGHRDPRDTIELTSTQVQALKTIQKALALNCRSRLVSQLPILALIILRPTGTTAVLFQTKQKWPLVWLHTPHPATSLRPWGQLLANAIITLDKYSLQHYGQICKSFHHNISNQALTYYLHTSDQSSVAILLQHSHRFHNLGAQPSGPWRSLLQVPQIFQNIDVLRPPFIISPVVIDHAPCLFSDGATSKAAFILWDKQVIHQQVLPLPSTCSAQAGELFGLLAGLQKSKPWPALNIFLDSKFLIGHLRRMAWGAFLGPSTQCDLHARLFPLLQGKTVYVHHVRSHTLLQDPISRLNEATDALMLAPLLPLAGKRTADGSEFEKRTADGSEFESPKKKAKVE

SEQ ID NO: 1529 - protein, 2007 aa, synthetic construct
MPAAKRVKLDGGDKKYSIGLDIGTNSVGWAVITDEYKVPSKKFKVLGNTDRHSIKKNLIGALLFDSGETAEATRLKRTARRRYTRRKNRICYLQEIFSNEMAKVDDSFFHRLEESFLVEEDKKHERHPIFGNIVDEVAYHEKYPTIYHLRKKLVDSTDKADLRLIYLALAHMIKFRGHFLIEGDLNPDNSDVDKLFIQLVQTYNQLFEENPINASGVDAKAILSARLSKSRRLENLIAQLPGEKKNGLFGNLIALSLGLTPNFKSNFDLAEDAKLQLSKDTYDDDLDNLLAQIGDQYADLFLAAKNLSDAILLSDILRVNTEITKAPLSASMIKRYDEHHQDLTLLKALVRQQLPEKYKEIFFDQSKNGYAGYIDGGASQEEFYKFIKPILEKMDGTEELLVKLNREDLLRKQRTFDNGSIPHQIHLGELHAILRRQEDFYPFLKDNREKIEKILTFRIPYYVGPLARGNSRFAWMTRKSEETITPWNFEEVVDKGASAQSFIERMTNFDKNLPNEKVLPKHSLLYEYFTVYNELTKVKYVTEGMRKPAFLSGEQKKAIVDLLFKTNRKVTVKQLKEDYFKKIECFDSVEISGVEDRFNASLGTYHDLLKIIKDKDFLDNEENEDILEDIVLTLTLFEDREMIEERLKTYAHLFDDKVMKQLKRRRYTGWGRLSRKLINGIRDKQSGKTILDFLKSDGFANRNFMQLIHDDSLTFKEDIQKAQVSGQGDSLHEHIANLAGSPAIKKGILQTVKVVDELVKVMGRHKPENIVIEMARENQTTQKGQKNSRERMKRIEEGIKELGSQILKEHPVENTQLQNEKLYLYYLQNGRDMYVDQELDINRLSDYDVDHIVPQSFLKDDSIDNKVLTRSDKARGKSDNVPSEEVVKKMKNYWRQLLNAKLITQRKFDNLTKAERGGLSELDKAGFIKRQLVETRQITKHVAQILDSRMNTKYDENDKLIREVKVITLKSKLVSDFRKDFQFYKVREINNYHHAHDAYLNAVVGTALIKKYPKLESEFVYGDYKVYDVRKMIAKSEQEIGKATAKYFFYSNIMNFFKTEITLANGEIRKRPLIETNGETGEIVWDKGRDFATVRKVLSMPQVNIVKKTEVQTGGFSKESILPKRNSDKLIARKKDWDPKKYGGFDSPTVAYSVLVVAKVEKGKSKKLKSVKELLGITIMERSSFEKNPIDFLEAKGYKEVKKDLIIKLPKYSLFELENGRKRMLASAGELQKGNELALPSKYVNFLYLASHYEKLKGSPEDNEQKQLFVEQHKHYLDEIIEQISEFSKRVILADANLDKVLSAYNKHRDKPIREQAENIIHLFTLTNLGAPAAFKYFDTTIDRKRYTSTKEVLDATLIHQSITGLYETRIDLSQLGGDGGGGGGGSPAPGGGLEHLPPPPEVSQFPLNPERLQALTDLVSRALEAKHIEPYQGPGNNPIFPVKKPNGKWRFIHDLRATNSLTRDLASPSPGPPDLTSPPQDLPHLRTIDLTDAFFQIPLPAVFQPYFAFTLPQPNNHGPGTRYSWRVLPQGFKNSPTLFQQQLSHILAPVRKAFPNSLIIQYMDDILLASPALRELTALTDKVTNALTKEGLPMSLEKTQATPGSIHFLGQVISPDCITYETLPSIHVKSIWSLAELQSMLGELQWVSKGTPVLRSSLHQLYLALRGHRDPRDTIELTSTQVQALKTIQKALALNCRSRLVSQLPILALIILRPTGTTAVLFQTKQKWPLVWLHTPHPATSLRPWGQLLANAIITLDKYSLQHYGQICKSFHHNISNQALTYYLHTSDQSSVAILLQHSHRFHNLGAQPSGPWRSLLQVPQIFQNIDVLRPPFIISPVVIDHAPCLFSDGATSKAAFILWDKQVIHQQVLPLPSTCSAQAGELFGLLAGLQKSKPWPALNIFLDSKFLIGHLRRMAWGAFLGPSTQCDLHARLFPLLQGKTVYVHHVRSHTLLQDPISRLNEATDALMLAPLLPLAGKRTADGSEFEKRTADGSEFESPKKKAKVE

SEQ ID NO: 1530 - protein, 2004 aa, synthetic construct
MPAAKRVKLDGGDKKYSIGLDIGTNSVGWAVITDEYKVPSKKFKVLGNTDRHSIKKNLIGALLFDSGETAEATRLKRTARRRYTRRKNRICYLQEIFSNEMAKVDDSFFHRLEESFLVEEDKKHERHPIFGNIVDEVAYHEKYPTIYHLRKKLVDSTDKADLRLIYLALAHMIKFRGHFLIEGDLNPDNSDVDKLFIQLVQTYNQLFEENPINASGVDAKAILSARLSKSRRLENLIAQLPGEKKNGLFGNLIALSLGLTPNFKSNFDLAEDAKLQLSKDTYDDDLDNLLAQIGDQYADLFLAAKNLSDAILLSDILRVNTEITKAPLSASMIKRYDEHHQDLTLLKALVRQQLPEKYKEIFFDQSKNGYAGYIDGGASQEEFYKFIKPILEKMDGTEELLVKLNREDLLRKQRTFDNGSIPHQIHLGELHAILRRQEDFYPFLKDNREKIEKILTFRIPYYVGPLARGNSRFAWMTRKSEETITPWNFEEVVDKGASAQSFIERMTNFDKNLPNEKVLPKHSLLYEYFTVYNELTKVKYVTEGMRKPAFLSGEQKKAIVDLLFKTNRKVTVKQLKEDYFKKIECFDSVEISGVEDRFNASLGTYHDLLKIIKDKDFLDNEENEDILEDIVLTLTLFEDREMIEERLKTYAHLFDDKVMKQLKRRRYTGWGRLSRKLINGIRDKQSGKTILDFLKSDGFANRNFMQLIHDDSLTFKEDIQKAQVSGQGDSLHEHIANLAGSPAIKKGILQTVKVVDELVKVMGRHKPENIVIEMARENQTTQKGQKNSRERMKRIEEGIKELGSQILKEHPVENTQLQNEKLYLYYLQNGRDMYVDQELDINRLSDYDVDHIVPQSFLKDDSIDNKVLTRSDKARGKSDNVPSEEVVKKMKNYWRQLLNAKLITQRKFDNLTKAERGGLSELDKAGFIKRQLVETRQITKHVAQILDSRMNTKYDENDKLIREVKVITLKSKLVSDFRKDFQFYKVREINNYHHAHDAYLNAVVGTALIKKYPKLESEFVYGDYKVYDVRKMIAKSEQEIGKATAKYFFYSNIMNFFKTEITLANGEIRKRPLIETNGETGEIVWDKGRDFATVRKVLSMPQVNIVKKTEVQTGGFSKESILPKRNSDKLIARKKDWDPKKYGGFDSPTVAYSVLVVAKVEKGKSKKLKSVKELLGITIMERSSFEKNPIDFLEAKGYKEVKKDLIIKLPKYSLFELENGRKRMLASAGELQKGNELALPSKYVNFLYLASHYEKLKGSPEDNEQKQLFVEQHKHYLDEIIEQISEFSKRVILADANLDKVLSAYNKHRDKPIREQAENIIHLFTLTNLGAPAAFKYFDTTIDRKRYTSTKEVLDATLIHQSITGLYETRIDLSQLGGDGGGGGPAPGGHLPPPPQVDQFPLNLPERLQALNDLVSKALEAGHIEPYSGPGNNPVFPVKKPNGKWRFIHDLRATNAITTTLTSPSPGPPDLTSLPTALPHLQTIDLTDAFFQIPLPKQYQPYFAFTIPQPCNYGPGTRYAWTVLPQGFKNSPTLFQQQLAAVLNPMRKMFPTSTIVQYMDDILLASPTNEELQQLSQLTLQALTTHGLPISQEKTQQTPGQIRFLGQVISPNHITYESTPTIPIKSQWTLTELQVILGEIQWVSKGTPILRKHLQSLYSALHPYRDPRACITLTPQQLHALHAIQQALQHNCRGRLNPALPLLGLISLSTSGTTSVIFQPKQNWPLAWLHTPHPPTSLCPWGHLLACTILTLDKYTLQHYGQLCQSFHHNMSKQALCDFLRNSPHPSVGILIHHMGRFHNLGSQPSGPWKTLLHLPTLLQEPRLLRPIFTLSPVVLDTAPCLFSDGSPQKAAYVLWDQTILQQDITPLPSHETHSAQKGELLALICGLRAAKPWPSLNIFLDSKYLIKYLHSLAIGAFLGTSAHQTLQAALPPLLQGKTIYLHHVRSHTNLPDPISTFNEYTDSLILAPLVPLAGKRTADGSEFEKRTADGSEFESPKKKAKVE

SEQ ID NO: 1531 - protein, 2009 aa, synthetic construct
MPAAKRVKLDGGDKKYSIGLDIGTNSVGWAVITDEYKVPSKKFKVLGNTDRHSIKKNLIGALLFDSGETAEATRLKRTARRRYTRRKNRICYLQEIFSNEMAKVDDSFFHRLEESFLVEEDKKHERHPIFGNIVDEVAYHEKYPTIYHLRKKLVDSTDKADLRLIYLALAHMIKFRGHFLIEGDLNPDNSDVDKLFIQLVQTYNQLFEENPINASGVDAKAILSARLSKSRRLENLIAQLPGEKKNGLFGNLIALSLGLTPNFKSNFDLAEDAKLQLSKDTYDDDLDNLLAQIGDQYADLFLAAKNLSDAILLSDILRVNTEITKAPLSASMIKRYDEHHQDLTLLKALVRQQLPEKYKEIFFDQSKNGYAGYIDGGASQEEFYKFIKPILEKMDGTEELLVKLNREDLLRKQRTFDNGSIPHQIHLGELHAILRRQEDFYPFLKDNREKIEKILTFRIPYYVGPLARGNSRFAWMTRKSEETITPWNFEEVVDKGASAQSFIERMTNFDKNLPNEKVLPKHSLLYEYFTVYNELTKVKYVTEGMRKPAFLSGEQKKAIVDLLFKTNRKVTVKQLKEDYFKKIECFDSVEISGVEDRFNASLGTYHDLLKIIKDKDFLDNEENEDILEDIVLTLTLFEDREMIEERLKTYAHLFDDKVMKQLKRRRYTGWGRLSRKLINGIRDKQSGKTILDFLKSDGFANRNFMQLIHDDSLTFKEDIQKAQVSGQGDSLHEHIANLAGSPAIKKGILQTVKVVDELVKVMGRHKPENIVIEMARENQTTQKGQKNSRERMKRIEEGIKELGSQILKEHPVENTQLQNEKLYLYYLQNGRDMYVDQELDINRLSDYDVDHIVPQSFLKDDSIDNKVLTRSDKARGKSDNVPSEEVVKKMKNYWRQLLNAKLITQRKFDNLTKAERGGLSELDKAGFIKRQLVETRQITKHVAQILDSRMNTKYDENDKLIREVKVITLKSKLVSDFRKDFQFYKVREINNYHHAHDAYLNAVVGTALIKKYPKLESEFVYGDYKVYDVRKMIAKSEQEIGKATAKYFFYSNIMNFFKTEITLANGEIRKRPLIETNGETGEIVWDKGRDFATVRKVLSMPQVNIVKKTEVQTGGFSKESILPKRNSDKLIARKKDWDPKKYGGFDSPTVAYSVLVVAKVEKGKSKKLKSVKELLGITIMERSSFEKNPIDFLEAKGYKEVKKDLIIKLPKYSLFELENGRKRMLASAGELQKGNELALPSKYVNFLYLASHYEKLKGSPEDNEQKQLFVEQHKHYLDEIIEQISEFSKRVILADANLDKVLSAYNKHRDKPIREQAENIIHLFTLTNLGAPAAFKYFDTTIDRKRYTSTKEVLDATLIHQSITGLYETRIDLSQLGGDGGEAAAKGSSGGGGGHLPPPPQVDQFPLNLPERLQALNDLVSKALEAGHIEPYSGPGNNPVFPVKKPNGKWRFIHDLRATNAITTTLTSPSPGPPDLTSLPTALPHLQTIDLTDAFFQIPLPKQYQPYFAFTIPQPCNYGPGTRYAWTVLPQGFKNSPTLFQQQLAAVLNPMRKMFPTSTIVQYMDDILLASPTNEELQQLSQLTLQALTTHGLPISQEKTQQTPGQIRFLGQVISPNHITYESTPTIPIKSQWTLTELQVILGEIQWVSKGTPILRKHLQSLYSALHPYRDPRACITLTPQQLHALHAIQQALQHNCRGRLNPALPLLGLISLSTSGTTSVIFQPKQNWPLAWLHTPHPPTSLCPWGHLLACTILTLDKYTLQHYGQLCQSFHHNMSKQALCDFLRNSPHPSVGILIHHMGRFHNLGSQPSGPWKTLLHLPTLLQEPRLLRPIFTLSPVVLDTAPCLFSDGSPQKAAYVLWDQTILQQDITPLPSHETHSAQKGELLALICGLRAAKPWPSLNIFLDSKYLIKYLHSLAIGAFLGTSAHQTLQAALPPLLQGKTIYLHHVRSHTNLPDPISTFNEYTDSLILAPLVPLAGKRTADGSEFEKRTADGSEFESPKKKAKVE

SEQ ID NO: 1532 - protein, 2009 aa, synthetic construct
MPAAKRVKLDGGDKKYSIGLDIGTNSVGWAVITDEYKVPSKKFKVLGNTDRHSIKKNLIGALLFDSGETAEATRLKRTARRRYTRRKNRICYLQEIFSNEMAKVDDSFFHRLEESFLVEEDKKHERHPIFGNIVDEVAYHEKYPTIYHLRKKLVDSTDKADLRLIYLALAHMIKFRGHFLIEGDLNPDNSDVDKLFIQLVQTYNQLFEENPINASGVDAKAILSARLSKSRRLENLIAQLPGEKKNGLFGNLIALSLGLTPNFKSNFDLAEDAKLQLSKDTYDDDLDNLLAQIGDQYADLFLAAKNLSDAILLSDILRVNTEITKAPLSASMIKRYDEHHQDLTLLKALVRQQLPEKYKEIFFDQSKNGYAGYIDGGASQEEFYKFIKPILEKMDGTEELLVKLNREDLLRKQRTFDNGSIPHQIHLGELHAILRRQEDFYPFLKDNREKIEKILTFRIPYYVGPLARGNSRFAWMTRKSEETITPWNFEEVVDKGASAQSFIERMTNFDKNLPNEKVLPKHSLLYEYFTVYNELTKVKYVTEGMRKPAFLSGEQKKAIVDLLFKTNRKVTVKQLKEDYFKKIECFDSVEISGVEDRFNASLGTYHDLLKIIKDKDFLDNEENEDILEDIVLTLTLFEDREMIEERLKTYAHLFDDKVMKQLKRRRYTGWGRLSRKLINGIRDKQSGKTILDFLKSDGFANRNFMQLIHDDSLTFKEDIQKAQVSGQGDSLHEHIANLAGSPAIKKGILQTVKVVDELVKVMGRHKPENIVIEMARENQTTQKGQKNSRERMKRIEEGIKELGSQILKEHPVENTQLQNEKLYLYYLQNGRDMYVDQELDINRLSDYDVDHIVPQSFLKDDSIDNKVLTRSDKARGKSDNVPSEEVVKKMKNYWRQLLNAKLITQRKFDNLTKAERGGLSELDKAGFIKRQLVETRQITKHVAQILDSRMNTKYDENDKLIREVKVITLKSKLVSDFRKDFQFYKVREINNYHHAHDAYLNAVVGTALIKKYPKLESEFVYGDYKVYDVRKMIAKSEQEIGKATAKYFFYSNIMNFFKTEITLANGEIRKRPLIETNGETGEIVWDKGRDFATVRKVLSMPQVNIVKKTEVQTGGFSKESILPKRNSDKLIARKKDWDPKKYGGFDSPTVAYSVLVVAKVEKGKSKKLKSVKELLGITIMERSSFEKNPIDFLEAKGYKEVKKDLIIKLPKYSLFELENGRKRMLASAGELQKGNELALPSKYVNFLYLASHYEKLKGSPEDNEQKQLFVEQHKHYLDEIIEQISEFSKRVILADANLDKVLSAYNKHRDKPIREQAENIIHLFTLTNLGAPAAFKYFDTTIDRKRYTSTKEVLDATLIHQSITGLYETRIDLSQLGGDGGEAAAKGGSPAPGGHLPPPPQVDQFPLNLPERLQALNDLVSKALEAGHIEPYSGPGNNPVFPVKKPNGKWRFIHDLRATNAITTTLTSPSPGPPDLTSLPTALPHLQTIDLTDAFFQIPLPKQYQPYFAFTIPQPCNYGPGTRYAWTVLPQGFKNSPTLFQQQLAAVLNPMRKMFPTSTIVQYMDDILLASPTNEELQQLSQLTLQALTTHGLPISQEKTQQTPGQIRFLGQVISPNHITYESTPTIPIKSQWTLTELQVILGEIQWVSKGTPILRKHLQSLYSALHPYRDPRACITLTPQQLHALHAIQQALQHNCRGRLNPALPLLGLISLSTSGTTSVIFQPKQNWPLAWLHTPHPPTSLCPWGHLLACTILTLDKYTLQHYGQLCQSFHHNMSKQALCDFLRNSPHPSVGILIHHMGRFHNLGSQPSGPWKTLLHLPTLLQEPRLLRPIFTLSPVVLDTAPCLFSDGSPQKAAYVLWDQTILQQDITPLPSHETHSAQKGELLALICGLRAAKPWPSLNIFLDSKYLIKYLHSLAIGAFLGTSAHQTLQAALPPLLQGKTIYLHHVRSHTNLPDPISTFNEYTDSLILAPLVPLAGKRTADGSEFEKRTADGSEFESPKKKAKVE

SEQ ID NO: 1533 - protein, 2031 aa, synthetic construct
MPAAKRVKLDGGDKKYSIGLDIGTNSVGWAVITDEYKVPSKKFKVLGNTDRHSIKKNLIGALLFDSGETAEATRLKRTARRRYTRRKNRICYLQEIFSNEMAKVDDSFFHRLEESFLVEEDKKHERHPIFGNIVDEVAYHEKYPTIYHLRKKLVDSTDKADLRLIYLALAHMIKFRGHFLIEGDLNPDNSDVDKLFIQLVQTYNQLFEENPINASGVDAKAILSARLSKSRRLENLIAQLPGEKKNGLFGNLIALSLGLTPNFKSNFDLAEDAKLQLSKDTYDDDLDNLLAQIGDQYADLFLAAKNLSDAILLSDILRVNTEITKAPLSASMIKRYDEHHQDLTLLKALVRQQLPEKYKEIFFDQSKNGYAGYIDGGASQEEFYKFIKPILEKMDGTEELLVKLNREDLLRKQRTFDNGSIPHQIHLGELHAILRRQEDFYPFLKDNREKIEKILTFRIPYYVGPLARGNSRFAWMTRKSEETITPWNFEEVVDKGASAQSFIERMTNFDKNLPNEKVLPKHSLLYEYFTVYNELTKVKYVTEGMRKPAFLSGEQKKAIVDLLFKTNRKVTVKQLKEDYFKKIECFDSVEISGVEDRFNASLGTYHDLLKIIKDKDFLDNEENEDILEDIVLTLTLFEDREMIEERLKTYAHLFDDKVMKQLKRRRYTGWGRLSRKLINGIRDKQSGKTILDFLKSDGFANRNFMQLIHDDSLTFKEDIQKAQVSGQGDSLHEHIANLAGSPAIKKGILQTVKVVDELVKVMGRHKPENIVIEMARENQTTQKGQKNSRERMKRIEEGIKELGSQILKEHPVENTQLQNEKLYLYYLQNGRDMYVDQELDINRLSDYDVDHIVPQSFLKDDSIDNKVLTRSDKARGKSDNVPSEEVVKKMKNYWRQLLNAKLITQRKFDNLTKAERGGLSELDKAGFIKRQLVETRQITKHVAQILDSRMNTKYDENDKLIREVKVITLKSKLVSDFRKDFQFYKVREINNYHHAHDAYLNAVVGTALIKKYPKLESEFVYGDYKVYDVRKMIAKSEQEIGKATAKYFFYSNIMNFFKTEITLANGEIRKRPLIETNGETGEIVWDKGRDFATVRKVLSMPQVNIVKKTEVQTGGFSKESILPKRNSDKLIARKKDWDPKKYGGFDSPTVAYSVLVVAKVEKGKSKKLKSVKELLGITIMERSSFEKNPIDFLEAKGYKEVKKDLIIKLPKYSLFELENGRKRMLASAGELQKGNELALPSKYVNFLYLASHYEKLKGSPEDNEQKQLFVEQHKHYLDEIIEQISEFSKRVILADANLDKVLSAYNKHRDKPIREQAENIIHLFTLTNLGAPAAFKYFDTTIDRKRYTSTKEVLDATLIHQSITGLYETRIDLSQLGGDGGSGGSSGGSSGSETPGTSESATPESSGGSSGGSSGGHLPPPPQVDQFPLNLPERLQALNDLVSKALEAGHIEPYSGPGNNPVFPVKKPNGKWRFIHDLRATNAITTTLTSPSPGPPDLTSLPTALPHLQTIDLTDAFFQIPLPKQYQPYFAFTIPQPCNYGPGTRYAWTVLPQGFKNSPTLFQQQLAAVLNPMRKMFPTSTIVQYMDDILLASPTNEELQQLSQLTLQALTTHGLPISQEKTQQTPGQIRFLGQVISPNHITYESTPTIPIKSQWTLTELQVILGEIQWVSKGTPILRKHLQSLYSALHPYRDPRACITLTPQQLHALHAIQQALQHNCRGRLNPALPLLGLISLSTSGTTSVIFQPKQNWPLAWLHTPHPPTSLCPWGHLLACTILTLDKYTLQHYGQLCQSFHHNMSKQALCDFLRNSPHPSVGILIHHMGRFHNLGSQPSGPWKTLLHLPTLLQEPRLLRPIFTLSPVVLDTAPCLFSDGSPQKAAYVLWDQTILQQDITPLPSHETHSAQKGELLALICGLRAAKPWPSLNIFLDSKYLIKYLHSLAIGAFLGTSAHQTLQAALPPLLQGKTIYLHHVRSHTNLPDPISTFNEYTDSLILAPLVPLAGKRTADGSEFEKRTADGSEFESPKKKAKVE

SEQ ID NO: 1534 - protein, 2006 aa, synthetic construct
MPAAKRVKLDGGDKKYSIGLDIGTNSVGWAVITDEYKVPSKKFKVLGNTDRHSIKKNLIGALLFDSGETAEATRLKRTARRRYTRRKNRICYLQEIFSNEMAKVDDSFFHRLEESFLVEEDKKHERHPIFGNIVDEVAYHEKYPTIYHLRKKLVDSTDKADLRLIYLALAHMIKFRGHFLIEGDLNPDNSDVDKLFIQLVQTYNQLFEENPINASGVDAKAILSARLSKSRRLENLIAQLPGEKKNGLFGNLIALSLGLTPNFKSNFDLAEDAKLQLSKDTYDDDLDNLLAQIGDQYADLFLAAKNLSDAILLSDILRVNTEITKAPLSASMIKRYDEHHQDLTLLKALVRQQLPEKYKEIFFDQSKNGYAGYIDGGASQEEFYKFIKPILEKMDGTEELLVKLNREDLLRKQRTFDNGSIPHQIHLGELHAILRRQEDFYPFLKDNREKIEKILTFRIPYYVGPLARGNSRFAWMTRKSEETITPWNFEEVVDKGASAQSFIERMTNFDKNLPNEKVLPKHSLLYEYFTVYNELTKVKYVTEGMRKPAFLSGEQKKAIVDLLFKTNRKVTVKQLKEDYFKKIECFDSVEISGVEDRFNASLGTYHDLLKIIKDKDFLDNEENEDILEDIVLTLTLFEDREMIEERLKTYAHLFDDKVMKQLKRRRYTGWGRLSRKLINGIRDKQSGKTILDFLKSDGFANRNFMQLIHDDSLTFKEDIQKAQVSGQGDSLHEHIANLAGSPAIKKGILQTVKVVDELVKVMGRHKPENIVIEMARENQTTQKGQKNSRERMKRIEEGIKELGSQILKEHPVENTQLQNEKLYLYYLQNGRDMYVDQELDINRLSDYDVDHIVPQSFLKDDSIDNKVLTRSDKARGKSDNVPSEEVVKKMKNYWRQLLNAKLITQRKFDNLTKAERGGLSELDKAGFIKRQLVETRQITKHVAQILDSRMNTKYDENDKLIREVKVITLKSKLVSDFRKDFQFYKVREINNYHHAHDAYLNAVVGTALIKKYPKLESEFVYGDYKVYDVRKMIAKSEQEIGKATAKYFFYSNIMNFFKTEITLANGEIRKRPLIETNGETGEIVWDKGRDFATVRKVLSMPQVNIVKKTEVQTGGFSKESILPKRNSDKLIARKKDWDPKKYGGFDSPTVAYSVLVVAKVEKGKSKKLKSVKELLGITIMERSSFEKNPIDFLEAKGYKEVKKDLIIKLPKYSLFELENGRKRMLASAGELQKGNELALPSKYVNFLYLASHYEKLKGSPEDNEQKQLFVEQHKHYLDEIIEQISEFSKRVILADANLDKVLSAYNKHRDKPIREQAENIIHLFTLTNLGAPAAFKYFDTTIDRKRYTSTKEVLDATLIHQSITGLYETRIDLSQLGGDGGPAPEAAAKGGHLPPPPQVDQFPLNLPERLQALNDLVSKALEAGHIEPYSGPGNNPVFPVKKPNGKWRFIHDLRATNAITTTLTSPSPGPPDLTSLPTALPHLQTIDLTDAFFQIPLPKQYQPYFAFTIPQPCNYGPGTRYAWTVLPQGFKNSPTLFQQQLAAVLNPMRKMFPTSTIVQYMDDILLASPTNEELQQLSQLTLQALTTHGLPISQEKTQQTPGQIRFLGQVISPNHITYESTPTIPIKSQWTLTELQVILGEIQWVSKGTPILRKHLQSLYSALHPYRDPRACITLTPQQLHALHAIQQALQHNCRGRLNPALPLLGLISLSTSGTTSVIFQPKQNWPLAWLHTPHPPTSLCPWGHLLACTILTLDKYTLQHYGQLCQSFHHNMSKQALCDFLRNSPHPSVGILIHHMGRFHNLGSQPSGPWKTLLHLPTLLQEPRLLRPIFTLSPVVLDTAPCLFSDGSPQKAAYVLWDQTILQQDITPLPSHETHSAQKGELLALICGLRAAKPWPSLNIFLDSKYLIKYLHSLAIGAFLGTSAHQTLQAALPPLLQGKTIYLHHVRSHTNLPDPISTFNEYTDSLILAPLVPLAGKRTADGSEFEKRTADGSEFESPKKKAKVE

SEQ ID NO: 1535 - protein, 2007 aa, synthetic construct
MPAAKRVKLDGGDKKYSIGLDIGTNSVGWAVITDEYKVPSKKFKVLGNTDRHSIKKNLIGALLFDSGETAEATRLKRTARRRYTRRKNRICYLQEIFSNEMAKVDDSFFHRLEESFLVEEDKKHERHPIFGNIVDEVAYHEKYPTIYHLRKKLVDSTDKADLRLIYLALAHMIKFRGHFLIEGDLNPDNSDVDKLFIQLVQTYNQLFEENPINASGVDAKAILSARLSKSRRLENLIAQLPGEKKNGLFGNLIALSLGLTPNFKSNFDLAEDAKLQLSKDTYDDDLDNLLAQIGDQYADLFLAAKNLSDAILLSDILRVNTEITKAPLSASMIKRYDEHHQDLTLLKALVRQQLPEKYKEIFFDQSKNGYAGYIDGGASQEEFYKFIKPILEKMDGTEELLVKLNREDLLRKQRTFDNGSIPHQIHLGELHAILRRQEDFYPFLKDNREKIEKILTFRIPYYVGPLARGNSRFAWMTRKSEETITPWNFEEVVDKGASAQSFIERMTNFDKNLPNEKVLPKHSLLYEYFTVYNELTKVKYVTEGMRKPAFLSGEQKKAIVDLLFKTNRKVTVKQLKEDYFKKIECFDSVEISGVEDRFNASLGTYHDLLKIIKDKDFLDNEENEDILEDIVLTLTLFEDREMIEERLKTYAHLFDDKVMKQLKRRRYTGWGRLSRKLINGIRDKQSGKTILDFLKSDGFANRNFMQLIHDDSLTFKEDIQKAQVSGQGDSLHEHIANLAGSPAIKKGILQTVKVVDELVKVMGRHKPENIVIEMARENQTTQKGQKNSRERMKRIEEGIKELGSQILKEHPVENTQLQNEKLYLYYLQNGRDMYVDQELDINRLSDYDVDHIVPQSFLKDDSIDNKVLTRSDKARGKSDNVPSEEVVKKMKNYWRQLLNAKLITQRKFDNLTKAERGGLSELDKAGFIKRQLVETRQITKHVAQILDSRMNTKYDENDKLIREVKVITLKSKLVSDFRKDFQFYKVREINNYHHAHDAYLNAVVGTALIKKYPKLESEFVYGDYKVYDVRKMIAKSEQEIGKATAKYFFYSNIMNFFKTEITLANGEIRKRPLIETNGETGEIVWDKGRDFATVRKVLSMPQVNIVKKTEVQTGGFSKESILPKRNSDKLIARKKDWDPKKYGGFDSPTVAYSVLVVAKVEKGKSKKLKSVKELLGITIMERSSFEKNPIDFLEAKGYKEVKKDLIIKLPKYSLFELENGRKRMLASAGELQKGNELALPSKYVNFLYLASHYEKLKGSPEDNEQKQLFVEQHKHYLDEIIEQISEFSKRVILADANLDKVLSAYNKHRDKPIREQAENIIHLFTLTNLGAPAAFKYFDTTIDRKRYTSTKEVLDATLIHQSITGLYETRIDLSQLGGDGGGSSGGSGGGGGHLPPPPQVDQFPLNLPERLQALNDLVSKALEAGHIEPYSGPGNNPVFPVKKPNGKWRFIHDLRATNAITTTLTSPSPGPPDLTSLPTALPHLQTIDLTDAFFQIPLPKQYQPYFAFTIPQPCNYGPGTRYAWTVLPQGFKNSPTLFQQQLAAVLNPMRKMFPTSTIVQYMDDILLASPTNEELQQLSQLTLQALTTHGLPISQEKTQQTPGQIRFLGQVISPNHITYESTPTIPIKSQWTLTELQVILGEIQWVSKGTPILRKHLQSLYSALHPYRDPRACITLTPQQLHALHAIQQALQHNCRGRLNPALPLLGLISLSTSGTTSVIFQPKQNWPLAWLHTPHPPTSLCPWGHLLACTILTLDKYTLQHYGQLCQSFHHNMSKQALCDFLRNSPHPSVGILIHHMGRFHNLGSQPSGPWKTLLHLPTLLQEPRLLRPIFTLSPVVLDTAPCLFSDGSPQKAAYVLWDQTILQQDITPLPSHETHSAQKGELLALICGLRAAKPWPSLNIFLDSKYLIKYLHSLAIGAFLGTSAHQTLQAALPPLLQGKTIYLHHVRSHTNLPDPISTFNEYTDSLILAPLVPLAGKRTADGSEFEKRTADGSEFESPKKKAKVE

SEQ ID NO: 1536 - protein, 2007 aa, synthetic construct
MPAAKRVKLDGGDKKYSIGLDIGTNSVGWAVITDEYKVPSKKFKVLGNTDRHSIKKNLIGALLFDSGETAEATRLKRTARRRYTRRKNRICYLQEIFSNEMAKVDDSFFHRLEESFLVEEDKKHERHPIFGNIVDEVAYHEKYPTIYHLRKKLVDSTDKADLRLIYLALAHMIKFRGHFLIEGDLNPDNSDVDKLFIQLVQTYNQLFEENPINASGVDAKAILSARLSKSRRLENLIAQLPGEKKNGLFGNLIALSLGLTPNFKSNFDLAEDAKLQLSKDTYDDDLDNLLAQIGDQYADLFLAAKNLSDAILLSDILRVNTEITKAPLSASMIKRYDEHHQDLTLLKALVRQQLPEKYKEIFFDQSKNGYAGYIDGGASQEEFYKFIKPILEKMDGTEELLVKLNREDLLRKQRTFDNGSIPHQIHLGELHAILRRQEDFYPFLKDNREKIEKILTFRIPYYVGPLARGNSRFAWMTRKSEETITPWNFEEVVDKGASAQSFIERMTNFDKNLPNEKVLPKHSLLYEYFTVYNELTKVKYVTEGMRKPAFLSGEQKKAIVDLLFKTNRKVTVKQLKEDYFKKIECFDSVEISGVEDRFNASLGTYHDLLKIIKDKDFLDNEENEDILEDIVLTLTLFEDREMIEERLKTYAHLFDDKVMKQLKRRRYTGWGRLSRKLINGIRDKQSGKTILDFLKSDGFANRNFMQLIHDDSLTFKEDIQKAQVSGQGDSLHEHIANLAGSPAIKKGILQTVKVVDELVKVMGRHKPENIVIEMARENQTTQKGQKNSRERMKRIEEGIKELGSQILKEHPVENTQLQNEKLYLYYLQNGRDMYVDQELDINRLSDYDVDHIVPQSFLKDDSIDNKVLTRSDKARGKSDNVPSEEVVKKMKNYWRQLLNAKLITQRKFDNLTKAERGGLSELDKAGFIKRQLVETRQITKHVAQILDSRMNTKYDENDKLIREVKVITLKSKLVSDFRKDFQFYKVREINNYHHAHDAYLNAVVGTALIKKYPKLESEFVYGDYKVYDVRKMIAKSEQEIGKATAKYFFYSNIMNFFKTEITLANGEIRKRPLIETNGETGEIVWDKGRDFATVRKVLSMPQVNIVKKTEVQTGGFSKESILPKRNSDKLIARKKDWDPKKYGGFDSPTVAYSVLVVAKVEKGKSKKLKSVKELLGITIMERSSFEKNPIDFLEAKGYKEVKKDLIIKLPKYSLFELENGRKRMLASAGELQKGNELALPSKYVNFLYLASHYEKLKGSPEDNEQKQLFVEQHKHYLDEIIEQISEFSKRVILADANLDKVLSAYNKHRDKPIREQAENIIHLFTLTNLGAPAAFKYFDTTIDRKRYTSTKEVLDATLIHQSITGLYETRIDLSQLGGDGGPAPAPAPAPGGHLPPPPQVDQFPLNLPERLQALNDLVSKALEAGHIEPYSGPGNNPVFPVKKPNGKWRFIHDLRATNAITTTLTSPSPGPPDLTSLPTALPHLQTIDLTDAFFQIPLPKQYQPYFAFTIPQPCNYGPGTRYAWTVLPQGFKNSPTLFQQQLAAVLNPMRKMFPTSTIVQYMDDILLASPTNEELQQLSQLTLQALTTHGLPISQEKTQQTPGQIRFLGQVISPNHITYESTPTIPIKSQWTLTELQVILGEIQWVSKGTPILRKHLQSLYSALHPYRDPRACITLTPQQLHALHAIQQALQHNCRGRLNPALPLLGLISLSTSGTTSVIFQPKQNWPLAWLHTPHPPTSLCPWGHLLACTILTLDKYTLQHYGQLCQSFHHNMSKQALCDFLRNSPHPSVGILIHHMGRFHNLGSQPSGPWKTLLHLPTLLQEPRLLRPIFTLSPVVLDTAPCLFSDGSPQKAAYVLWDQTILQQDITPLPSHETHSAQKGELLALICGLRAAKPWPSLNIFLDSKYLIKYLHSLAIGAFLGTSAHQTLQAALPPLLQGKTIYLHHVRSHTNLPDPISTFNEYTDSLILAPLVPLAGKRTADGSEFEKRTADGSEFESPKKKAKVE

SEQ ID NO: 1537 - protein, 2010 aa, synthetic construct
MPAAKRVKLDGGDKKYSIGLDIGTNSVGWAVITDEYKVPSKKFKVLGNTDRHSIKKNLIGALLFDSGETAEATRLKRTARRRYTRRKNRICYLQEIFSNEMAKVDDSFFHRLEESFLVEEDKKHERHPIFGNIVDEVAYHEKYPTIYHLRKKLVDSTDKADLRLIYLALAHMIKFRGHFLIEGDLNPDNSDVDKLFIQLVQTYNQLFEENPINASGVDAKAILSARLSKSRRLENLIAQLPGEKKNGLFGNLIALSLGLTPNFKSNFDLAEDAKLQLSKDTYDDDLDNLLAQIGDQYADLFLAAKNLSDAILLSDILRVNTEITKAPLSASMIKRYDEHHQDLTLLKALVRQQLPEKYKEIFFDQSKNGYAGYIDGGASQEEFYKFIKPILEKMDGTEELLVKLNREDLLRKQRTFDNGSIPHQIHLGELHAILRRQEDFYPFLKDNREKIEKILTFRIPYYVGPLARGNSRFAWMTRKSEETITPWNFEEVVDKGASAQSFIERMTNFDKNLPNEKVLPKHSLLYEYFTVYNELTKVKYVTEGMRKPAFLSGEQKKAIVDLLFKTNRKVTVKQLKEDYFKKIECFDSVEISGVEDRFNASLGTYHDLLKIIKDKDFLDNEENEDILEDIVLTLTLFEDREMIEERLKTYAHLFDDKVMKQLKRRRYTGWGRLSRKLINGIRDKQSGKTILDFLKSDGFANRNFMQLIHDDSLTFKEDIQKAQVSGQGDSLHEHIANLAGSPAIKKGILQTVKVVDELVKVMGRHKPENIVIEMARENQTTQKGQKNSRERMKRIEEGIKELGSQILKEHPVENTQLQNEKLYLYYLQNGRDMYVDQELDINRLSDYDVDHIVPQSFLKDDSIDNKVLTRSDKARGKSDNVPSEEVVKKMKNYWRQLLNAKLITQRKFDNLTKAERGGLSELDKAGFIKRQLVETRQITKHVAQILDSRMNTKYDENDKLIREVKVITLKSKLVSDFRKDFQFYKVREINNYHHAHDAYLNAVVGTALIKKYPKLESEFVYGDYKVYDVRKMIAKSEQEIGKATAKYFFYSNIMNFFKTEITLANGEIRKRPLIETNGETGEIVWDKGRDFATVRKVLSMPQVNIVKKTEVQTGGFSKESILPKRNSDKLIARKKDWDPKKYGGFDSPTVAYSVLVVAKVEKGKSKKLKSVKELLGITIMERSSFEKNPIDFLEAKGYKEVKKDLIIKLPKYSLFELENGRKRMLASAGELQKGNELALPSKYVNFLYLASHYEKLKGSPEDNEQKQLFVEQHKHYLDEIIEQISEFSKRVILADANLDKVLSAYNKHRDKPIREQAENIIHLFTLTNLGAPAAFKYFDTTIDRKRYTSTKEVLDATLIHQSITGLYETRIDLSQLGGDGGEAAAKEAAAKEAAAKGGPLGTSDSPVTHADPIDWKSEEPVWVDQWPLTQEKLSAAQQLVQEQLRLGHIEPSTSAWNSPIFVIKKKSGKWRLLQDLRKVNETMMHMGALQPGLPTPSAIPDKSYIIVIDLKDCFYTIPLAPQDCKRFAFSLPSVNFKEPMQRYQWRVLPQGMTNSPTLCQKFVATAIAPVRQRFPQLYLVHYMDDILLAHTDEHLLYQAFSILKQHLSLNGLVIADEKIQTHFPYNYLGFSLYPRVYNTQLVKLQTDHLKTLNDFQKLLGDINWIRPYLKLPTYTLQPLFDILKGDSDPASPRTLSLEGRTALQSIEEAIRQQQITYCDYQRSWGLYILPTPRAPTGVLYQDKPLRWIYLSATPTKHLLPYYELVAKIIAKGRHEAIQYFGMEPPFICVPYALEQQDWLFQFSDNWSIAFANYPGQITHHYPSDKLLQFASSHAFIFPKIVRRQPIPEATLIFTDGSSNGTAALIINHQTYYAQTSFSSAQVVELFAVHQALLTVPTSFNLFTDSSYVVGALQMIETVPIIGTTSPEVLNLFTLIQQVLHCRQHPCFFGHIRAHSTLPGALVQGNHTADVLTKQVFFQSAGKRTADGSEFEKRTADGSEFESPKKKAKVE

SEQ ID NO: 1538 - protein, 2001 aa, synthetic construct
MPAAKRVKLDGGDKKYSIGLDIGTNSVGWAVITDEYKVPSKKFKVLGNTDRHSIKKNLIGALLFDSGETAEATRLKRTARRRYTRRKNRICYLQEIFSNEMAKVDDSFFHRLEESFLVEEDKKHERHPIFGNIVDEVAYHEKYPTIYHLRKKLVDSTDKADLRLIYLALAHMIKFRGHFLIEGDLNPDNSDVDKLFIQLVQTYNQLFEENPINASGVDAKAILSARLSKSRRLENLIAQLPGEKKNGLFGNLIALSLGLTPNFKSNFDLAEDAKLQLSKDTYDDDLDNLLAQIGDQYADLFLAAKNLSDAILLSDILRVNTEITKAPLSASMIKRYDEHHQDLTLLKALVRQQLPEKYKEIFFDQSKNGYAGYIDGGASQEEFYKFIKPILEKMDGTEELLVKLNREDLLRKQRTFDNGSIPHQIHLGELHAILRRQEDFYPFLKDNREKIEKILTFRIPYYVGPLARGNSRFAWMTRKSEETITPWNFEEVVDKGASAQSFIERMTNFDKNLPNEKVLPKHSLLYEYFTVYNELTKVKYVTEGMRKPAFLSGEQKKAIVDLLFKTNRKVTVKQLKEDYFKKIECFDSVEISGVEDRFNASLGTYHDLLKIIKDKDFLDNEENEDILEDIVLTLTLFEDREMIEERLKTYAHLFDDKVMKQLKRRRYTGWGRLSRKLINGIRDKQSGKTILDFLKSDGFANRNFMQLIHDDSLTFKEDIQKAQVSGQGDSLHEHIANLAGSPAIKKGILQTVKVVDELVKVMGRHKPENIVIEMARENQTTQKGQKNSRERMKRIEEGIKELGSQILKEHPVENTQLQNEKLYLYYLQNGRDMYVDQELDINRLSDYDVDHIVPQSFLKDDSIDNKVLTRSDKARGKSDNVPSEEVVKKMKNYWRQLLNAKLITQRKFDNLTKAERGGLSELDKAGFIKRQLVETRQITKHVAQILDSRMNTKYDENDKLIREVKVITLKSKLVSDFRKDFQFYKVREINNYHHAHDAYLNAVVGTALIKKYPKLESEFVYGDYKVYDVRKMIAKSEQEIGKATAKYFFYSNIMNFFKTEITLANGEIRKRPLIETNGETGEIVWDKGRDFATVRKVLSMPQVNIVKKTEVQTGGFSKESILPKRNSDKLIARKKDWDPKKYGGFDSPTVAYSVLVVAKVEKGKSKKLKSVKELLGITIMERSSFEKNPIDFLEAKGYKEVKKDLIIKLPKYSLFELENGRKRMLASAGELQKGNELALPSKYVNFLYLASHYEKLKGSPEDNEQKQLFVEQHKHYLDEIIEQISEFSKRVILADANLDKVLSAYNKHRDKPIREQAENIIHLFTLTNLGAPAAFKYFDTTIDRKRYTSTKEVLDATLIHQSITGLYETRIDLSQLGGDGGGSSGGGGGPLGTSDSPVTHADPIDWKSEEPVWVDQWPLTQEKLSAAQQLVQEQLRLGHIEPSTSAWNSPIFVIKKKSGKWRLLQDLRKVNETMMHMGALQPGLPTPSAIPDKSYIIVIDLKDCFYTIPLAPQDCKRFAFSLPSVNFKEPMQRYQWRVLPQGMTNSPTLCQKFVATAIAPVRQRFPQLYLVHYMDDILLAHTDEHLLYQAFSILKQHLSLNGLVIADEKIQTHFPYNYLGFSLYPRVYNTQLVKLQTDHLKTLNDFQKLLGDINWIRPYLKLPTYTLQPLFDILKGDSDPASPRTLSLEGRTALQSIEEAIRQQQITYCDYQRSWGLYILPTPRAPTGVLYQDKPLRWIYLSATPTKHLLPYYELVAKIIAKGRHEAIQYFGMEPPFICVPYALEQQDWLFQFSDNWSIAFANYPGQITHHYPSDKLLQFASSHAFIFPKIVRRQPIPEATLIFTDGSSNGTAALIINHQTYYAQTSFSSAQVVELFAVHQALLTVPTSFNLFTDSSYVVGALQMIETVPIIGTTSPEVLNLFTLIQQVLHCRQHPCFFGHIRAHSTLPGALVQGNHTADVLTKQVFFQSAGKRTADGSEFEKRTADGSEFESPKKKAKVE

SEQ ID NO: 1539 - protein, 2106 aa, synthetic construct
MPAAKRVKLDGGDKKYSIGLDIGTNSVGWAVITDEYKVPSKKFKVLGNTDRHSIKKNLIGALLFDSGETAEATRLKRTARRRYTRRKNRICYLQEIFSNEMAKVDDSFFHRLEESFLVEEDKKHERHPIFGNIVDEVAYHEKYPTIYHLRKKLVDSTDKADLRLIYLALAHMIKFRGHFLIEGDLNPDNSDVDKLFIQLVQTYNQLFEENPINASGVDAKAILSARLSKSRRLENLIAQLPGEKKNGLFGNLIALSLGLTPNFKSNFDLAEDAKLQLSKDTYDDDLDNLLAQIGDQYADLFLAAKNLSDAILLSDILRVNTEITKAPLSASMIKRYDEHHQDLTLLKALVRQQLPEKYKEIFFDQSKNGYAGYIDGGASQEEFYKFIKPILEKMDGTEELLVKLNREDLLRKQRTFDNGSIPHQIHLGELHAILRRQEDFYPFLKDNREKIEKILTFRIPYYVGPLARGNSRFAWMTRKSEETITPWNFEEVVDKGASAQSFIERMTNFDKNLPNEKVLPKHSLLYEYFTVYNELTKVKYVTEGMRKPAFLSGEQKKAIVDLLFKTNRKVTVKQLKEDYFKKIECFDSVEISGVEDRFNASLGTYHDLLKIIKDKDFLDNEENEDILEDIVLTLTLFEDREMIEERLKTYAHLFDDKVMKQLKRRRYTGWGRLSRKLINGIRDKQSGKTILDFLKSDGFANRNFMQLIHDDSLTFKEDIQKAQVSGQGDSLHEHIANLAGSPAIKKGILQTVKVVDELVKVMGRHKPENIVIEMARENQTTQKGQKNSRERMKRIEEGIKELGSQILKEHPVENTQLQNEKLYLYYLQNGRDMYVDQELDINRLSDYDVDHIVPQSFLKDDSIDNKVLTRSDKARGKSDNVPSEEVVKKMKNYWRQLLNAKLITQRKFDNLTKAERGGLSELDKAGFIKRQLVETRQITKHVAQILDSRMNTKYDENDKLIREVKVITLKSKLVSDFRKDFQFYKVREINNYHHAHDAYLNAVVGTALIKKYPKLESEFVYGDYKVYDVRKMIAKSEQEIGKATAKYFFYSNIMNFFKTEITLANGEIRKRPLIETNGETGEIVWDKGRDFATVRKVLSMPQVNIVKKTEVQTGGFSKESILPKRNSDKLIARKKDWDPKKYGGFDSPTVAYSVLVVAKVEKGKSKKLKSVKELLGITIMERSSFEKNPIDFLEAKGYKEVKKDLIIKLPKYSLFELENGRKRMLASAGELQKGNELALPSKYVNFLYLASHYEKLKGSPEDNEQKQLFVEQHKHYLDEIIEQISEFSKRVILADANLDKVLSAYNKHRDKPIREQAENIIHLFTLTNLGAPAAFKYFDTTIDRKRYTSTKEVLDATLIHQSITGLYETRIDLSQLGGDGGEAAAKGGGGSEAAAKGGTVSLQDEHRLFDIPVTTSLPDVWLQDFPQAWAETGGLGRAKCQAPIIIDLKPTAVPVSIKQYPMSLEAHMGIRQHIIKFLELGVLRPCRSPWNTPLLPVKKPGTQDYRPVQDLREINKRTVDIHPTVPNPYNLLSTLKPDYSWYTVLDLKDAFFCLPLAPQSQELFAFEWKDPERGISGQLTWTRLPQGFKNSPTLFNEALHRDLTDFRTQHPEVTLLQYVDDLLLAAPTKKACTQGTRHLLQELGEKGYRASAKKAQICQTKVTYLGYILSEGKRWLTPGRIETVARIPPPRNPREVREFLGTAGFCRLWIPGFAELAAPLYALTKPSTPFTWQTEHQLAFEALKKALLSAPALGLPDTSKPFTLFLDERQGIAKGVLTQKLGPWKRPVAYLSKKLDPVAAGWPPCLRIMAATAMLVKDSAKLTLGQPLTVITPHTLEAIVRQPPDRWITNARLTHYQALLLDTDRVQFGPPVTLNPATLLPVPENQPSPHDCRQVLAETHGTREDLKDQELPDADHTWYTDGSSYLDSGTRRAGAAVVDGHNTIWAQSLPPGTSAQKAELIALTKALELSKGKKANIYTDSRYAFATAHTHGSIYERRGWLTSEGKEIKNKAEIIALLKALFLPQEVAIIHCPGHQKGQDPVAVGNRQADRVARQAAMAEVLTLATEPDNTSHITAGKRTADGSEFEKRTADGSEFESPKKKAKVE

SEQ ID NO: 1540 - protein, 2102 aa, synthetic construct
MPAAKRVKLDGGDKKYSIGLDIGTNSVGWAVITDEYKVPSKKFKVLGNTDRHSIKKNLIGALLFDSGETAEATRLKRTARRRYTRRKNRICYLQEIFSNEMAKVDDSFFHRLEESFLVEEDKKHERHPIFGNIVDEVAYHEKYPTIYHLRKKLVDSTDKADLRLIYLALAHMIKFRGHFLIEGDLNPDNSDVDKLFIQLVQTYNQLFEENPINASGVDAKAILSARLSKSRRLENLIAQLPGEKKNGLFGNLIALSLGLTPNFKSNFDLAEDAKLQLSKDTYDDDLDNLLAQIGDQYADLFLAAKNLSDAILLSDILRVNTEITKAPLSASMIKRYDEHHQDLTLLKALVRQQLPEKYKEIFFDQSKNGYAGYIDGGASQEEFYKFIKPILEKMDGTEELLVKLNREDLLRKQRTFDNGSIPHQIHLGELHAILRRQEDFYPFLKDNREKIEKILTFRIPYYVGPLARGNSRFAWMTRKSEETITPWNFEEVVDKGASAQSFIERMTNFDKNLPNEKVLPKHSLLYEYFTVYNELTKVKYVTEGMRKPAFLSGEQKKAIVDLLFKTNRKVTVKQLKEDYFKKIECFDSVEISGVEDRFNASLGTYHDLLKIIKDKDFLDNEENEDILEDIVLTLTLFEDREMIEERLKTYAHLFDDKVMKQLKRRRYTGWGRLSRKLINGIRDKQSGKTILDFLKSDGFANRNFMQLIHDDSLTFKEDIQKAQVSGQGDSLHEHIANLAGSPAIKKGILQTVKVVDELVKVMGRHKPENIVIEMARENQTTQKGQKNSRERMKRIEEGIKELGSQILKEHPVENTQLQNEKLYLYYLQNGRDMYVDQELDINRLSDYDVDHIVPQSFLKDDSIDNKVLTRSDKARGKSDNVPSEEVVKKMKNYWRQLLNAKLITQRKFDNLTKAERGGLSELDKAGFIKRQLVETRQITKHVAQILDSRMNTKYDENDKLIREVKVITLKSKLVSDFRKDFQFYKVREINNYHHAHDAYLNAVVGTALIKKYPKLESEFVYGDYKVYDVRKMIAKSEQEIGKATAKYFFYSNIMNFFKTEITLANGEIRKRPLIETNGETGEIVWDKGRDFATVRKVLSMPQVNIVKKTEVQTGGFSKESILPKRNSDKLIARKKDWDPKKYGGFDSPTVAYSVLVVAKVEKGKSKKLKSVKELLGITIMERSSFEKNPIDFLEAKGYKEVKKDLIIKLPKYSLFELENGRKRMLASAGELQKGNELALPSKYVNFLYLASHYEKLKGSPEDNEQKQLFVEQHKHYLDEIIEQISEFSKRVILADANLDKVLSAYNKHRDKPIREQAENIIHLFTLTNLGAPAAFKYFDTTIDRKRYTSTKEVLDATLIHQSITGLYETRIDLSQLGGDGGGGGGSSEAAAKGGTVSLQDEHRLFDIPVTTSLPDVWLQDFPQAWAETGGLGRAKCQAPIIIDLKPTAVPVSIKQYPMSLEAHMGIRQHIIKFLELGVLRPCRSPWNTPLLPVKKPGTQDYRPVQDLREINKRTVDIHPTVPNPYNLLSTLKPDYSWYTVLDLKDAFFCLPLAPQSQELFAFEWKDPERGISGQLTWTRLPQGFKNSPTLFNEALHRDLTDFRTQHPEVTLLQYVDDLLLAAPTKKACTQGTRHLLQELGEKGYRASAKKAQICQTKVTYLGYILSEGKRWLTPGRIETVARIPPPRNPREVREFLGTAGFCRLWIPGFAELAAPLYALTKPSTPFTWQTEHQLAFEALKKALLSAPALGLPDTSKPFTLFLDERQGIAKGVLTQKLGPWKRPVAYLSKKLDPVAAGWPPCLRIMAATAMLVKDSAKLTLGQPLTVITPHTLEAIVRQPPDRWITNARLTHYQALLLDTDRVQFGPPVTLNPATLLPVPENQPSPHDCRQVLAETHGTREDLKDQELPDADHTWYTDGSSYLDSGTRRAGAAVVDGHNTIWAQSLPPGTSAQKAELIALTKALELSKGKKANIYTDSRYAFATAHTHGSIYERRGWLTSEGKEIKNKAEIIALLKALFLPQEVAIIHCPGHQKGQDPVAVGNRQADRVARQAAMAEVLTLATEPDNTSHITAGKRTADGSEFEKRTADGSEFESPKKKAKVE

SEQ ID NO: 1541 - protein, 2094 aa, synthetic construct
MPAAKRVKLDGGDKKYSIGLDIGTNSVGWAVITDEYKVPSKKFKVLGNTDRHSIKKNLIGALLFDSGETAEATRLKRTARRRYTRRKNRICYLQEIFSNEMAKVDDSFFHRLEESFLVEEDKKHERHPIFGNIVDEVAYHEKYPTIYHLRKKLVDSTDKADLRLIYLALAHMIKFRGHFLIEGDLNPDNSDVDKLFIQLVQTYNQLFEENPINASGVDAKAILSARLSKSRRLENLIAQLPGEKKNGLFGNLIALSLGLTPNFKSNFDLAEDAKLQLSKDTYDDDLDNLLAQIGDQYADLFLAAKNLSDAILLSDILRVNTEITKAPLSASMIKRYDEHHQDLTLLKALVRQQLPEKYKEIFFDQSKNGYAGYIDGGASQEEFYKFIKPILEKMDGTEELLVKLNREDLLRKQRTFDNGSIPHQIHLGELHAILRRQEDFYPFLKDNREKIEKILTFRIPYYVGPLARGNSRFAWMTRKSEETITPWNFEEVVDKGASAQSFIERMTNFDKNLPNEKVLPKHSLLYEYFTVYNELTKVKYVTEGMRKPAFLSGEQKKAIVDLLFKTNRKVTVKQLKEDYFKKIECFDSVEISGVEDRFNASLGTYHDLLKIIKDKDFLDNEENEDILEDIVLTLTLFEDREMIEERLKTYAHLFDDKVMKQLKRRRYTGWGRLSRKLINGIRDKQSGKTILDFLKSDGFANRNFMQLIHDDSLTFKEDIQKAQVSGQGDSLHEHIANLAGSPAIKKGILQTVKVVDELVKVMGRHKPENIVIEMARENQTTQKGQKNSRERMKRIEEGIKELGSQILKEHPVENTQLQNEKLYLYYLQNGRDMYVDQELDINRLSDYDVDHIVPQSFLKDDSIDNKVLTRSDKARGKSDNVPSEEVVKKMKNYWRQLLNAKLITQRKFDNLTKAERGGLSELDKAGFIKRQLVETRQITKHVAQILDSRMNTKYDENDKLIREVKVITLKSKLVSDFRKDFQFYKVREINNYHHAHDAYLNAVVGTALIKKYPKLESEFVYGDYKVYDVRKMIAKSEQEIGKATAKYFFYSNIMNFFKTEITLANGEIRKRPLIETNGETGEIVWDKGRDFATVRKVLSMPQVNIVKKTEVQTGGFSKESILPKRNSDKLIARKKDWDPKKYGGFDSPTVAYSVLVVAKVEKGKSKKLKSVKELLGITIMERSSFEKNPIDFLEAKGYKEVKKDLIIKLPKYSLFELENGRKRMLASAGELQKGNELALPSKYVNFLYLASHYEKLKGSPEDNEQKQLFVEQHKHYLDEIIEQISEFSKRVILADANLDKVLSAYNKHRDKPIREQAENIIHLFTLTNLGAPAAFKYFDTTIDRKRYTSTKEVLDATLIHQSITGLYETRIDLSQLGGDGGGGSGGTVSLQDEHRLFDIPVTTSLPDVWLQDFPQAWAETGGLGRAKCQAPIIIDLKPTAVPVSIKQYPMSLEAHMGIRQHIIKFLELGVLRPCRSPWNTPLLPVKKPGTQDYRPVQDLREINKRTVDIHPTVPNPYNLLSTLKPDYSWYTVLDLKDAFFCLPLAPQSQELFAFEWKDPERGISGQLTWTRLPQGFKNSPTLFNEALHRDLTDFRTQHPEVTLLQYVDDLLLAAPTKKACTQGTRHLLQELGEKGYRASAKKAQICQTKVTYLGYILSEGKRWLTPGRIETVARIPPPRNPREVREFLGTAGFCRLWIPGFAELAAPLYALTKPSTPFTWQTEHQLAFEALKKALLSAPALGLPDTSKPFTLFLDERQGIAKGVLTQKLGPWKRPVAYLSKKLDPVAAGWPPCLRIMAATAMLVKDSAKLTLGQPLTVITPHTLEAIVRQPPDRWITNARLTHYQALLLDTDRVQFGPPVTLNPATLLPVPENQPSPHDCRQVLAETHGTREDLKDQELPDADHTWYTDGSSYLDSGTRRAGAAVVDGHNTIWAQSLPPGTSAQKAELIALTKALELSKGKKANIYTDSRYAFATAHTHGSIYERRGWLTSEGKEIKNKAEIIALLKALFLPQEVAIIHCPGHQKGQDPVAVGNRQADRVARQAAMAEVLTLATEPDNTSHITAGKRTADGSEFEKRTADGSEFESPKKKAKVE

SEQ ID NO: 1542 - protein, 2137 aa, synthetic construct
MPAAKRVKLDGGDKKYSIGLDIGTNSVGWAVITDEYKVPSKKFKVLGNTDRHSIKKNLIGALLFDSGETAEATRLKRTARRRYTRRKNRICYLQEIFSNEMAKVDDSFFHRLEESFLVEEDKKHERHPIFGNIVDEVAYHEKYPTIYHLRKKLVDSTDKADLRLIYLALAHMIKFRGHFLIEGDLNPDNSDVDKLFIQLVQTYNQLFEENPINASGVDAKAILSARLSKSRRLENLIAQLPGEKKNGLFGNLIALSLGLTPNFKSNFDLAEDAKLQLSKDTYDDDLDNLLAQIGDQYADLFLAAKNLSDAILLSDILRVNTEITKAPLSASMIKRYDEHHQDLTLLKALVRQQLPEKYKEIFFDQSKNGYAGYIDGGASQEEFYKFIKPILEKMDGTEELLVKLNREDLLRKQRTFDNGSIPHQIHLGELHAILRRQEDFYPFLKDNREKIEKILTFRIPYYVGPLARGNSRFAWMTRKSEETITPWNFEEVVDKGASAQSFIERMTNFDKNLPNEKVLPKHSLLYEYFTVYNELTKVKYVTEGMRKPAFLSGEQKKAIVDLLFKTNRKVTVKQLKEDYFKKIECFDSVEISGVEDRFNASLGTYHDLLKIIKDKDFLDNEENEDILEDIVLTLTLFEDREMIEERLKTYAHLFDDKVMKQLKRRRYTGWGRLSRKLINGIRDKQSGKTILDFLKSDGFANRNFMQLIHDDSLTFKEDIQKAQVSGQGDSLHEHIANLAGSPAIKKGILQTVKVVDELVKVMGRHKPENIVIEMARENQTTQKGQKNSRERMKRIEEGIKELGSQILKEHPVENTQLQNEKLYLYYLQNGRDMYVDQELDINRLSDYDVDHIVPQSFLKDDSIDNKVLTRSDKARGKSDNVPSEEVVKKMKNYWRQLLNAKLITQRKFDNLTKAERGGLSELDKAGFIKRQLVETRQITKHVAQILDSRMNTKYDENDKLIREVKVITLKSKLVSDFRKDFQFYKVREINNYHHAHDAYLNAVVGTALIKKYPKLESEFVYGDYKVYDVRKMIAKSEQEIGKATAKYFFYSNIMNFFKTEITLANGEIRKRPLIETNGETGEIVWDKGRDFATVRKVLSMPQVNIVKKTEVQTGGFSKESILPKRNSDKLIARKKDWDPKKYGGFDSPTVAYSVLVVAKVEKGKSKKLKSVKELLGITIMERSSFEKNPIDFLEAKGYKEVKKDLIIKLPKYSLFELENGRKRMLASAGELQKGNELALPSKYVNFLYLASHYEKLKGSPEDNEQKQLFVEQHKHYLDEIIEQISEFSKRVILADANLDKVLSAYNKHRDKPIREQAENIIHLFTLTNLGAPAAFKYFDTTIDRKRYTSTKEVLDATLIHQSITGLYETRIDLSQLGGDGGAEAAAKEAAAKEAAAKEAAAKALEAEAAAKEAAAKEAAAKEAAAKAGGTVSLQDEHRLFDIPVTTSLPDVWLQDFPQAWAETGGLGRAKCQAPIIIDLKPTAVPVSIKQYPMSLEAHMGIRQHIIKFLELGVLRPCRSPWNTPLLPVKKPGTQDYRPVQDLREINKRTVDIHPTVPNPYNLLSTLKPDYSWYTVLDLKDAFFCLPLAPQSQELFAFEWKDPERGISGQLTWTRLPQGFKNSPTLFNEALHRDLTDFRTQHPEVTLLQYVDDLLLAAPTKKACTQGTRHLLQELGEKGYRASAKKAQICQTKVTYLGYILSEGKRWLTPGRIETVARIPPPRNPREVREFLGTAGFCRLWIPGFAELAAPLYALTKPSTPFTWQTEHQLAFEALKKALLSAPALGLPDTSKPFTLFLDERQGIAKGVLTQKLGPWKRPVAYLSKKLDPVAAGWPPCLRIMAATAMLVKDSAKLTLGQPLTVITPHTLEAIVRQPPDRWITNARLTHYQALLLDTDRVQFGPPVTLNPATLLPVPENQPSPHDCRQVLAETHGTREDLKDQELPDADHTWYTDGSSYLDSGTRRAGAAVVDGHNTIWAQSLPPGTSAQKAELIALTKALELSKGKKANIYTDSRYAFATAHTHGSIYERRGWLTSEGKEIKNKAEIIALLKALFLPQEVAIIHCPGHQKGQDPVAVGNRQADRVARQAAMAEVLTLATEPDNTSHITAGKRTADGSEFEKRTADGSEFESPKKKAKVE

SEQ ID NO: 1543 - protein, 2116 aa, synthetic construct
MPAAKRVKLDGGDKKYSIGLDIGTNSVGWAVITDEYKVPSKKFKVLGNTDRHSIKKNLIGALLFDSGETAEATRLKRTARRRYTRRKNRICYLQEIFSNEMAKVDDSFFHRLEESFLVEEDKKHERHPIFGNIVDEVAYHEKYPTIYHLRKKLVDSTDKADLRLIYLALAHMIKFRGHFLIEGDLNPDNSDVDKLFIQLVQTYNQLFEENPINASGVDAKAILSARLSKSRRLENLIAQLPGEKKNGLFGNLIALSLGLTPNFKSNFDLAEDAKLQLSKDTYDDDLDNLLAQIGDQYADLFLAAKNLSDAILLSDILRVNTEITKAPLSASMIKRYDEHHQDLTLLKALVRQQLPEKYKEIFFDQSKNGYAGYIDGGASQEEFYKFIKPILEKMDGTEELLVKLNREDLLRKQRTFDNGSIPHQIHLGELHAILRRQEDFYPFLKDNREKIEKILTFRIPYYVGPLARGNSRFAWMTRKSEETITPWNFEEVVDKGASAQSFIERMTNFDKNLPNEKVLPKHSLLYEYFTVYNELTKVKYVTEGMRKPAFLSGEQKKAIVDLLFKTNRKVTVKQLKEDYFKKIECFDSVEISGVEDRFNASLGTYHDLLKIIKDKDFLDNEENEDILEDIVLTLTLFEDREMIEERLKTYAHLFDDKVMKQLKRRRYTGWGRLSRKLINGIRDKQSGKTILDFLKSDGFANRNFMQLIHDDSLTFKEDIQKAQVSGQGDSLHEHIANLAGSPAIKKGILQTVKVVDELVKVMGRHKPENIVIEMARENQTTQKGQKNSRERMKRIEEGIKELGSQILKEHPVENTQLQNEKLYLYYLQNGRDMYVDQELDINRLSDYDVDHIVPQSFLKDDSIDNKVLTRSDKARGKSDNVPSEEVVKKMKNYWRQLLNAKLITQRKFDNLTKAERGGLSELDKAGFIKRQLVETRQITKHVAQILDSRMNTKYDENDKLIREVKVITLKSKLVSDFRKDFQFYKVREINNYHHAHDAYLNAVVGTALIKKYPKLESEFVYGDYKVYDVRKMIAKSEQEIGKATAKYFFYSNIMNFFKTEITLANGEIRKRPLIETNGETGEIVWDKGRDFATVRKVLSMPQVNIVKKTEVQTGGFSKESILPKRNSDKLIARKKDWDPKKYGGFDSPTVAYSVLVVAKVEKGKSKKLKSVKELLGITIMERSSFEKNPIDFLEAKGYKEVKKDLIIKLPKYSLFELENGRKRMLASAGELQKGNELALPSKYVNFLYLASHYEKLKGSPEDNEQKQLFVEQHKHYLDEIIEQISEFSKRVILADANLDKVLSAYNKHRDKPIREQAENIIHLFTLTNLGAPAAFKYFDTTIDRKRYTSTKEVLDATLIHQSITGLYETRIDLSQLGGDGGGGGGSGGGGSGGGGSGGGGSGGGGSGGTVSLQDEHRLFDIPVTTSLPDVWLQDFPQAWAETGGLGRAKCQAPIIIDLKPTAVPVSIKQYPMSLEAHMGIRQHIIKFLELGVLRPCRSPWNTPLLPVKKPGTQDYRPVQDLREINKRTVDIHPTVPNPYNLLSTLKPDYSWYTVLDLKDAFFCLPLAPQSQELFAFEWKDPERGISGQLTWTRLPQGFKNSPTLFNEALHRDLTDFRTQHPEVTLLQYVDDLLLAAPTKKACTQGTRHLLQELGEKGYRASAKKAQICQTKVTYLGYILSEGKRWLTPGRIETVARIPPPRNPREVREFLGTAGFCRLWIPGFAELAAPLYALTKPSTPFTWQTEHQLAFEALKKALLSAPALGLPDTSKPFTLFLDERQGIAKGVLTQKLGPWKRPVAYLSKKLDPVAAGWPPCLRIMAATAMLVKDSAKLTLGQPLTVITPHTLEAIVRQPPDRWITNARLTHYQALLLDTDRVQFGPPVTLNPATLLPVPENQPSPHDCRQVLAETHGTREDLKDQELPDADHTWYTDGSSYLDSGTRRAGAAVVDGHNTIWAQSLPPGTSAQKAELIALTKALELSKGKKANIYTDSRYAFATAHTHGSIYERRGWLTSEGKEIKNKAEIIALLKALFLPQEVAIIHCPGHQKGQDPVAVGNRQADRVARQAAMAEVLTLATEPDNTSHITAGKRTADGSEFEKRTADGSEFESPKKKAKVE

SEQ ID NO: 1544 - protein, 2099 aa, synthetic construct
MPAAKRVKLDGGDKKYSIGLDIGTNSVGWAVITDEYKVPSKKFKVLGNTDRHSIKKNLIGALLFDSGETAEATRLKRTARRRYTRRKNRICYLQEIFSNEMAKVDDSFFHRLEESFLVEEDKKHERHPIFGNIVDEVAYHEKYPTIYHLRKKLVDSTDKADLRLIYLALAHMIKFRGHFLIEGDLNPDNSDVDKLFIQLVQTYNQLFEENPINASGVDAKAILSARLSKSRRLENLIAQLPGEKKNGLFGNLIALSLGLTPNFKSNFDLAEDAKLQLSKDTYDDDLDNLLAQIGDQYADLFLAAKNLSDAILLSDILRVNTEITKAPLSASMIKRYDEHHQDLTLLKALVRQQLPEKYKEIFFDQSKNGYAGYIDGGASQEEFYKFIKPILEKMDGTEELLVKLNREDLLRKQRTFDNGSIPHQIHLGELHAILRRQEDFYPFLKDNREKIEKILTFRIPYYVGPLARGNSRFAWMTRKSEETITPWNFEEVVDKGASAQSFIERMTNFDKNLPNEKVLPKHSLLYEYFTVYNELTKVKYVTEGMRKPAFLSGEQKKAIVDLLFKTNRKVTVKQLKEDYFKKIECFDSVEISGVEDRFNASLGTYHDLLKIIKDKDFLDNEENEDILEDIVLTLTLFEDREMIEERLKTYAHLFDDKVMKQLKRRRYTGWGRLSRKLINGIRDKQSGKTILDFLKSDGFANRNFMQLIHDDSLTFKEDIQKAQVSGQGDSLHEHIANLAGSPAIKKGILQTVKVVDELVKVMGRHKPENIVIEMARENQTTQKGQKNSRERMKRIEEGIKELGSQILKEHPVENTQLQNEKLYLYYLQNGRDMYVDQELDINRLSDYDVDHIVPQSFLKDDSIDNKVLTRSDKARGKSDNVPSEEVVKKMKNYWRQLLNAKLITQRKFDNLTKAERGGLSELDKAGFIKRQLVETRQITKHVAQILDSRMNTKYDENDKLIREVKVITLKSKLVSDFRKDFQFYKVREINNYHHAHDAYLNAVVGTALIKKYPKLESEFVYGDYKVYDVRKMIAKSEQEIGKATAKYFFYSNIMNFFKTEITLANGEIRKRPLIETNGETGEIVWDKGRDFATVRKVLSMPQVNIVKKTEVQTGGFSKESILPKRNSDKLIARKKDWDPKKYGGFDSPTVAYSVLVVAKVEKGKSKKLKSVKELLGITIMERSSFEKNPIDFLEAKGYKEVKKDLIIKLPKYSLFELENGRKRMLASAGELQKGNELALPSKYVNFLYLASHYEKLKGSPEDNEQKQLFVEQHKHYLDEIIEQISEFSKRVILADANLDKVLSAYNKHRDKPIREQAENIIHLFTLTNLGAPAAFKYFDTTIDRKRYTSTKEVLDATLIHQSITGLYETRIDLSQLGGDGGEAAAKPAPGGTVSLQDEHRLFDIPVTTSLPDVWLQDFPQAWAETGGLGRAKCQAPIIIDLKPTAVPVSIKQYPMSLEAHMGIRQHIIKFLELGVLRPCRSPWNTPLLPVKKPGTQDYRPVQDLREINKRTVDIHPTVPNPYNLLSTLKPDYSWYTVLDLKDAFFCLPLAPQSQELFAFEWKDPERGISGQLTWTRLPQGFKNSPTLFNEALHRDLTDFRTQHPEVTLLQYVDDLLLAAPTKKACTQGTRHLLQELGEKGYRASAKKAQICQTKVTYLGYILSEGKRWLTPGRIETVARIPPPRNPREVREFLGTAGFCRLWIPGFAELAAPLYALTKPSTPFTWQTEHQLAFEALKKALLSAPALGLPDTSKPFTLFLDERQGIAKGVLTQKLGPWKRPVAYLSKKLDPVAAGWPPCLRIMAATAMLVKDSAKLTLGQPLTVITPHTLEAIVRQPPDRWITNARLTHYQALLLDTDRVQFGPPVTLNPATLLPVPENQPSPHDCRQVLAETHGTREDLKDQELPDADHTWYTDGSSYLDSGTRRAGAAVVDGHNTIWAQSLPPGTSAQKAELIALTKALELSKGKKANIYTDSRYAFATAHTHGSIYERRGWLTSEGKEIKNKAEIIALLKALFLPQEVAIIHCPGHQKGQDPVAVGNRQADRVARQAAMAEVLTLATEPDNTSHITAGKRTADGSEFEKRTADGSEFESPKKKAKVE

SEQ ID NO: 1545 - protein, 2094 aa, synthetic construct
MPAAKRVKLDGGDKKYSIGLDIGTNSVGWAVITDEYKVPSKKFKVLGNTDRHSIKKNLIGALLFDSGETAEATRLKRTARRRYTRRKNRICYLQEIFSNEMAKVDDSFFHRLEESFLVEEDKKHERHPIFGNIVDEVAYHEKYPTIYHLRKKLVDSTDKADLRLIYLALAHMIKFRGHFLIEGDLNPDNSDVDKLFIQLVQTYNQLFEENPINASGVDAKAILSARLSKSRRLENLIAQLPGEKKNGLFGNLIALSLGLTPNFKSNFDLAEDAKLQLSKDTYDDDLDNLLAQIGDQYADLFLAAKNLSDAILLSDILRVNTEITKAPLSASMIKRYDEHHQDLTLLKALVRQQLPEKYKEIFFDQSKNGYAGYIDGGASQEEFYKFIKPILEKMDGTEELLVKLNREDLLRKQRTFDNGSIPHQIHLGELHAILRRQEDFYPFLKDNREKIEKILTFRIPYYVGPLARGNSRFAWMTRKSEETITPWNFEEVVDKGASAQSFIERMTNFDKNLPNEKVLPKHSLLYEYFTVYNELTKVKYVTEGMRKPAFLSGEQKKAIVDLLFKTNRKVTVKQLKEDYFKKIECFDSVEISGVEDRFNASLGTYHDLLKIIKDKDFLDNEENEDILEDIVLTLTLFEDREMIEERLKTYAHLFDDKVMKQLKRRRYTGWGRLSRKLINGIRDKQSGKTILDFLKSDGFANRNFMQLIHDDSLTFKEDIQKAQVSGQGDSLHEHIANLAGSPAIKKGILQTVKVVDELVKVMGRHKPENIVIEMARENQTTQKGQKNSRERMKRIEEGIKELGSQILKEHPVENTQLQNEKLYLYYLQNGRDMYVDQELDINRLSDYDVDHIVPQSFLKDDSIDNKVLTRSDKARGKSDNVPSEEVVKKMKNYWRQLLNAKLITQRKFDNLTKAERGGLSELDKAGFIKRQLVETRQITKHVAQILDSRMNTKYDENDKLIREVKVITLKSKLVSDFRKDFQFYKVREINNYHHAHDAYLNAVVGTALIKKYPKLESEFVYGDYKVYDVRKMIAKSEQEIGKATAKYFFYSNIMNFFKTEITLANGEIRKRPLIETNGETGEIVWDKGRDFATVRKVLSMPQVNIVKKTEVQTGGFSKESILPKRNSDKLIARKKDWDPKKYGGFDSPTVAYSVLVVAKVEKGKSKKLKSVKELLGITIMERSSFEKNPIDFLEAKGYKEVKKDLIIKLPKYSLFELENGRKRMLASAGELQKGNELALPSKYVNFLYLASHYEKLKGSPEDNEQKQLFVEQHKHYLDEIIEQISEFSKRVILADANLDKVLSAYNKHRDKPIREQAENIIHLFTLTNLGAPAAFKYFDTTIDRKRYTSTKEVLDATLIHQSITGLYETRIDLSQLGGDGGGSSGGTVSLQDEHRLFDIPVTTSLPDVWLQDFPQAWAETGGLGRAKCQAPIIIDLKPTAVPVSIKQYPMSLEAHMGIRQHIIKFLELGVLRPCRSPWNTPLLPVKKPGTQDYRPVQDLREINKRTVDIHPTVPNPYNLLSTLKPDYSWYTVLDLKDAFFCLPLAPQSQELFAFEWKDPERGISGQLTWTRLPQGFKNSPTLFNEALHRDLTDFRTQHPEVTLLQYVDDLLLAAPTKKACTQGTRHLLQELGEKGYRASAKKAQICQTKVTYLGYILSEGKRWLTPGRIETVARIPPPRNPREVREFLGTAGFCRLWIPGFAELAAPLYALTKPSTPFTWQTEHQLAFEALKKALLSAPALGLPDTSKPFTLFLDERQGIAKGVLTQKLGPWKRPVAYLSKKLDPVAAGWPPCLRIMAATAMLVKDSAKLTLGQPLTVITPHTLEAIVRQPPDRWITNARLTHYQALLLDTDRVQFGPPVTLNPATLLPVPENQPSPHDCRQVLAETHGTREDLKDQELPDADHTWYTDGSSYLDSGTRRAGAAVVDGHNTIWAQSLPPGTSAQKAELIALTKALELSKGKKANIYTDSRYAFATAHTHGSIYERRGWLTSEGKEIKNKAEIIALLKALFLPQEVAIIHCPGHQKGQDPVAVGNRQADRVARQAAMAEVLTLATEPDNTSHITAGKRTADGSEFEKRTADGSEFESPKKKAKVE

SEQ ID NO: 1546 - protein, 2116 aa, synthetic construct
MPAAKRVKLDGGDKKYSIGLDIGTNSVGWAVITDEYKVPSKKFKVLGNTDRHSIKKNLIGALLFDSGETAEATRLKRTARRRYTRRKNRICYLQEIFSNEMAKVDDSFFHRLEESFLVEEDKKHERHPIFGNIVDEVAYHEKYPTIYHLRKKLVDSTDKADLRLIYLALAHMIKFRGHFLIEGDLNPDNSDVDKLFIQLVQTYNQLFEENPINASGVDAKAILSARLSKSRRLENLIAQLPGEKKNGLFGNLIALSLGLTPNFKSNFDLAEDAKLQLSKDTYDDDLDNLLAQIGDQYADLFLAAKNLSDAILLSDILRVNTEITKAPLSASMIKRYDEHHQDLTLLKALVRQQLPEKYKEIFFDQSKNGYAGYIDGGASQEEFYKFIKPILEKMDGTEELLVKLNREDLLRKQRTFDNGSIPHQIHLGELHAILRRQEDFYPFLKDNREKIEKILTFRIPYYVGPLARGNSRFAWMTRKSEETITPWNFEEVVDKGASAQSFIERMTNFDKNLPNEKVLPKHSLLYEYFTVYNELTKVKYVTEGMRKPAFLSGEQKKAIVDLLFKTNRKVTVKQLKEDYFKKIECFDSVEISGVEDRFNASLGTYHDLLKIIKDKDFLDNEENEDILEDIVLTLTLFEDREMIEERLKTYAHLFDDKVMKQLKRRRYTGWGRLSRKLINGIRDKQSGKTILDFLKSDGFANRNFMQLIHDDSLTFKEDIQKAQVSGQGDSLHEHIANLAGSPAIKKGILQTVKVVDELVKVMGRHKPENIVIEMARENQTTQKGQKNSRERMKRIEEGIKELGSQILKEHPVENTQLQNEKLYLYYLQNGRDMYVDQELDINRLSDYDVDHIVPQSFLKDDSIDNKVLTRSDKARGKSDNVPSEEVVKKMKNYWRQLLNAKLITQRKFDNLTKAERGGLSELDKAGFIKRQLVETRQITKHVAQILDSRMNTKYDENDKLIREVKVITLKSKLVSDFRKDFQFYKVREINNYHHAHDAYLNAVVGTALIKKYPKLESEFVYGDYKVYDVRKMIAKSEQEIGKATAKYFFYSNIMNFFKTEITLANGEIRKRPLIETNGETGEIVWDKGRDFATVRKVLSMPQVNIVKKTEVQTGGFSKESILPKRNSDKLIARKKDWDPKKYGGFDSPTVAYSVLVVAKVEKGKSKKLKSVKELLGITIMERSSFEKNPIDFLEAKGYKEVKKDLIIKLPKYSLFELENGRKRMLASAGELQKGNELALPSKYVNFLYLASHYEKLKGSPEDNEQKQLFVEQHKHYLDEIIEQISEFSKRVILADANLDKVLSAYNKHRDKPIREQAENIIHLFTLTNLGAPAAFKYFDTTIDRKRYTSTKEVLDATLIHQSITGLYETRIDLSQLGGDGGEAAAKEAAAKEAAAKEAAAKEAAAKGGTVSLQDEHRLFDIPVTTSLPDVWLQDFPQAWAETGGLGRAKCQAPIIIDLKPTAVPVSIKQYPMSLEAHMGIRQHIIKFLELGVLRPCRSPWNTPLLPVKKPGTQDYRPVQDLREINKRTVDIHPTVPNPYNLLSTLKPDYSWYTVLDLKDAFFCLPLAPQSQELFAFEWKDPERGISGQLTWTRLPQGFKNSPTLFNEALHRDLTDFRTQHPEVTLLQYVDDLLLAAPTKKACTQGTRHLLQELGEKGYRASAKKAQICQTKVTYLGYILSEGKRWLTPGRIETVARIPPPRNPREVREFLGTAGFCRLWIPGFAELAAPLYALTKPSTPFTWQTEHQLAFEALKKALLSAPALGLPDTSKPFTLFLDERQGIAKGVLTQKLGPWKRPVAYLSKKLDPVAAGWPPCLRIMAATAMLVKDSAKLTLGQPLTVITPHTLEAIVRQPPDRWITNARLTHYQALLLDTDRVQFGPPVTLNPATLLPVPENQPSPHDCRQVLAETHGTREDLKDQELPDADHTWYTDGSSYLDSGTRRAGAAVVDGHNTIWAQSLPPGTSAQKAELIALTKALELSKGKKANIYTDSRYAFATAHTHGSIYERRGWLTSEGKEIKNKAEIIALLKALFLPQEVAIIHCPGHQKGQDPVAVGNRQADRVARQAAMAEVLTLATEPDNTSHITAGKRTADGSEFEKRTADGSEFESPKKKAKVE

SEQ ID NO: 1547 - protein, 2099 aa, synthetic construct
MPAAKRVKLDGGDKKYSIGLDIGTNSVGWAVITDEYKVPSKKFKVLGNTDRHSIKKNLIGALLFDSGETAEATRLKRTARRRYTRRKNRICYLQEIFSNEMAKVDDSFFHRLEESFLVEEDKKHERHPIFGNIVDEVAYHEKYPTIYHLRKKLVDSTDKADLRLIYLALAHMIKFRGHFLIEGDLNPDNSDVDKLFIQLVQTYNQLFEENPINASGVDAKAILSARLSKSRRLENLIAQLPGEKKNGLFGNLIALSLGLTPNFKSNFDLAEDAKLQLSKDTYDDDLDNLLAQIGDQYADLFLAAKNLSDAILLSDILRVNTEITKAPLSASMIKRYDEHHQDLTLLKALVRQQLPEKYKEIFFDQSKNGYAGYIDGGASQEEFYKFIKPILEKMDGTEELLVKLNREDLLRKQRTFDNGSIPHQIHLGELHAILRRQEDFYPFLKDNREKIEKILTFRIPYYVGPLARGNSRFAWMTRKSEETITPWNFEEVVDKGASAQSFIERMTNFDKNLPNEKVLPKHSLLYEYFTVYNELTKVKYVTEGMRKPAFLSGEQKKAIVDLLFKTNRKVTVKQLKEDYFKKIECFDSVEISGVEDRFNASLGTYHDLLKIIKDKDFLDNEENEDILEDIVLTLTLFEDREMIEERLKTYAHLFDDKVMKQLKRRRYTGWGRLSRKLINGIRDKQSGKTILDFLKSDGFANRNFMQLIHDDSLTFKEDIQKAQVSGQGDSLHEHIANLAGSPAIKKGILQTVKVVDELVKVMGRHKPENIVIEMARENQTTQKGQKNSRERMKRIEEGIKELGSQILKEHPVENTQLQNEKLYLYYLQNGRDMYVDQELDINRLSDYDVDHIVPQSFLKDDSIDNKVLTRSDKARGKSDNVPSEEVVKKMKNYWRQLLNAKLITQRKFDNLTKAERGGLSELDKAGFIKRQLVETRQITKHVAQILDSRMNTKYDENDKLIREVKVITLKSKLVSDFRKDFQFYKVREINNYHHAHDAYLNAVVGTALIKKYPKLESEFVYGDYKVYDVRKMIAKSEQEIGKATAKYFFYSNIMNFFKTEITLANGEIRKRPLIETNGETGEIVWDKGRDFATVRKVLSMPQVNIVKKTEVQTGGFSKESILPKRNSDKLIARKKDWDPKKYGGFDSPTVAYSVLVVAKVEKGKSKKLKSVKELLGITIMERSSFEKNPIDFLEAKGYKEVKKDLIIKLPKYSLFELENGRKRMLASAGELQKGNELALPSKYVNFLYLASHYEKLKGSPEDNEQKQLFVEQHKHYLDEIIEQISEFSKRVILADANLDKVLSAYNKHRDKPIREQAENIIHLFTLTNLGAPAAFKYFDTTIDRKRYTSTKEVLDATLIHQSITGLYETRIDLSQLGGDGGEAAAKGGGGGTVSLQDEHRLFDIPVTTSLPDVWLQDFPQAWAETGGLGRAKCQAPIIIDLKPTAVPVSIKQYPMSLEAHMGIRQHIIKFLELGVLRPCRSPWNTPLLPVKKPGTQDYRPVQDLREINKRTVDIHPTVPNPYNLLSTLKPDYSWYTVLDLKDAFFCLPLAPQSQELFAFEWKDPERGISGQLTWTRLPQGFKNSPTLFNEALHRDLTDFRTQHPEVTLLQYVDDLLLAAPTKKACTQGTRHLLQELGEKGYRASAKKAQICQTKVTYLGYILSEGKRWLTPGRIETVARIPPPRNPREVREFLGTAGFCRLWIPGFAELAAPLYALTKPSTPFTWQTEHQLAFEALKKALLSAPALGLPDTSKPFTLFLDERQGIAKGVLTQKLGPWKRPVAYLSKKLDPVAAGWPPCLRIMAATAMLVKDSAKLTLGQPLTVITPHTLEAIVRQPPDRWITNARLTHYQALLLDTDRVQFGPPVTLNPATLLPVPENQPSPHDCRQVLAETHGTREDLKDQELPDADHTWYTDGSSYLDSGTRRAGAAVVDGHNTIWAQSLPPGTSAQKAELIALTKALELSKGKKANIYTDSRYAFATAHTHGSIYERRGWLTSEGKEIKNKAEIIALLKALFLPQEVAIIHCPGHQKGQDPVAVGNRQADRVARQAAMAEVLTLATEPDNTSHITAGKRTADGSEFEKRTADGSEFESPKKKAKVE

SEQ ID NO: 1548 - protein, 2097 aa, synthetic construct
MPAAKRVKLDGGDKKYSIGLDIGTNSVGWAVITDEYKVPSKKFKVLGNTDRHSIKKNLIGALLFDSGETAEATRLKRTARRRYTRRKNRICYLQEIFSNEMAKVDDSFFHRLEESFLVEEDKKHERHPIFGNIVDEVAYHEKYPTIYHLRKKLVDSTDKADLRLIYLALAHMIKFRGHFLIEGDLNPDNSDVDKLFIQLVQTYNQLFEENPINASGVDAKAILSARLSKSRRLENLIAQLPGEKKNGLFGNLIALSLGLTPNFKSNFDLAEDAKLQLSKDTYDDDLDNLLAQIGDQYADLFLAAKNLSDAILLSDILRVNTEITKAPLSASMIKRYDEHHQDLTLLKALVRQQLPEKYKEIFFDQSKNGYAGYIDGGASQEEFYKFIKPILEKMDGTEELLVKLNREDLLRKQRTFDNGSIPHQIHLGELHAILRRQEDFYPFLKDNREKIEKILTFRIPYYVGPLARGNSRFAWMTRKSEETITPWNFEEVVDKGASAQSFIERMTNFDKNLPNEKVLPKHSLLYEYFTVYNELTKVKYVTEGMRKPAFLSGEQKKAIVDLLFKTNRKVTVKQLKEDYFKKIECFDSVEISGVEDRFNASLGTYHDLLKIIKDKDFLDNEENEDILEDIVLTLTLFEDREMIEERLKTYAHLFDDKVMKQLKRRRYTGWGRLSRKLINGIRDKQSGKTILDFLKSDGFANRNFMQLIHDDSLTFKEDIQKAQVSGQGDSLHEHIANLAGSPAIKKGILQTVKVVDELVKVMGRHKPENIVIEMARENQTTQKGQKNSRERMKRIEEGIKELGSQILKEHPVENTQLQNEKLYLYYLQNGRDMYVDQELDINRLSDYDVDHIVPQSFLKDDSIDNKVLTRSDKARGKSDNVPSEEVVKKMKNYWRQLLNAKLITQRKFDNLTKAERGGLSELDKAGFIKRQLVETRQITKHVAQILDSRMNTKYDENDKLIREVKVITLKSKLVSDFRKDFQFYKVREINNYHHAHDAYLNAVVGTALIKKYPKLESEFVYGDYKVYDVRKMIAKSEQEIGKATAKYFFYSNIMNFFKTEITLANGEIRKRPLIETNGETGEIVWDKGRDFATVRKVLSMPQVNIVKKTEVQTGGFSKESILPKRNSDKLIARKKDWDPKKYGGFDSPTVAYSVLVVAKVEKGKSKKLKSVKELLGITIMERSSFEKNPIDFLEAKGYKEVKKDLIIKLPKYSLFELENGRKRMLASAGELQKGNELALPSKYVNFLYLASHYEKLKGSPEDNEQKQLFVEQHKHYLDEIIEQISEFSKRVILADANLDKVLSAYNKHRDKPIREQAENIIHLFTLTNLGAPAAFKYFDTTIDRKRYTSTKEVLDATLIHQSITGLYETRIDLSQLGGDGGGSSGGGGGTVSLQDEHRLFDIPVTTSLPDVWLQDFPQAWAETGGLGRAKCQAPIIIDLKPTAVPVSIKQYPMSLEAHMGIRQHIIKFLELGVLRPCRSPWNTPLLPVKKPGTQDYRPVQDLREINKRTVDIHPTVPNPYNLLSTLKPDYSWYTVLDLKDAFFCLPLAPQSQELFAFEWKDPERGISGQLTWTRLPQGFKNSPTLFNEALHRDLTDFRTQHPEVTLLQYVDDLLLAAPTKKACTQGTRHLLQELGEKGYRASAKKAQICQTKVTYLGYILSEGKRWLTPGRIETVARIPPPRNPREVREFLGTAGFCRLWIPGFAELAAPLYALTKPSTPFTWQTEHQLAFEALKKALLSAPALGLPDTSKPFTLFLDERQGIAKGVLTQKLGPWKRPVAYLSKKLDPVAAGWPPCLRIMAATAMLVKDSAKLTLGQPLTVITPHTLEAIVRQPPDRWITNARLTHYQALLLDTDRVQFGPPVTLNPATLLPVPENQPSPHDCRQVLAETHGTREDLKDQELPDADHTWYTDGSSYLDSGTRRAGAAVVDGHNTIWAQSLPPGTSAQKAELIALTKALELSKGKKANIYTDSRYAFATAHTHGSIYERRGWLTSEGKEIKNKAEIIALLKALFLPQEVAIIHCPGHQKGQDPVAVGNRQADRVARQAAMAEVLTLATEPDNTSHITAGKRTADGSEFEKRTADGSEFESPKKKAKVE

SEQ ID NO: 1549 - protein, 2102 aa, synthetic construct
MPAAKRVKLDGGDKKYSIGLDIGTNSVGWAVITDEYKVPSKKFKVLGNTDRHSIKKNLIGALLFDSGETAEATRLKRTARRRYTRRKNRICYLQEIFSNEMAKVDDSFFHRLEESFLVEEDKKHERHPIFGNIVDEVAYHEKYPTIYHLRKKLVDSTDKADLRLIYLALAHMIKFRGHFLIEGDLNPDNSDVDKLFIQLVQTYNQLFEENPINASGVDAKAILSARLSKSRRLENLIAQLPGEKKNGLFGNLIALSLGLTPNFKSNFDLAEDAKLQLSKDTYDDDLDNLLAQIGDQYADLFLAAKNLSDAILLSDILRVNTEITKAPLSASMIKRYDEHHQDLTLLKALVRQQLPEKYKEIFFDQSKNGYAGYIDGGASQEEFYKFIKPILEKMDGTEELLVKLNREDLLRKQRTFDNGSIPHQIHLGELHAILRRQEDFYPFLKDNREKIEKILTFRIPYYVGPLARGNSRFAWMTRKSEETITPWNFEEVVDKGASAQSFIERMTNFDKNLPNEKVLPKHSLLYEYFTVYNELTKVKYVTEGMRKPAFLSGEQKKAIVDLLFKTNRKVTVKQLKEDYFKKIECFDSVEISGVEDRFNASLGTYHDLLKIIKDKDFLDNEENEDILEDIVLTLTLFEDREMIEERLKTYAHLFDDKVMKQLKRRRYTGWGRLSRKLINGIRDKQSGKTILDFLKSDGFANRNFMQLIHDDSLTFKEDIQKAQVSGQGDSLHEHIANLAGSPAIKKGILQTVKVVDELVKVMGRHKPENIVIEMARENQTTQKGQKNSRERMKRIEEGIKELGSQILKEHPVENTQLQNEKLYLYYLQNGRDMYVDQELDINRLSDYDVDHIVPQSFLKDDSIDNKVLTRSDKARGKSDNVPSEEVVKKMKNYWRQLLNAKLITQRKFDNLTKAERGGLSELDKAGFIKRQLVETRQITKHVAQILDSRMNTKYDENDKLIREVKVITLKSKLVSDFRKDFQFYKVREINNYHHAHDAYLNAVVGTALIKKYPKLESEFVYGDYKVYDVRKMIAKSEQEIGKATAKYFFYSNIMNFFKTEITLANGEIRKRPLIETNGETGEIVWDKGRDFATVRKVLSMPQVNIVKKTEVQTGGFSKESILPKRNSDKLIARKKDWDPKKYGGFDSPTVAYSVLVVAKVEKGKSKKLKSVKELLGITIMERSSFEKNPIDFLEAKGYKEVKKDLIIKLPKYSLFELENGRKRMLASAGELQKGNELALPSKYVNFLYLASHYEKLKGSPEDNEQKQLFVEQHKHYLDEIIEQISEFSKRVILADANLDKVLSAYNKHRDKPIREQAENIIHLFTLTNLGAPAAFKYFDTTIDRKRYTSTKEVLDATLIHQSITGLYETRIDLSQLGGDGGGGSGSSEAAAKGGTVSLQDEHRLFDIPVTTSLPDVWLQDFPQAWAETGGLGRAKCQAPIIIDLKPTAVPVSIKQYPMSLEAHMGIRQHIIKFLELGVLRPCRSPWNTPLLPVKKPGTQDYRPVQDLREINKRTVDIHPTVPNPYNLLSTLKPDYSWYTVLDLKDAFFCLPLAPQSQELFAFEWKDPERGISGQLTWTRLPQGFKNSPTLFNEALHRDLTDFRTQHPEVTLLQYVDDLLLAAPTKKACTQGTRHLLQELGEKGYRASAKKAQICQTKVTYLGYILSEGKRWLTPGRIETVARIPPPRNPREVREFLGTAGFCRLWIPGFAELAAPLYALTKPSTPFTWQTEHQLAFEALKKALLSAPALGLPDTSKPFTLFLDERQGIAKGVLTQKLGPWKRPVAYLSKKLDPVAAGWPPCLRIMAATAMLVKDSAKLTLGQPLTVITPHTLEAIVRQPPDRWITNARLTHYQALLLDTDRVQFGPPVTLNPATLLPVPENQPSPHDCRQVLAETHGTREDLKDQELPDADHTWYTDGSSYLDSGTRRAGAAVVDGHNTIWAQSLPPGTSAQKAELIALTKALELSKGKKANIYTDSRYAFATAHTHGSIYERRGWLTSEGKEIKNKAEIIALLKALFLPQEVAIIHCPGHQKGQDPVAVGNRQADRVARQAAMAEVLTLATEPDNTSHITAGKRTADGSEFEKRTADGSEFESPKKKAKVE

SEQ ID NO: 1550 - protein, 2100 aa, synthetic construct
MPAAKRVKLDGGDKKYSIGLDIGTNSVGWAVITDEYKVPSKKFKVLGNTDRHSIKKNLIGALLFDSGETAEATRLKRTARRRYTRRKNRICYLQEIFSNEMAKVDDSFFHRLEESFLVEEDKKHERHPIFGNIVDEVAYHEKYPTIYHLRKKLVDSTDKADLRLIYLALAHMIKFRGHFLIEGDLNPDNSDVDKLFIQLVQTYNQLFEENPINASGVDAKAILSARLSKSRRLENLIAQLPGEKKNGLFGNLIALSLGLTPNFKSNFDLAEDAKLQLSKDTYDDDLDNLLAQIGDQYADLFLAAKNLSDAILLSDILRVNTEITKAPLSASMIKRYDEHHQDLTLLKALVRQQLPEKYKEIFFDQSKNGYAGYIDGGASQEEFYKFIKPILEKMDGTEELLVKLNREDLLRKQRTFDNGSIPHQIHLGELHAILRRQEDFYPFLKDNREKIEKILTFRIPYYVGPLARGNSRFAWMTRKSEETITPWNFEEVVDKGASAQSFIERMTNFDKNLPNEKVLPKHSLLYEYFTVYNELTKVKYVTEGMRKPAFLSGEQKKAIVDLLFKTNRKVTVKQLKEDYFKKIECFDSVEISGVEDRFNASLGTYHDLLKIIKDKDFLDNEENEDILEDIVLTLTLFEDREMIEERLKTYAHLFDDKVMKQLKRRRYTGWGRLSRKLINGIRDKQSGKTILDFLKSDGFANRNFMQLIHDDSLTFKEDIQKAQVSGQGDSLHEHIANLAGSPAIKKGILQTVKVVDELVKVMGRHKPENIVIEMARENQTTQKGQKNSRERMKRIEEGIKELGSQILKEHPVENTQLQNEKLYLYYLQNGRDMYVDQELDINRLSDYDVDHIVPQSFLKDDSIDNKVLTRSDKARGKSDNVPSEEVVKKMKNYWRQLLNAKLITQRKFDNLTKAERGGLSELDKAGFIKRQLVETRQITKHVAQILDSRMNTKYDENDKLIREVKVITLKSKLVSDFRKDFQFYKVREINNYHHAHDAYLNAVVGTALIKKYPKLESEFVYGDYKVYDVRKMIAKSEQEIGKATAKYFFYSNIMNFFKTEITLANGEIRKRPLIETNGETGEIVWDKGRDFATVRKVLSMPQVNIVKKTEVQTGGFSKESILPKRNSDKLIARKKDWDPKKYGGFDSPTVAYSVLVVAKVEKGKSKKLKSVKELLGITIMERSSFEKNPIDFLEAKGYKEVKKDLIIKLPKYSLFELENGRKRMLASAGELQKGNELALPSKYVNFLYLASHYEKLKGSPEDNEQKQLFVEQHKHYLDEIIEQISEFSKRVILADANLDKVLSAYNKHRDKPIREQAENIIHLFTLTNLGAPAAFKYFDTTIDRKRYTSTKEVLDATLIHQSITGLYETRIDLSQLGGDGGGGSGSSGGGGGTVSLQDEHRLFDIPVTTSLPDVWLQDFPQAWAETGGLGRAKCQAPIIIDLKPTAVPVSIKQYPMSLEAHMGIRQHIIKFLELGVLRPCRSPWNTPLLPVKKPGTQDYRPVQDLREINKRTVDIHPTVPNPYNLLSTLKPDYSWYTVLDLKDAFFCLPLAPQSQELFAFEWKDPERGISGQLTWTRLPQGFKNSPTLFNEALHRDLTDFRTQHPEVTLLQYVDDLLLAAPTKKACTQGTRHLLQELGEKGYRASAKKAQICQTKVTYLGYILSEGKRWLTPGRIETVARIPPPRNPREVREFLGTAGFCRLWIPGFAELAAPLYALTKPSTPFTWQTEHQLAFEALKKALLSAPALGLPDTSKPFTLFLDERQGIAKGVLTQKLGPWKRPVAYLSKKLDPVAAGWPPCLRIMAATAMLVKDSAKLTLGQPLTVITPHTLEAIVRQPPDRWITNARLTHYQALLLDTDRVQFGPPVTLNPATLLPVPENQPSPHDCRQVLAETHGTREDLKDQELPDADHTWYTDGSSYLDSGTRRAGAAVVDGHNTIWAQSLPPGTSAQKAELIALTKALELSKGKKANIYTDSRYAFATAHTHGSIYERRGWLTSEGKEIKNKAEIIALLKALFLPQEVAIIHCPGHQKGQDPVAVGNRQADRVARQAAMAEVLTLATEPDNTSHITAGKRTADGSEFEKRTADGSEFESPKKKAKVE

SEQ ID NO: 1551 - protein, 2100 aa, synthetic construct
MPAAKRVKLDGGDKKYSIGLDIGTNSVGWAVITDEYKVPSKKFKVLGNTDRHSIKKNLIGALLFDSGETAEATRLKRTARRRYTRRKNRICYLQEIFSNEMAKVDDSFFHRLEESFLVEEDKKHERHPIFGNIVDEVAYHEKYPTIYHLRKKLVDSTDKADLRLIYLALAHMIKFRGHFLIEGDLNPDNSDVDKLFIQLVQTYNQLFEENPINASGVDAKAILSARLSKSRRLENLIAQLPGEKKNGLFGNLIALSLGLTPNFKSNFDLAEDAKLQLSKDTYDDDLDNLLAQIGDQYADLFLAAKNLSDAILLSDILRVNTEITKAPLSASMIKRYDEHHQDLTLLKALVRQQLPEKYKEIFFDQSKNGYAGYIDGGASQEEFYKFIKPILEKMDGTEELLVKLNREDLLRKQRTFDNGSIPHQIHLGELHAILRRQEDFYPFLKDNREKIEKILTFRIPYYVGPLARGNSRFAWMTRKSEETITPWNFEEVVDKGASAQSFIERMTNFDKNLPNEKVLPKHSLLYEYFTVYNELTKVKYVTEGMRKPAFLSGEQKKAIVDLLFKTNRKVTVKQLKEDYFKKIECFDSVEISGVEDRFNASLGTYHDLLKIIKDKDFLDNEENEDILEDIVLTLTLFEDREMIEERLKTYAHLFDDKVMKQLKRRRYTGWGRLSRKLINGIRDKQSGKTILDFLKSDGFANRNFMQLIHDDSLTFKEDIQKAQVSGQGDSLHEHIANLAGSPAIKKGILQTVKVVDELVKVMGRHKPENIVIEMARENQTTQKGQKNSRERMKRIEEGIKELGSQILKEHPVENTQLQNEKLYLYYLQNGRDMYVDQELDINRLSDYDVDHIVPQSFLKDDSIDNKVLTRSDKARGKSDNVPSEEVVKKMKNYWRQLLNAKLITQRKFDNLTKAERGGLSELDKAGFIKRQLVETRQITKHVAQILDSRMNTKYDENDKLIREVKVITLKSKLVSDFRKDFQFYKVREINNYHHAHDAYLNAVVGTALIKKYPKLESEFVYGDYKVYDVRKMIAKSEQEIGKATAKYFFYSNIMNFFKTEITLANGEIRKRPLIETNGETGEIVWDKGRDFATVRKVLSMPQVNIVKKTEVQTGGFSKESILPKRNSDKLIARKKDWDPKKYGGFDSPTVAYSVLVVAKVEKGKSKKLKSVKELLGITIMERSSFEKNPIDFLEAKGYKEVKKDLIIKLPKYSLFELENGRKRMLASAGELQKGNELALPSKYVNFLYLASHYEKLKGSPEDNEQKQLFVEQHKHYLDEIIEQISEFSKRVILADANLDKVLSAYNKHRDKPIREQAENIIHLFTLTNLGAPAAFKYFDTTIDRKRYTSTKEVLDATLIHQSITGLYETRIDLSQLGGDGGGGSGSSPAPGGTVSLQDEHRLFDIPVTTSLPDVWLQDFPQAWAETGGLGRAKCQAPIIIDLKPTAVPVSIKQYPMSLEAHMGIRQHIIKFLELGVLRPCRSPWNTPLLPVKKPGTQDYRPVQDLREINKRTVDIHPTVPNPYNLLSTLKPDYSWYTVLDLKDAFFCLPLAPQSQELFAFEWKDPERGISGQLTWTRLPQGFKNSPTLFNEALHRDLTDFRTQHPEVTLLQYVDDLLLAAPTKKACTQGTRHLLQELGEKGYRASAKKAQICQTKVTYLGYILSEGKRWLTPGRIETVARIPPPRNPREVREFLGTAGFCRLWIPGFAELAAPLYALTKPSTPFTWQTEHQLAFEALKKALLSAPALGLPDTSKPFTLFLDERQGIAKGVLTQKLGPWKRPVAYLSKKLDPVAAGWPPCLRIMAATAMLVKDSAKLTLGQPLTVITPHTLEAIVRQPPDRWITNARLTHYQALLLDTDRVQFGPPVTLNPATLLPVPENQPSPHDCRQVLAETHGTREDLKDQELPDADHTWYTDGSSYLDSGTRRAGAAVVDGHNTIWAQSLPPGTSAQKAELIALTKALELSKGKKANIYTDSRYAFATAHTHGSIYERRGWLTSEGKEIKNKAEIIALLKALFLPQEVAIIHCPGHQKGQDPVAVGNRQADRVARQAAMAEVLTLATEPDNTSHITAGKRTADGSEFEKRTADGSEFESPKKKAKVE

SEQ ID NO: 1552 - protein, 2111 aa, synthetic construct
MPAAKRVKLDGGDKKYSIGLDIGTNSVGWAVITDEYKVPSKKFKVLGNTDRHSIKKNLIGALLFDSGETAEATRLKRTARRRYTRRKNRICYLQEIFSNEMAKVDDSFFHRLEESFLVEEDKKHERHPIFGNIVDEVAYHEKYPTIYHLRKKLVDSTDKADLRLIYLALAHMIKFRGHFLIEGDLNPDNSDVDKLFIQLVQTYNQLFEENPINASGVDAKAILSARLSKSRRLENLIAQLPGEKKNGLFGNLIALSLGLTPNFKSNFDLAEDAKLQLSKDTYDDDLDNLLAQIGDQYADLFLAAKNLSDAILLSDILRVNTEITKAPLSASMIKRYDEHHQDLTLLKALVRQQLPEKYKEIFFDQSKNGYAGYIDGGASQEEFYKFIKPILEKMDGTEELLVKLNREDLLRKQRTFDNGSIPHQIHLGELHAILRRQEDFYPFLKDNREKIEKILTFRIPYYVGPLARGNSRFAWMTRKSEETITPWNFEEVVDKGASAQSFIERMTNFDKNLPNEKVLPKHSLLYEYFTVYNELTKVKYVTEGMRKPAFLSGEQKKAIVDLLFKTNRKVTVKQLKEDYFKKIECFDSVEISGVEDRFNASLGTYHDLLKIIKDKDFLDNEENEDILEDIVLTLTLFEDREMIEERLKTYAHLFDDKVMKQLKRRRYTGWGRLSRKLINGIRDKQSGKTILDFLKSDGFANRNFMQLIHDDSLTFKEDIQKAQVSGQGDSLHEHIANLAGSPAIKKGILQTVKVVDELVKVMGRHKPENIVIEMARENQTTQKGQKNSRERMKRIEEGIKELGSQILKEHPVENTQLQNEKLYLYYLQNGRDMYVDQELDINRLSDYDVDHIVPQSFLKDDSIDNKVLTRSDKARGKSDNVPSEEVVKKMKNYWRQLLNAKLITQRKFDNLTKAERGGLSELDKAGFIKRQLVETRQITKHVAQILDSRMNTKYDENDKLIREVKVITLKSKLVSDFRKDFQFYKVREINNYHHAHDAYLNAVVGTALIKKYPKLESEFVYGDYKVYDVRKMIAKSEQEIGKATAKYFFYSNIMNFFKTEITLANGEIRKRPLIETNGETGEIVWDKGRDFATVRKVLSMPQVNIVKKTEVQTGGFSKESILPKRNSDKLIARKKDWDPKKYGGFDSPTVAYSVLVVAKVEKGKSKKLKSVKELLGITIMERSSFEKNPIDFLEAKGYKEVKKDLIIKLPKYSLFELENGRKRMLASAGELQKGNELALPSKYVNFLYLASHYEKLKGSPEDNEQKQLFVEQHKHYLDEIIEQISEFSKRVILADANLDKVLSAYNKHRDKPIREQAENIIHLFTLTNLGAPAAFKYFDTTIDRKRYTSTKEVLDATLIHQSITGLYETRIDLSQLGGDGGGGGGSGGGGSGGGGSGGGGSGGTVSLQDEHRLFDIPVTTSLPDVWLQDFPQAWAETGGLGRAKCQAPIIIDLKPTAVPVSIKQYPMSLEAHMGIRQHIIKFLELGVLRPCRSPWNTPLLPVKKPGTQDYRPVQDLREINKRTVDIHPTVPNPYNLLSTLKPDYSWYTVLDLKDAFFCLPLAPQSQELFAFEWKDPERGISGQLTWTRLPQGFKNSPTLFNEALHRDLTDFRTQHPEVTLLQYVDDLLLAAPTKKACTQGTRHLLQELGEKGYRASAKKAQICQTKVTYLGYILSEGKRWLTPGRIETVARIPPPRNPREVREFLGTAGFCRLWIPGFAELAAPLYALTKPSTPFTWQTEHQLAFEALKKALLSAPALGLPDTSKPFTLFLDERQGIAKGVLTQKLGPWKRPVAYLSKKLDPVAAGWPPCLRIMAATAMLVKDSAKLTLGQPLTVITPHTLEAIVRQPPDRWITNARLTHYQALLLDTDRVQFGPPVTLNPATLLPVPENQPSPHDCRQVLAETHGTREDLKDQELPDADHTWYTDGSSYLDSGTRRAGAAVVDGHNTIWAQSLPPGTSAQKAELIALTKALELSKGKKANIYTDSRYAFATAHTHGSIYERRGWLTSEGKEIKNKAEIIALLKALFLPQEVAIIHCPGHQKGQDPVAVGNRQADRVARQAAMAEVLTLATEPDNTSHITAGKRTADGSEFEKRTADGSEFESPKKKAKVE

SEQ ID NO: 1553 - protein, 2106 aa, synthetic construct
MPAAKRVKLDGGDKKYSIGLDIGTNSVGWAVITDEYKVPSKKFKVLGNTDRHSIKKNLIGALLFDSGETAEATRLKRTARRRYTRRKNRICYLQEIFSNEMAKVDDSFFHRLEESFLVEEDKKHERHPIFGNIVDEVAYHEKYPTIYHLRKKLVDSTDKADLRLIYLALAHMIKFRGHFLIEGDLNPDNSDVDKLFIQLVQTYNQLFEENPINASGVDAKAILSARLSKSRRLENLIAQLPGEKKNGLFGNLIALSLGLTPNFKSNFDLAEDAKLQLSKDTYDDDLDNLLAQIGDQYADLFLAAKNLSDAILLSDILRVNTEITKAPLSASMIKRYDEHHQDLTLLKALVRQQLPEKYKEIFFDQSKNGYAGYIDGGASQEEFYKFIKPILEKMDGTEELLVKLNREDLLRKQRTFDNGSIPHQIHLGELHAILRRQEDFYPFLKDNREKIEKILTFRIPYYVGPLARGNSRFAWMTRKSEETITPWNFEEVVDKGASAQSFIERMTNFDKNLPNEKVLPKHSLLYEYFTVYNELTKVKYVTEGMRKPAFLSGEQKKAIVDLLFKTNRKVTVKQLKEDYFKKIECFDSVEISGVEDRFNASLGTYHDLLKIIKDKDFLDNEENEDILEDIVLTLTLFEDREMIEERLKTYAHLFDDKVMKQLKRRRYTGWGRLSRKLINGIRDKQSGKTILDFLKSDGFANRNFMQLIHDDSLTFKEDIQKAQVSGQGDSLHEHIANLAGSPAIKKGILQTVKVVDELVKVMGRHKPENIVIEMARENQTTQKGQKNSRERMKRIEEGIKELGSQILKEHPVENTQLQNEKLYLYYLQNGRDMYVDQELDINRLSDYDVDHIVPQSFLKDDSIDNKVLTRSDKARGKSDNVPSEEVVKKMKNYWRQLLNAKLITQRKFDNLTKAERGGLSELDKAGFIKRQLVETRQITKHVAQILDSRMNTKYDENDKLIREVKVITLKSKLVSDFRKDFQFYKVREINNYHHAHDAYLNAVVGTALIKKYPKLESEFVYGDYKVYDVRKMIAKSEQEIGKATAKYFFYSNIMNFFKTEITLANGEIRKRPLIETNGETGEIVWDKGRDFATVRKVLSMPQVNIVKKTEVQTGGFSKESILPKRNSDKLIARKKDWDPKKYGGFDSPTVAYSVLVVAKVEKGKSKKLKSVKELLGITIMERSSFEKNPIDFLEAKGYKEVKKDLIIKLPKYSLFELENGRKRMLASAGELQKGNELALPSKYVNFLYLASHYEKLKGSPEDNEQKQLFVEQHKHYLDEIIEQISEFSKRVILADANLDKVLSAYNKHRDKPIREQAENIIHLFTLTNLGAPAAFKYFDTTIDRKRYTSTKEVLDATLIHQSITGLYETRIDLSQLGGDGGGSSGSSGSSGSSGSSGGTVSLQDEHRLFDIPVTTSLPDVWLQDFPQAWAETGGLGRAKCQAPIIIDLKPTAVPVSIKQYPMSLEAHMGIRQHIIKFLELGVLRPCRSPWNTPLLPVKKPGTQDYRPVQDLREINKRTVDIHPTVPNPYNLLSTLKPDYSWYTVLDLKDAFFCLPLAPQSQELFAFEWKDPERGISGQLTWTRLPQGFKNSPTLFNEALHRDLTDFRTQHPEVTLLQYVDDLLLAAPTKKACTQGTRHLLQELGEKGYRASAKKAQICQTKVTYLGYILSEGKRWLTPGRIETVARIPPPRNPREVREFLGTAGFCRLWIPGFAELAAPLYALTKPSTPFTWQTEHQLAFEALKKALLSAPALGLPDTSKPFTLFLDERQGIAKGVLTQKLGPWKRPVAYLSKKLDPVAAGWPPCLRIMAATAMLVKDSAKLTLGQPLTVITPHTLEAIVRQPPDRWITNARLTHYQALLLDTDRVQFGPPVTLNPATLLPVPENQPSPHDCRQVLAETHGTREDLKDQELPDADHTWYTDGSSYLDSGTRRAGAAVVDGHNTIWAQSLPPGTSAQKAELIALTKALELSKGKKANIYTDSRYAFATAHTHGSIYERRGWLTSEGKEIKNKAEIIALLKALFLPQEVAIIHCPGHQKGQDPVAVGNRQADRVARQAAMAEVLTLATEPDNTSHITAGKRTADGSEFEKRTADGSEFESPKKKAKVE

SEQ ID NO: 1554 - protein, 2097 aa, synthetic construct
MPAAKRVKLDGGDKKYSIGLDIGTNSVGWAVITDEYKVPSKKFKVLGNTDRHSIKKNLIGALLFDSGETAEATRLKRTARRRYTRRKNRICYLQEIFSNEMAKVDDSFFHRLEESFLVEEDKKHERHPIFGNIVDEVAYHEKYPTIYHLRKKLVDSTDKADLRLIYLALAHMIKFRGHFLIEGDLNPDNSDVDKLFIQLVQTYNQLFEENPINASGVDAKAILSARLSKSRRLENLIAQLPGEKKNGLFGNLIALSLGLTPNFKSNFDLAEDAKLQLSKDTYDDDLDNLLAQIGDQYADLFLAAKNLSDAILLSDILRVNTEITKAPLSASMIKRYDEHHQDLTLLKALVRQQLPEKYKEIFFDQSKNGYAGYIDGGASQEEFYKFIKPILEKMDGTEELLVKLNREDLLRKQRTFDNGSIPHQIHLGELHAILRRQEDFYPFLKDNREKIEKILTFRIPYYVGPLARGNSRFAWMTRKSEETITPWNFEEVVDKGASAQSFIERMTNFDKNLPNEKVLPKHSLLYEYFTVYNELTKVKYVTEGMRKPAFLSGEQKKAIVDLLFKTNRKVTVKQLKEDYFKKIECFDSVEISGVEDRFNASLGTYHDLLKIIKDKDFLDNEENEDILEDIVLTLTLFEDREMIEERLKTYAHLFDDKVMKQLKRRRYTGWGRLSRKLINGIRDKQSGKTILDFLKSDGFANRNFMQLIHDDSLTFKEDIQKAQVSGQGDSLHEHIANLAGSPAIKKGILQTVKVVDELVKVMGRHKPENIVIEMARENQTTQKGQKNSRERMKRIEEGIKELGSQILKEHPVENTQLQNEKLYLYYLQNGRDMYVDQELDINRLSDYDVDHIVPQSFLKDDSIDNKVLTRSDKARGKSDNVPSEEVVKKMKNYWRQLLNAKLITQRKFDNLTKAERGGLSELDKAGFIKRQLVETRQITKHVAQILDSRMNTKYDENDKLIREVKVITLKSKLVSDFRKDFQFYKVREINNYHHAHDAYLNAVVGTALIKKYPKLESEFVYGDYKVYDVRKMIAKSEQEIGKATAKYFFYSNIMNFFKTEITLANGEIRKRPLIETNGETGEIVWDKGRDFATVRKVLSMPQVNIVKKTEVQTGGFSKESILPKRNSDKLIARKKDWDPKKYGGFDSPTVAYSVLVVAKVEKGKSKKLKSVKELLGITIMERSSFEKNPIDFLEAKGYKEVKKDLIIKLPKYSLFELENGRKRMLASAGELQKGNELALPSKYVNFLYLASHYEKLKGSPEDNEQKQLFVEQHKHYLDEIIEQISEFSKRVILADANLDKVLSAYNKHRDKPIREQAENIIHLFTLTNLGAPAAFKYFDTTIDRKRYTSTKEVLDATLIHQSITGLYETRIDLSQLGGDGGPAPGGSGGTVSLQDEHRLFDIPVTTSLPDVWLQDFPQAWAETGGLGRAKCQAPIIIDLKPTAVPVSIKQYPMSLEAHMGIRQHIIKFLELGVLRPCRSPWNTPLLPVKKPGTQDYRPVQDLREINKRTVDIHPTVPNPYNLLSTLKPDYSWYTVLDLKDAFFCLPLAPQSQELFAFEWKDPERGISGQLTWTRLPQGFKNSPTLFNEALHRDLTDFRTQHPEVTLLQYVDDLLLAAPTKKACTQGTRHLLQELGEKGYRASAKKAQICQTKVTYLGYILSEGKRWLTPGRIETVARIPPPRNPREVREFLGTAGFCRLWIPGFAELAAPLYALTKPSTPFTWQTEHQLAFEALKKALLSAPALGLPDTSKPFTLFLDERQGIAKGVLTQKLGPWKRPVAYLSKKLDPVAAGWPPCLRIMAATAMLVKDSAKLTLGQPLTVITPHTLEAIVRQPPDRWITNARLTHYQALLLDTDRVQFGPPVTLNPATLLPVPENQPSPHDCRQVLAETHGTREDLKDQELPDADHTWYTDGSSYLDSGTRRAGAAVVDGHNTIWAQSLPPGTSAQKAELIALTKALELSKGKKANIYTDSRYAFATAHTHGSIYERRGWLTSEGKEIKNKAEIIALLKALFLPQEVAIIHCPGHQKGQDPVAVGNRQADRVARQAAMAEVLTLATEPDNTSHITAGKRTADGSEFEKRTADGSEFESPKKKAKVE

SEQ ID NO: 1555 - protein, 2102 aa, synthetic construct
MPAAKRVKLDGGDKKYSIGLDIGTNSVGWAVITDEYKVPSKKFKVLGNTDRHSIKKNLIGALLFDSGETAEATRLKRTARRRYTRRKNRICYLQEIFSNEMAKVDDSFFHRLEESFLVEEDKKHERHPIFGNIVDEVAYHEKYPTIYHLRKKLVDSTDKADLRLIYLALAHMIKFRGHFLIEGDLNPDNSDVDKLFIQLVQTYNQLFEENPINASGVDAKAILSARLSKSRRLENLIAQLPGEKKNGLFGNLIALSLGLTPNFKSNFDLAEDAKLQLSKDTYDDDLDNLLAQIGDQYADLFLAAKNLSDAILLSDILRVNTEITKAPLSASMIKRYDEHHQDLTLLKALVRQQLPEKYKEIFFDQSKNGYAGYIDGGASQEEFYKFIKPILEKMDGTEELLVKLNREDLLRKQRTFDNGSIPHQIHLGELHAILRRQEDFYPFLKDNREKIEKILTFRIPYYVGPLARGNSRFAWMTRKSEETITPWNFEEVVDKGASAQSFIERMTNFDKNLPNEKVLPKHSLLYEYFTVYNELTKVKYVTEGMRKPAFLSGEQKKAIVDLLFKTNRKVTVKQLKEDYFKKIECFDSVEISGVEDRFNASLGTYHDLLKIIKDKDFLDNEENEDILEDIVLTLTLFEDREMIEERLKTYAHLFDDKVMKQLKRRRYTGWGRLSRKLINGIRDKQSGKTILDFLKSDGFANRNFMQLIHDDSLTFKEDIQKAQVSGQGDSLHEHIANLAGSPAIKKGILQTVKVVDELVKVMGRHKPENIVIEMARENQTTQKGQKNSRERMKRIEEGIKELGSQILKEHPVENTQLQNEKLYLYYLQNGRDMYVDQELDINRLSDYDVDHIVPQSFLKDDSIDNKVLTRSDKARGKSDNVPSEEVVKKMKNYWRQLLNAKLITQRKFDNLTKAERGGLSELDKAGFIKRQLVETRQITKHVAQILDSRMNTKYDENDKLIREVKVITLKSKLVSDFRKDFQFYKVREINNYHHAHDAYLNAVVGTALIKKYPKLESEFVYGDYKVYDVRKMIAKSEQEIGKATAKYFFYSNIMNFFKTEITLANGEIRKRPLIETNGETGEIVWDKGRDFATVRKVLSMPQVNIVKKTEVQTGGFSKESILPKRNSDKLIARKKDWDPKKYGGFDSPTVAYSVLVVAKVEKGKSKKLKSVKELLGITIMERSSFEKNPIDFLEAKGYKEVKKDLIIKLPKYSLFELENGRKRMLASAGELQKGNELALPSKYVNFLYLASHYEKLKGSPEDNEQKQLFVEQHKHYLDEIIEQISEFSKRVILADANLDKVLSAYNKHRDKPIREQAENIIHLFTLTNLGAPAAFKYFDTTIDRKRYTSTKEVLDATLIHQSITGLYETRIDLSQLGGDGGPAPGGSEAAAKGGTVSLQDEHRLFDIPVTTSLPDVWLQDFPQAWAETGGLGRAKCQAPIIIDLKPTAVPVSIKQYPMSLEAHMGIRQHIIKFLELGVLRPCRSPWNTPLLPVKKPGTQDYRPVQDLREINKRTVDIHPTVPNPYNLLSTLKPDYSWYTVLDLKDAFFCLPLAPQSQELFAFEWKDPERGISGQLTWTRLPQGFKNSPTLFNEALHRDLTDFRTQHPEVTLLQYVDDLLLAAPTKKACTQGTRHLLQELGEKGYRASAKKAQICQTKVTYLGYILSEGKRWLTPGRIETVARIPPPRNPREVREFLGTAGFCRLWIPGFAELAAPLYALTKPSTPFTWQTEHQLAFEALKKALLSAPALGLPDTSKPFTLFLDERQGIAKGVLTQKLGPWKRPVAYLSKKLDPVAAGWPPCLRIMAATAMLVKDSAKLTLGQPLTVITPHTLEAIVRQPPDRWITNARLTHYQALLLDTDRVQFGPPVTLNPATLLPVPENQPSPHDCRQVLAETHGTREDLKDQELPDADHTWYTDGSSYLDSGTRRAGAAVVDGHNTIWAQSLPPGTSAQKAELIALTKALELSKGKKANIYTDSRYAFATAHTHGSIYERRGWLTSEGKEIKNKAEIIALLKALFLPQEVAIIHCPGHQKGQDPVAVGNRQADRVARQAAMAEVLTLATEPDNTSHITAGKRTADGSEFEKRTADGSEFESPKKKAKVE

SEQ ID NO: 1556 - protein, 2097 aa, synthetic construct
MPAAKRVKLDGGDKKYSIGLDIGTNSVGWAVITDEYKVPSKKFKVLGNTDRHSIKKNLIGALLFDSGETAEATRLKRTARRRYTRRKNRICYLQEIFSNEMAKVDDSFFHRLEESFLVEEDKKHERHPIFGNIVDEVAYHEKYPTIYHLRKKLVDSTDKADLRLIYLALAHMIKFRGHFLIEGDLNPDNSDVDKLFIQLVQTYNQLFEENPINASGVDAKAILSARLSKSRRLENLIAQLPGEKKNGLFGNLIALSLGLTPNFKSNFDLAEDAKLQLSKDTYDDDLDNLLAQIGDQYADLFLAAKNLSDAILLSDILRVNTEITKAPLSASMIKRYDEHHQDLTLLKALVRQQLPEKYKEIFFDQSKNGYAGYIDGGASQEEFYKFIKPILEKMDGTEELLVKLNREDLLRKQRTFDNGSIPHQIHLGELHAILRRQEDFYPFLKDNREKIEKILTFRIPYYVGPLARGNSRFAWMTRKSEETITPWNFEEVVDKGASAQSFIERMTNFDKNLPNEKVLPKHSLLYEYFTVYNELTKVKYVTEGMRKPAFLSGEQKKAIVDLLFKTNRKVTVKQLKEDYFKKIECFDSVEISGVEDRFNASLGTYHDLLKIIKDKDFLDNEENEDILEDIVLTLTLFEDREMIEERLKTYAHLFDDKVMKQLKRRRYTGWGRLSRKLINGIRDKQSGKTILDFLKSDGFANRNFMQLIHDDSLTFKEDIQKAQVSGQGDSLHEHIANLAGSPAIKKGILQTVKVVDELVKVMGRHKPENIVIEMARENQTTQKGQKNSRERMKRIEEGIKELGSQILKEHPVENTQLQNEKLYLYYLQNGRDMYVDQELDINRLSDYDVDHIVPQSFLKDDSIDNKVLTRSDKARGKSDNVPSEEVVKKMKNYWRQLLNAKLITQRKFDNLTKAERGGLSELDKAGFIKRQLVETRQITKHVAQILDSRMNTKYDENDKLIREVKVITLKSKLVSDFRKDFQFYKVREINNYHHAHDAYLNAVVGTALIKKYPKLESEFVYGDYKVYDVRKMIAKSEQEIGKATAKYFFYSNIMNFFKTEITLANGEIRKRPLIETNGETGEIVWDKGRDFATVRKVLSMPQVNIVKKTEVQTGGFSKESILPKRNSDKLIARKKDWDPKKYGGFDSPTVAYSVLVVAKVEKGKSKKLKSVKELLGITIMERSSFEKNPIDFLEAKGYKEVKKDLIIKLPKYSLFELENGRKRMLASAGELQKGNELALPSKYVNFLYLASHYEKLKGSPEDNEQKQLFVEQHKHYLDEIIEQISEFSKRVILADANLDKVLSAYNKHRDKPIREQAENIIHLFTLTNLGAPAAFKYFDTTIDRKRYTSTKEVLDATLIHQSITGLYETRIDLSQLGGDGGGGSGGSGGTVSLQDEHRLFDIPVTTSLPDVWLQDFPQAWAETGGLGRAKCQAPIIIDLKPTAVPVSIKQYPMSLEAHMGIRQHIIKFLELGVLRPCRSPWNTPLLPVKKPGTQDYRPVQDLREINKRTVDIHPTVPNPYNLLSTLKPDYSWYTVLDLKDAFFCLPLAPQSQELFAFEWKDPERGISGQLTWTRLPQGFKNSPTLFNEALHRDLTDFRTQHPEVTLLQYVDDLLLAAPTKKACTQGTRHLLQELGEKGYRASAKKAQICQTKVTYLGYILSEGKRWLTPGRIETVARIPPPRNPREVREFLGTAGFCRLWIPGFAELAAPLYALTKPSTPFTWQTEHQLAFEALKKALLSAPALGLPDTSKPFTLFLDERQGIAKGVLTQKLGPWKRPVAYLSKKLDPVAAGWPPCLRIMAATAMLVKDSAKLTLGQPLTVITPHTLEAIVRQPPDRWITNARLTHYQALLLDTDRVQFGPPVTLNPATLLPVPENQPSPHDCRQVLAETHGTREDLKDQELPDADHTWYTDGSSYLDSGTRRAGAAVVDGHNTIWAQSLPPGTSAQKAELIALTKALELSKGKKANIYTDSRYAFATAHTHGSIYERRGWLTSEGKEIKNKAEIIALLKALFLPQEVAIIHCPGHQKGQDPVAVGNRQADRVARQAAMAEVLTLATEPDNTSHITAGKRTADGSEFEKRTADGSEFESPKKKAKVE

SEQ ID NO: 1557 - protein, 2099 aa, synthetic construct
MPAAKRVKLDGGDKKYSIGLDIGTNSVGWAVITDEYKVPSKKFKVLGNTDRHSIKKNLIGALLFDSGETAEATRLKRTARRRYTRRKNRICYLQEIFSNEMAKVDDSFFHRLEESFLVEEDKKHERHPIFGNIVDEVAYHEKYPTIYHLRKKLVDSTDKADLRLIYLALAHMIKFRGHFLIEGDLNPDNSDVDKLFIQLVQTYNQLFEENPINASGVDAKAILSARLSKSRRLENLIAQLPGEKKNGLFGNLIALSLGLTPNFKSNFDLAEDAKLQLSKDTYDDDLDNLLAQIGDQYADLFLAAKNLSDAILLSDILRVNTEITKAPLSASMIKRYDEHHQDLTLLKALVRQQLPEKYKEIFFDQSKNGYAGYIDGGASQEEFYKFIKPILEKMDGTEELLVKLNREDLLRKQRTFDNGSIPHQIHLGELHAILRRQEDFYPFLKDNREKIEKILTFRIPYYVGPLARGNSRFAWMTRKSEETITPWNFEEVVDKGASAQSFIERMTNFDKNLPNEKVLPKHSLLYEYFTVYNELTKVKYVTEGMRKPAFLSGEQKKAIVDLLFKTNRKVTVKQLKEDYFKKIECFDSVEISGVEDRFNASLGTYHDLLKIIKDKDFLDNEENEDILEDIVLTLTLFEDREMIEERLKTYAHLFDDKVMKQLKRRRYTGWGRLSRKLINGIRDKQSGKTILDFLKSDGFANRNFMQLIHDDSLTFKEDIQKAQVSGQGDSLHEHIANLAGSPAIKKGILQTVKVVDELVKVMGRHKPENIVIEMARENQTTQKGQKNSRERMKRIEEGIKELGSQILKEHPVENTQLQNEKLYLYYLQNGRDMYVDQELDINRLSDYDVDHIVPQSFLKDDSIDNKVLTRSDKARGKSDNVPSEEVVKKMKNYWRQLLNAKLITQRKFDNLTKAERGGLSELDKAGFIKRQLVETRQITKHVAQILDSRMNTKYDENDKLIREVKVITLKSKLVSDFRKDFQFYKVREINNYHHAHDAYLNAVVGTALIKKYPKLESEFVYGDYKVYDVRKMIAKSEQEIGKATAKYFFYSNIMNFFKTEITLANGEIRKRPLIETNGETGEIVWDKGRDFATVRKVLSMPQVNIVKKTEVQTGGFSKESILPKRNSDKLIARKKDWDPKKYGGFDSPTVAYSVLVVAKVEKGKSKKLKSVKELLGITIMERSSFEKNPIDFLEAKGYKEVKKDLIIKLPKYSLFELENGRKRMLASAGELQKGNELALPSKYVNFLYLASHYEKLKGSPEDNEQKQLFVEQHKHYLDEIIEQISEFSKRVILADANLDKVLSAYNKHRDKPIREQAENIIHLFTLTNLGAPAAFKYFDTTIDRKRYTSTKEVLDATLIHQSITGLYETRIDLSQLGGDGGEAAAKGGSGGTVSLQDEHRLFDIPVTTSLPDVWLQDFPQAWAETGGLGRAKCQAPIIIDLKPTAVPVSIKQYPMSLEAHMGIRQHIIKFLELGVLRPCRSPWNTPLLPVKKPGTQDYRPVQDLREINKRTVDIHPTVPNPYNLLSTLKPDYSWYTVLDLKDAFFCLPLAPQSQELFAFEWKDPERGISGQLTWTRLPQGFKNSPTLFNEALHRDLTDFRTQHPEVTLLQYVDDLLLAAPTKKACTQGTRHLLQELGEKGYRASAKKAQICQTKVTYLGYILSEGKRWLTPGRIETVARIPPPRNPREVREFLGTAGFCRLWIPGFAELAAPLYALTKPSTPFTWQTEHQLAFEALKKALLSAPALGLPDTSKPFTLFLDERQGIAKGVLTQKLGPWKRPVAYLSKKLDPVAAGWPPCLRIMAATAMLVKDSAKLTLGQPLTVITPHTLEAIVRQPPDRWITNARLTHYQALLLDTDRVQFGPPVTLNPATLLPVPENQPSPHDCRQVLAETHGTREDLKDQELPDADHTWYTDGSSYLDSGTRRAGAAVVDGHNTIWAQSLPPGTSAQKAELIALTKALELSKGKKANIYTDSRYAFATAHTHGSIYERRGWLTSEGKEIKNKAEIIALLKALFLPQEVAIIHCPGHQKGQDPVAVGNRQADRVARQAAMAEVLTLATEPDNTSHITAGKRTADGSEFEKRTADGSEFESPKKKAKVE

SEQ ID NO: 1558 - protein, 2097 aa, synthetic construct
MPAAKRVKLDGGDKKYSIGLDIGTNSVGWAVITDEYKVPSKKFKVLGNTDRHSIKKNLIGALLFDSGETAEATRLKRTARRRYTRRKNRICYLQEIFSNEMAKVDDSFFHRLEESFLVEEDKKHERHPIFGNIVDEVAYHEKYPTIYHLRKKLVDSTDKADLRLIYLALAHMIKFRGHFLIEGDLNPDNSDVDKLFIQLVQTYNQLFEENPINASGVDAKAILSARLSKSRRLENLIAQLPGEKKNGLFGNLIALSLGLTPNFKSNFDLAEDAKLQLSKDTYDDDLDNLLAQIGDQYADLFLAAKNLSDAILLSDILRVNTEITKAPLSASMIKRYDEHHQDLTLLKALVRQQLPEKYKEIFFDQSKNGYAGYIDGGASQEEFYKFIKPILEKMDGTEELLVKLNREDLLRKQRTFDNGSIPHQIHLGELHAILRRQEDFYPFLKDNREKIEKILTFRIPYYVGPLARGNSRFAWMTRKSEETITPWNFEEVVDKGASAQSFIERMTNFDKNLPNEKVLPKHSLLYEYFTVYNELTKVKYVTEGMRKPAFLSGEQKKAIVDLLFKTNRKVTVKQLKEDYFKKIECFDSVEISGVEDRFNASLGTYHDLLKIIKDKDFLDNEENEDILEDIVLTLTLFEDREMIEERLKTYAHLFDDKVMKQLKRRRYTGWGRLSRKLINGIRDKQSGKTILDFLKSDGFANRNFMQLIHDDSLTFKEDIQKAQVSGQGDSLHEHIANLAGSPAIKKGILQTVKVVDELVKVMGRHKPENIVIEMARENQTTQKGQKNSRERMKRIEEGIKELGSQILKEHPVENTQLQNEKLYLYYLQNGRDMYVDQELDINRLSDYDVDHIVPQSFLKDDSIDNKVLTRSDKARGKSDNVPSEEVVKKMKNYWRQLLNAKLITQRKFDNLTKAERGGLSELDKAGFIKRQLVETRQITKHVAQILDSRMNTKYDENDKLIREVKVITLKSKLVSDFRKDFQFYKVREINNYHHAHDAYLNAVVGTALIKKYPKLESEFVYGDYKVYDVRKMIAKSEQEIGKATAKYFFYSNIMNFFKTEITLANGEIRKRPLIETNGETGEIVWDKGRDFATVRKVLSMPQVNIVKKTEVQTGGFSKESILPKRNSDKLIARKKDWDPKKYGGFDSPTVAYSVLVVAKVEKGKSKKLKSVKELLGITIMERSSFEKNPIDFLEAKGYKEVKKDLIIKLPKYSLFELENGRKRMLASAGELQKGNELALPSKYVNFLYLASHYEKLKGSPEDNEQKQLFVEQHKHYLDEIIEQISEFSKRVILADANLDKVLSAYNKHRDKPIREQAENIIHLFTLTNLGAPAAFKYFDTTIDRKRYTSTKEVLDATLIHQSITGLYETRIDLSQLGGDGGPAPGSSGGTVSLQDEHRLFDIPVTTSLPDVWLQDFPQAWAETGGLGRAKCQAPIIIDLKPTAVPVSIKQYPMSLEAHMGIRQHIIKFLELGVLRPCRSPWNTPLLPVKKPGTQDYRPVQDLREINKRTVDIHPTVPNPYNLLSTLKPDYSWYTVLDLKDAFFCLPLAPQSQELFAFEWKDPERGISGQLTWTRLPQGFKNSPTLFNEALHRDLTDFRTQHPEVTLLQYVDDLLLAAPTKKACTQGTRHLLQELGEKGYRASAKKAQICQTKVTYLGYILSEGKRWLTPGRIETVARIPPPRNPREVREFLGTAGFCRLWIPGFAELAAPLYALTKPSTPFTWQTEHQLAFEALKKALLSAPALGLPDTSKPFTLFLDERQGIAKGVLTQKLGPWKRPVAYLSKKLDPVAAGWPPCLRIMAATAMLVKDSAKLTLGQPLTVITPHTLEAIVRQPPDRWITNARLTHYQALLLDTDRVQFGPPVTLNPATLLPVPENQPSPHDCRQVLAETHGTREDLKDQELPDADHTWYTDGSSYLDSGTRRAGAAVVDGHNTIWAQSLPPGTSAQKAELIALTKALELSKGKKANIYTDSRYAFATAHTHGSIYERRGWLTSEGKEIKNKAEIIALLKALFLPQEVAIIHCPGHQKGQDPVAVGNRQADRVARQAAMAEVLTLATEPDNTSHITAGKRTADGSEFEKRTADGSEFESPKKKAKVE

SEQ ID NO: 1559 - protein, 2096 aa, synthetic construct
MPAAKRVKLDGGDKKYSIGLDIGTNSVGWAVITDEYKVPSKKFKVLGNTDRHSIKKNLIGALLFDSGETAEATRLKRTARRRYTRRKNRICYLQEIFSNEMAKVDDSFFHRLEESFLVEEDKKHERHPIFGNIVDEVAYHEKYPTIYHLRKKLVDSTDKADLRLIYLALAHMIKFRGHFLIEGDLNPDNSDVDKLFIQLVQTYNQLFEENPINASGVDAKAILSARLSKSRRLENLIAQLPGEKKNGLFGNLIALSLGLTPNFKSNFDLAEDAKLQLSKDTYDDDLDNLLAQIGDQYADLFLAAKNLSDAILLSDILRVNTEITKAPLSASMIKRYDEHHQDLTLLKALVRQQLPEKYKEIFFDQSKNGYAGYIDGGASQEEFYKFIKPILEKMDGTEELLVKLNREDLLRKQRTFDNGSIPHQIHLGELHAILRRQEDFYPFLKDNREKIEKILTFRIPYYVGPLARGNSRFAWMTRKSEETITPWNFEEVVDKGASAQSFIERMTNFDKNLPNEKVLPKHSLLYEYFTVYNELTKVKYVTEGMRKPAFLSGEQKKAIVDLLFKTNRKVTVKQLKEDYFKKIECFDSVEISGVEDRFNASLGTYHDLLKIIKDKDFLDNEENEDILEDIVLTLTLFEDREMIEERLKTYAHLFDDKVMKQLKRRRYTGWGRLSRKLINGIRDKQSGKTILDFLKSDGFANRNFMQLIHDDSLTFKEDIQKAQVSGQGDSLHEHIANLAGSPAIKKGILQTVKVVDELVKVMGRHKPENIVIEMARENQTTQKGQKNSRERMKRIEEGIKELGSQILKEHPVENTQLQNEKLYLYYLQNGRDMYVDQELDINRLSDYDVDHIVPQSFLKDDSIDNKVLTRSDKARGKSDNVPSEEVVKKMKNYWRQLLNAKLITQRKFDNLTKAERGGLSELDKAGFIKRQLVETRQITKHVAQILDSRMNTKYDENDKLIREVKVITLKSKLVSDFRKDFQFYKVREINNYHHAHDAYLNAVVGTALIKKYPKLESEFVYGDYKVYDVRKMIAKSEQEIGKATAKYFFYSNIMNFFKTEITLANGEIRKRPLIETNGETGEIVWDKGRDFATVRKVLSMPQVNIVKKTEVQTGGFSKESILPKRNSDKLIARKKDWDPKKYGGFDSPTVAYSVLVVAKVEKGKSKKLKSVKELLGITIMERSSFEKNPIDFLEAKGYKEVKKDLIIKLPKYSLFELENGRKRMLASAGELQKGNELALPSKYVNFLYLASHYEKLKGSPEDNEQKQLFVEQHKHYLDEIIEQISEFSKRVILADANLDKVLSAYNKHRDKPIREQAENIIHLFTLTNLGAPAAFKYFDTTIDRKRYTSTKEVLDATLIHQSITGLYETRIDLSQLGGDGGGGGGSGGTVSLQDEHRLFDIPVTTSLPDVWLQDFPQAWAETGGLGRAKCQAPIIIDLKPTAVPVSIKQYPMSLEAHMGIRQHIIKFLELGVLRPCRSPWNTPLLPVKKPGTQDYRPVQDLREINKRTVDIHPTVPNPYNLLSTLKPDYSWYTVLDLKDAFFCLPLAPQSQELFAFEWKDPERGISGQLTWTRLPQGFKNSPTLFNEALHRDLTDFRTQHPEVTLLQYVDDLLLAAPTKKACTQGTRHLLQELGEKGYRASAKKAQICQTKVTYLGYILSEGKRWLTPGRIETVARIPPPRNPREVREFLGTAGFCRLWIPGFAELAAPLYALTKPSTPFTWQTEHQLAFEALKKALLSAPALGLPDTSKPFTLFLDERQGIAKGVLTQKLGPWKRPVAYLSKKLDPVAAGWPPCLRIMAATAMLVKDSAKLTLGQPLTVITPHTLEAIVRQPPDRWITNARLTHYQALLLDTDRVQFGPPVTLNPATLLPVPENQPSPHDCRQVLAETHGTREDLKDQELPDADHTWYTDGSSYLDSGTRRAGAAVVDGHNTIWAQSLPPGTSAQKAELIALTKALELSKGKKANIYTDSRYAFATAHTHGSIYERRGWLTSEGKEIKNKAEIIALLKALFLPQEVAIIHCPGHQKGQDPVAVGNRQADRVARQAAMAEVLTLATEPDNTSHITAGKRTADGSEFEKRTADGSEFESPKKKAKVE

SEQ ID NO: 1560 - protein, 2098 aa, synthetic construct
MPAAKRVKLDGGDKKYSIGLDIGTNSVGWAVITDEYKVPSKKFKVLGNTDRHSIKKNLIGALLFDSGETAEATRLKRTARRRYTRRKNRICYLQEIFSNEMAKVDDSFFHRLEESFLVEEDKKHERHPIFGNIVDEVAYHEKYPTIYHLRKKLVDSTDKADLRLIYLALAHMIKFRGHFLIEGDLNPDNSDVDKLFIQLVQTYNQLFEENPINASGVDAKAILSARLSKSRRLENLIAQLPGEKKNGLFGNLIALSLGLTPNFKSNFDLAEDAKLQLSKDTYDDDLDNLLAQIGDQYADLFLAAKNLSDAILLSDILRVNTEITKAPLSASMIKRYDEHHQDLTLLKALVRQQLPEKYKEIFFDQSKNGYAGYIDGGASQEEFYKFIKPILEKMDGTEELLVKLNREDLLRKQRTFDNGSIPHQIHLGELHAILRRQEDFYPFLKDNREKIEKILTFRIPYYVGPLARGNSRFAWMTRKSEETITPWNFEEVVDKGASAQSFIERMTNFDKNLPNEKVLPKHSLLYEYFTVYNELTKVKYVTEGMRKPAFLSGEQKKAIVDLLFKTNRKVTVKQLKEDYFKKIECFDSVEISGVEDRFNASLGTYHDLLKIIKDKDFLDNEENEDILEDIVLTLTLFEDREMIEERLKTYAHLFDDKVMKQLKRRRYTGWGRLSRKLINGIRDKQSGKTILDFLKSDGFANRNFMQLIHDDSLTFKEDIQKAQVSGQGDSLHEHIANLAGSPAIKKGILQTVKVVDELVKVMGRHKPENIVIEMARENQTTQKGQKNSRERMKRIEEGIKELGSQILKEHPVENTQLQNEKLYLYYLQNGRDMYVDQELDINRLSDYDVDHIVPQSFLKDDSIDNKVLTRSDKARGKSDNVPSEEVVKKMKNYWRQLLNAKLITQRKFDNLTKAERGGLSELDKAGFIKRQLVETRQITKHVAQILDSRMNTKYDENDKLIREVKVITLKSKLVSDFRKDFQFYKVREINNYHHAHDAYLNAVVGTALIKKYPKLESEFVYGDYKVYDVRKMIAKSEQEIGKATAKYFFYSNIMNFFKTEITLANGEIRKRPLIETNGETGEIVWDKGRDFATVRKVLSMPQVNIVKKTEVQTGGFSKESILPKRNSDKLIARKKDWDPKKYGGFDSPTVAYSVLVVAKVEKGKSKKLKSVKELLGITIMERSSFEKNPIDFLEAKGYKEVKKDLIIKLPKYSLFELENGRKRMLASAGELQKGNELALPSKYVNFLYLASHYEKLKGSPEDNEQKQLFVEQHKHYLDEIIEQISEFSKRVILADANLDKVLSAYNKHRDKPIREQAENIIHLFTLTNLGAPAAFKYFDTTIDRKRYTSTKEVLDATLIHQSITGLYETRIDLSQLGGDGGGGGGGGGGGTVSLQDEHRLFDIPVTTSLPDVWLQDFPQAWAETGGLGRAKCQAPIIIDLKPTAVPVSIKQYPMSLEAHMGIRQHIIKFLELGVLRPCRSPWNTPLLPVKKPGTQDYRPVQDLREINKRTVDIHPTVPNPYNLLSTLKPDYSWYTVLDLKDAFFCLPLAPQSQELFAFEWKDPERGISGQLTWTRLPQGFKNSPTLFNEALHRDLTDFRTQHPEVTLLQYVDDLLLAAPTKKACTQGTRHLLQELGEKGYRASAKKAQICQTKVTYLGYILSEGKRWLTPGRIETVARIPPPRNPREVREFLGTAGFCRLWIPGFAELAAPLYALTKPSTPFTWQTEHQLAFEALKKALLSAPALGLPDTSKPFTLFLDERQGIAKGVLTQKLGPWKRPVAYLSKKLDPVAAGWPPCLRIMAATAMLVKDSAKLTLGQPLTVITPHTLEAIVRQPPDRWITNARLTHYQALLLDTDRVQFGPPVTLNPATLLPVPENQPSPHDCRQVLAETHGTREDLKDQELPDADHTWYTDGSSYLDSGTRRAGAAVVDGHNTIWAQSLPPGTSAQKAELIALTKALELSKGKKANIYTDSRYAFATAHTHGSIYERRGWLTSEGKEIKNKAEIIALLKALFLPQEVAIIHCPGHQKGQDPVAVGNRQADRVARQAAMAEVLTLATEPDNTSHITAGKRTADGSEFEKRTADGSEFESPKKKAKVE

SEQ ID NO: 1561 - protein, 2106 aa, synthetic construct
MPAAKRVKLDGGDKKYSIGLDIGTNSVGWAVITDEYKVPSKKFKVLGNTDRHSIKKNLIGALLFDSGETAEATRLKRTARRRYTRRKNRICYLQEIFSNEMAKVDDSFFHRLEESFLVEEDKKHERHPIFGNIVDEVAYHEKYPTIYHLRKKLVDSTDKADLRLIYLALAHMIKFRGHFLIEGDLNPDNSDVDKLFIQLVQTYNQLFEENPINASGVDAKAILSARLSKSRRLENLIAQLPGEKKNGLFGNLIALSLGLTPNFKSNFDLAEDAKLQLSKDTYDDDLDNLLAQIGDQYADLFLAAKNLSDAILLSDILRVNTEITKAPLSASMIKRYDEHHQDLTLLKALVRQQLPEKYKEIFFDQSKNGYAGYIDGGASQEEFYKFIKPILEKMDGTEELLVKLNREDLLRKQRTFDNGSIPHQIHLGELHAILRRQEDFYPFLKDNREKIEKILTFRIPYYVGPLARGNSRFAWMTRKSEETITPWNFEEVVDKGASAQSFIERMTNFDKNLPNEKVLPKHSLLYEYFTVYNELTKVKYVTEGMRKPAFLSGEQKKAIVDLLFKTNRKVTVKQLKEDYFKKIECFDSVEISGVEDRFNASLGTYHDLLKIIKDKDFLDNEENEDILEDIVLTLTLFEDREMIEERLKTYAHLFDDKVMKQLKRRRYTGWGRLSRKLINGIRDKQSGKTILDFLKSDGFANRNFMQLIHDDSLTFKEDIQKAQVSGQGDSLHEHIANLAGSPAIKKGILQTVKVVDELVKVMGRHKPENIVIEMARENQTTQKGQKNSRERMKRIEEGIKELGSQILKEHPVENTQLQNEKLYLYYLQNGRDMYVDQELDINRLSDYDVDHIVPQSFLKDDSIDNKVLTRSDKARGKSDNVPSEEVVKKMKNYWRQLLNAKLITQRKFDNLTKAERGGLSELDKAGFIKRQLVETRQITKHVAQILDSRMNTKYDENDKLIREVKVITLKSKLVSDFRKDFQFYKVREINNYHHAHDAYLNAVVGTALIKKYPKLESEFVYGDYKVYDVRKMIAKSEQEIGKATAKYFFYSNIMNFFKTEITLANGEIRKRPLIETNGETGEIVWDKGRDFATVRKVLSMPQVNIVKKTEVQTGGFSKESILPKRNSDKLIARKKDWDPKKYGGFDSPTVAYSVLVVAKVEKGKSKKLKSVKELLGITIMERSSFEKNPIDFLEAKGYKEVKKDLIIKLPKYSLFELENGRKRMLASAGELQKGNELALPSKYVNFLYLASHYEKLKGSPEDNEQKQLFVEQHKHYLDEIIEQISEFSKRVILADANLDKVLSAYNKHRDKPIREQAENIIHLFTLTNLGAPAAFKYFDTTIDRKRYTSTKEVLDATLIHQSITGLYETRIDLSQLGGDGGGGGGSEAAAKGGGGSGGTVSLQDEHRLFDIPVTTSLPDVWLQDFPQAWAETGGLGRAKCQAPIIIDLKPTAVPVSIKQYPMSLEAHMGIRQHIIKFLELGVLRPCRSPWNTPLLPVKKPGTQDYRPVQDLREINKRTVDIHPTVPNPYNLLSTLKPDYSWYTVLDLKDAFFCLPLAPQSQELFAFEWKDPERGISGQLTWTRLPQGFKNSPTLFNEALHRDLTDFRTQHPEVTLLQYVDDLLLAAPTKKACTQGTRHLLQELGEKGYRASAKKAQICQTKVTYLGYILSEGKRWLTPGRIETVARIPPPRNPREVREFLGTAGFCRLWIPGFAELAAPLYALTKPSTPFTWQTEHQLAFEALKKALLSAPALGLPDTSKPFTLFLDERQGIAKGVLTQKLGPWKRPVAYLSKKLDPVAAGWPPCLRIMAATAMLVKDSAKLTLGQPLTVITPHTLEAIVRQPPDRWITNARLTHYQALLLDTDRVQFGPPVTLNPATLLPVPENQPSPHDCRQVLAETHGTREDLKDQELPDADHTWYTDGSSYLDSGTRRAGAAVVDGHNTIWAQSLPPGTSAQKAELIALTKALELSKGKKANIYTDSRYAFATAHTHGSIYERRGWLTSEGKEIKNKAEIIALLKALFLPQEVAIIHCPGHQKGQDPVAVGNRQADRVARQAAMAEVLTLATEPDNTSHITAGKRTADGSEFEKRTADGSEFESPKKKAKVE

SEQ ID NO: 1562 - protein, 2111 aa, synthetic construct
MPAAKRVKLDGGDKKYSIGLDIGTNSVGWAVITDEYKVPSKKFKVLGNTDRHSIKKNLIGALLFDSGETAEATRLKRTARRRYTRRKNRICYLQEIFSNEMAKVDDSFFHRLEESFLVEEDKKHERHPIFGNIVDEVAYHEKYPTIYHLRKKLVDSTDKADLRLIYLALAHMIKFRGHFLIEGDLNPDNSDVDKLFIQLVQTYNQLFEENPINASGVDAKAILSARLSKSRRLENLIAQLPGEKKNGLFGNLIALSLGLTPNFKSNFDLAEDAKLQLSKDTYDDDLDNLLAQIGDQYADLFLAAKNLSDAILLSDILRVNTEITKAPLSASMIKRYDEHHQDLTLLKALVRQQLPEKYKEIFFDQSKNGYAGYIDGGASQEEFYKFIKPILEKMDGTEELLVKLNREDLLRKQRTFDNGSIPHQIHLGELHAILRRQEDFYPFLKDNREKIEKILTFRIPYYVGPLARGNSRFAWMTRKSEETITPWNFEEVVDKGASAQSFIERMTNFDKNLPNEKVLPKHSLLYEYFTVYNELTKVKYVTEGMRKPAFLSGEQKKAIVDLLFKTNRKVTVKQLKEDYFKKIECFDSVEISGVEDRFNASLGTYHDLLKIIKDKDFLDNEENEDILEDIVLTLTLFEDREMIEERLKTYAHLFDDKVMKQLKRRRYTGWGRLSRKLINGIRDKQSGKTILDFLKSDGFANRNFMQLIHDDSLTFKEDIQKAQVSGQGDSLHEHIANLAGSPAIKKGILQTVKVVDELVKVMGRHKPENIVIEMARENQTTQKGQKNSRERMKRIEEGIKELGSQILKEHPVENTQLQNEKLYLYYLQNGRDMYVDQELDINRLSDYDVDHIVPQSFLKDDSIDNKVLTRSDKARGKSDNVPSEEVVKKMKNYWRQLLNAKLITQRKFDNLTKAERGGLSELDKAGFIKRQLVETRQITKHVAQILDSRMNTKYDENDKLIREVKVITLKSKLVSDFRKDFQFYKVREINNYHHAHDAYLNAVVGTALIKKYPKLESEFVYGDYKVYDVRKMIAKSEQEIGKATAKYFFYSNIMNFFKTEITLANGEIRKRPLIETNGETGEIVWDKGRDFATVRKVLSMPQVNIVKKTEVQTGGFSKESILPKRNSDKLIARKKDWDPKKYGGFDSPTVAYSVLVVAKVEKGKSKKLKSVKELLGITIMERSSFEKNPIDFLEAKGYKEVKKDLIIKLPKYSLFELENGRKRMLASAGELQKGNELALPSKYVNFLYLASHYEKLKGSPEDNEQKQLFVEQHKHYLDEIIEQISEFSKRVILADANLDKVLSAYNKHRDKPIREQAENIIHLFTLTNLGAPAAFKYFDTTIDRKRYTSTKEVLDATLIHQSITGLYETRIDLSQLGGDGGEAAAKEAAAKEAAAKEAAAKGGTVSLQDEHRLFDIPVTTSLPDVWLQDFPQAWAETGGLGRAKCQAPIIIDLKPTAVPVSIKQYPMSLEAHMGIRQHIIKFLELGVLRPCRSPWNTPLLPVKKPGTQDYRPVQDLREINKRTVDIHPTVPNPYNLLSTLKPDYSWYTVLDLKDAFFCLPLAPQSQELFAFEWKDPERGISGQLTWTRLPQGFKNSPTLFNEALHRDLTDFRTQHPEVTLLQYVDDLLLAAPTKKACTQGTRHLLQELGEKGYRASAKKAQICQTKVTYLGYILSEGKRWLTPGRIETVARIPPPRNPREVREFLGTAGFCRLWIPGFAELAAPLYALTKPSTPFTWQTEHQLAFEALKKALLSAPALGLPDTSKPFTLFLDERQGIAKGVLTQKLGPWKRPVAYLSKKLDPVAAGWPPCLRIMAATAMLVKDSAKLTLGQPLTVITPHTLEAIVRQPPDRWITNARLTHYQALLLDTDRVQFGPPVTLNPATLLPVPENQPSPHDCRQVLAETHGTREDLKDQELPDADHTWYTDGSSYLDSGTRRAGAAVVDGHNTIWAQSLPPGTSAQKAELIALTKALELSKGKKANIYTDSRYAFATAHTHGSIYERRGWLTSEGKEIKNKAEIIALLKALFLPQEVAIIHCPGHQKGQDPVAVGNRQADRVARQAAMAEVLTLATEPDNTSHITAGKRTADGSEFEKRTADGSEFESPKKKAKVE

SEQ ID NO: 1563 - protein, 2102 aa, synthetic construct
MPAAKRVKLDGGDKKYSIGLDIGTNSVGWAVITDEYKVPSKKFKVLGNTDRHSIKKNLIGALLFDSGETAEATRLKRTARRRYTRRKNRICYLQEIFSNEMAKVDDSFFHRLEESFLVEEDKKHERHPIFGNIVDEVAYHEKYPTIYHLRKKLVDSTDKADLRLIYLALAHMIKFRGHFLIEGDLNPDNSDVDKLFIQLVQTYNQLFEENPINASGVDAKAILSARLSKSRRLENLIAQLPGEKKNGLFGNLIALSLGLTPNFKSNFDLAEDAKLQLSKDTYDDDLDNLLAQIGDQYADLFLAAKNLSDAILLSDILRVNTEITKAPLSASMIKRYDEHHQDLTLLKALVRQQLPEKYKEIFFDQSKNGYAGYIDGGASQEEFYKFIKPILEKMDGTEELLVKLNREDLLRKQRTFDNGSIPHQIHLGELHAILRRQEDFYPFLKDNREKIEKILTFRIPYYVGPLARGNSRFAWMTRKSEETITPWNFEEVVDKGASAQSFIERMTNFDKNLPNEKVLPKHSLLYEYFTVYNELTKVKYVTEGMRKPAFLSGEQKKAIVDLLFKTNRKVTVKQLKEDYFKKIECFDSVEISGVEDRFNASLGTYHDLLKIIKDKDFLDNEENEDILEDIVLTLTLFEDREMIEERLKTYAHLFDDKVMKQLKRRRYTGWGRLSRKLINGIRDKQSGKTILDFLKSDGFANRNFMQLIHDDSLTFKEDIQKAQVSGQGDSLHEHIANLAGSPAIKKGILQTVKVVDELVKVMGRHKPENIVIEMARENQTTQKGQKNSRERMKRIEEGIKELGSQILKEHPVENTQLQNEKLYLYYLQNGRDMYVDQELDINRLSDYDVDHIVPQSFLKDDSIDNKVLTRSDKARGKSDNVPSEEVVKKMKNYWRQLLNAKLITQRKFDNLTKAERGGLSELDKAGFIKRQLVETRQITKHVAQILDSRMNTKYDENDKLIREVKVITLKSKLVSDFRKDFQFYKVREINNYHHAHDAYLNAVVGTALIKKYPKLESEFVYGDYKVYDVRKMIAKSEQEIGKATAKYFFYSNIMNFFKTEITLANGEIRKRPLIETNGETGEIVWDKGRDFATVRKVLSMPQVNIVKKTEVQTGGFSKESILPKRNSDKLIARKKDWDPKKYGGFDSPTVAYSVLVVAKVEKGKSKKLKSVKELLGITIMERSSFEKNPIDFLEAKGYKEVKKDLIIKLPKYSLFELENGRKRMLASAGELQKGNELALPSKYVNFLYLASHYEKLKGSPEDNEQKQLFVEQHKHYLDEIIEQISEFSKRVILADANLDKVLSAYNKHRDKPIREQAENIIHLFTLTNLGAPAAFKYFDTTIDRKRYTSTKEVLDATLIHQSITGLYETRIDLSQLGGDGGGGSEAAAKPAPGGTVSLQDEHRLFDIPVTTSLPDVWLQDFPQAWAETGGLGRAKCQAPIIIDLKPTAVPVSIKQYPMSLEAHMGIRQHIIKFLELGVLRPCRSPWNTPLLPVKKPGTQDYRPVQDLREINKRTVDIHPTVPNPYNLLSTLKPDYSWYTVLDLKDAFFCLPLAPQSQELFAFEWKDPERGISGQLTWTRLPQGFKNSPTLFNEALHRDLTDFRTQHPEVTLLQYVDDLLLAAPTKKACTQGTRHLLQELGEKGYRASAKKAQICQTKVTYLGYILSEGKRWLTPGRIETVARIPPPRNPREVREFLGTAGFCRLWIPGFAELAAPLYALTKPSTPFTWQTEHQLAFEALKKALLSAPALGLPDTSKPFTLFLDERQGIAKGVLTQKLGPWKRPVAYLSKKLDPVAAGWPPCLRIMAATAMLVKDSAKLTLGQPLTVITPHTLEAIVRQPPDRWITNARLTHYQALLLDTDRVQFGPPVTLNPATLLPVPENQPSPHDCRQVLAETHGTREDLKDQELPDADHTWYTDGSSYLDSGTRRAGAAVVDGHNTIWAQSLPPGTSAQKAELIALTKALELSKGKKANIYTDSRYAFATAHTHGSIYERRGWLTSEGKEIKNKAEIIALLKALFLPQEVAIIHCPGHQKGQDPVAVGNRQADRVARQAAMAEVLTLATEPDNTSHITAGKRTADGSEFEKRTADGSEFESPKKKAKVE

SEQ ID NO: 1564 - protein, 2096 aa, synthetic construct
MPAAKRVKLDGGDKKYSIGLDIGTNSVGWAVITDEYKVPSKKFKVLGNTDRHSIKKNLIGALLFDSGETAEATRLKRTARRRYTRRKNRICYLQEIFSNEMAKVDDSFFHRLEESFLVEEDKKHERHPIFGNIVDEVAYHEKYPTIYHLRKKLVDSTDKADLRLIYLALAHMIKFRGHFLIEGDLNPDNSDVDKLFIQLVQTYNQLFEENPINASGVDAKAILSARLSKSRRLENLIAQLPGEKKNGLFGNLIALSLGLTPNFKSNFDLAEDAKLQLSKDTYDDDLDNLLAQIGDQYADLFLAAKNLSDAILLSDILRVNTEITKAPLSASMIKRYDEHHQDLTLLKALVRQQLPEKYKEIFFDQSKNGYAGYIDGGASQEEFYKFIKPILEKMDGTEELLVKLNREDLLRKQRTFDNGSIPHQIHLGELHAILRRQEDFYPFLKDNREKIEKILTFRIPYYVGPLARGNSRFAWMTRKSEETITPWNFEEVVDKGASAQSFIERMTNFDKNLPNEKVLPKHSLLYEYFTVYNELTKVKYVTEGMRKPAFLSGEQKKAIVDLLFKTNRKVTVKQLKEDYFKKIECFDSVEISGVEDRFNASLGTYHDLLKIIKDKDFLDNEENEDILEDIVLTLTLFEDREMIEERLKTYAHLFDDKVMKQLKRRRYTGWGRLSRKLINGIRDKQSGKTILDFLKSDGFANRNFMQLIHDDSLTFKEDIQKAQVSGQGDSLHEHIANLAGSPAIKKGILQTVKVVDELVKVMGRHKPENIVIEMARENQTTQKGQKNSRERMKRIEEGIKELGSQILKEHPVENTQLQNEKLYLYYLQNGRDMYVDQELDINRLSDYDVDHIVPQSFLKDDSIDNKVLTRSDKARGKSDNVPSEEVVKKMKNYWRQLLNAKLITQRKFDNLTKAERGGLSELDKAGFIKRQLVETRQITKHVAQILDSRMNTKYDENDKLIREVKVITLKSKLVSDFRKDFQFYKVREINNYHHAHDAYLNAVVGTALIKKYPKLESEFVYGDYKVYDVRKMIAKSEQEIGKATAKYFFYSNIMNFFKTEITLANGEIRKRPLIETNGETGEIVWDKGRDFATVRKVLSMPQVNIVKKTEVQTGGFSKESILPKRNSDKLIARKKDWDPKKYGGFDSPTVAYSVLVVAKVEKGKSKKLKSVKELLGITIMERSSFEKNPIDFLEAKGYKEVKKDLIIKLPKYSLFELENGRKRMLASAGELQKGNELALPSKYVNFLYLASHYEKLKGSPEDNEQKQLFVEQHKHYLDEIIEQISEFSKRVILADANLDKVLSAYNKHRDKPIREQAENIIHLFTLTNLGAPAAFKYFDTTIDRKRYTSTKEVLDATLIHQSITGLYETRIDLSQLGGDGGPAPAPGGTVSLQDEHRLFDIPVTTSLPDVWLQDFPQAWAETGGLGRAKCQAPIIIDLKPTAVPVSIKQYPMSLEAHMGIRQHIIKFLELGVLRPCRSPWNTPLLPVKKPGTQDYRPVQDLREINKRTVDIHPTVPNPYNLLSTLKPDYSWYTVLDLKDAFFCLPLAPQSQELFAFEWKDPERGISGQLTWTRLPQGFKNSPTLFNEALHRDLTDFRTQHPEVTLLQYVDDLLLAAPTKKACTQGTRHLLQELGEKGYRASAKKAQICQTKVTYLGYILSEGKRWLTPGRIETVARIPPPRNPREVREFLGTAGFCRLWIPGFAELAAPLYALTKPSTPFTWQTEHQLAFEALKKALLSAPALGLPDTSKPFTLFLDERQGIAKGVLTQKLGPWKRPVAYLSKKLDPVAAGWPPCLRIMAATAMLVKDSAKLTLGQPLTVITPHTLEAIVRQPPDRWITNARLTHYQALLLDTDRVQFGPPVTLNPATLLPVPENQPSPHDCRQVLAETHGTREDLKDQELPDADHTWYTDGSSYLDSGTRRAGAAVVDGHNTIWAQSLPPGTSAQKAELIALTKALELSKGKKANIYTDSRYAFATAHTHGSIYERRGWLTSEGKEIKNKAEIIALLKALFLPQEVAIIHCPGHQKGQDPVAVGNRQADRVARQAAMAEVLTLATEPDNTSHITAGKRTADGSEFEKRTADGSEFESPKKKAKVE

SEQ ID NO: 1565 - protein, 2097 aa, synthetic construct
MPAAKRVKLDGGDKKYSIGLDIGTNSVGWAVITDEYKVPSKKFKVLGNTDRHSIKKNLIGALLFDSGETAEATRLKRTARRRYTRRKNRICYLQEIFSNEMAKVDDSFFHRLEESFLVEEDKKHERHPIFGNIVDEVAYHEKYPTIYHLRKKLVDSTDKADLRLIYLALAHMIKFRGHFLIEGDLNPDNSDVDKLFIQLVQTYNQLFEENPINASGVDAKAILSARLSKSRRLENLIAQLPGEKKNGLFGNLIALSLGLTPNFKSNFDLAEDAKLQLSKDTYDDDLDNLLAQIGDQYADLFLAAKNLSDAILLSDILRVNTEITKAPLSASMIKRYDEHHQDLTLLKALVRQQLPEKYKEIFFDQSKNGYAGYIDGGASQEEFYKFIKPILEKMDGTEELLVKLNREDLLRKQRTFDNGSIPHQIHLGELHAILRRQEDFYPFLKDNREKIEKILTFRIPYYVGPLARGNSRFAWMTRKSEETITPWNFEEVVDKGASAQSFIERMTNFDKNLPNEKVLPKHSLLYEYFTVYNELTKVKYVTEGMRKPAFLSGEQKKAIVDLLFKTNRKVTVKQLKEDYFKKIECFDSVEISGVEDRFNASLGTYHDLLKIIKDKDFLDNEENEDILEDIVLTLTLFEDREMIEERLKTYAHLFDDKVMKQLKRRRYTGWGRLSRKLINGIRDKQSGKTILDFLKSDGFANRNFMQLIHDDSLTFKEDIQKAQVSGQGDSLHEHIANLAGSPAIKKGILQTVKVVDELVKVMGRHKPENIVIEMARENQTTQKGQKNSRERMKRIEEGIKELGSQILKEHPVENTQLQNEKLYLYYLQNGRDMYVDQELDINRLSDYDVDHIVPQSFLKDDSIDNKVLTRSDKARGKSDNVPSEEVVKKMKNYWRQLLNAKLITQRKFDNLTKAERGGLSELDKAGFIKRQLVETRQITKHVAQILDSRMNTKYDENDKLIREVKVITLKSKLVSDFRKDFQFYKVREINNYHHAHDAYLNAVVGTALIKKYPKLESEFVYGDYKVYDVRKMIAKSEQEIGKATAKYFFYSNIMNFFKTEITLANGEIRKRPLIETNGETGEIVWDKGRDFATVRKVLSMPQVNIVKKTEVQTGGFSKESILPKRNSDKLIARKKDWDPKKYGGFDSPTVAYSVLVVAKVEKGKSKKLKSVKELLGITIMERSSFEKNPIDFLEAKGYKEVKKDLIIKLPKYSLFELENGRKRMLASAGELQKGNELALPSKYVNFLYLASHYEKLKGSPEDNEQKQLFVEQHKHYLDEIIEQISEFSKRVILADANLDKVLSAYNKHRDKPIREQAENIIHLFTLTNLGAPAAFKYFDTTIDRKRYTSTKEVLDATLIHQSITGLYETRIDLSQLGGDGGGGGGSSGGTVSLQDEHRLFDIPVTTSLPDVWLQDFPQAWAETGGLGRAKCQAPIIIDLKPTAVPVSIKQYPMSLEAHMGIRQHIIKFLELGVLRPCRSPWNTPLLPVKKPGTQDYRPVQDLREINKRTVDIHPTVPNPYNLLSTLKPDYSWYTVLDLKDAFFCLPLAPQSQELFAFEWKDPERGISGQLTWTRLPQGFKNSPTLFNEALHRDLTDFRTQHPEVTLLQYVDDLLLAAPTKKACTQGTRHLLQELGEKGYRASAKKAQICQTKVTYLGYILSEGKRWLTPGRIETVARIPPPRNPREVREFLGTAGFCRLWIPGFAELAAPLYALTKPSTPFTWQTEHQLAFEALKKALLSAPALGLPDTSKPFTLFLDERQGIAKGVLTQKLGPWKRPVAYLSKKLDPVAAGWPPCLRIMAATAMLVKDSAKLTLGQPLTVITPHTLEAIVRQPPDRWITNARLTHYQALLLDTDRVQFGPPVTLNPATLLPVPENQPSPHDCRQVLAETHGTREDLKDQELPDADHTWYTDGSSYLDSGTRRAGAAVVDGHNTIWAQSLPPGTSAQKAELIALTKALELSKGKKANIYTDSRYAFATAHTHGSIYERRGWLTSEGKEIKNKAEIIALLKALFLPQEVAIIHCPGHQKGQDPVAVGNRQADRVARQAAMAEVLTLATEPDNTSHITAGKRTADGSEFEKRTADGSEFESPKKKAKVE

SEQ ID NO: 1566 - protein, 2099 aa, synthetic construct
MPAAKRVKLDGGDKKYSIGLDIGTNSVGWAVITDEYKVPSKKFKVLGNTDRHSIKKNLIGALLFDSGETAEATRLKRTARRRYTRRKNRICYLQEIFSNEMAKVDDSFFHRLEESFLVEEDKKHERHPIFGNIVDEVAYHEKYPTIYHLRKKLVDSTDKADLRLIYLALAHMIKFRGHFLIEGDLNPDNSDVDKLFIQLVQTYNQLFEENPINASGVDAKAILSARLSKSRRLENLIAQLPGEKKNGLFGNLIALSLGLTPNFKSNFDLAEDAKLQLSKDTYDDDLDNLLAQIGDQYADLFLAAKNLSDAILLSDILRVNTEITKAPLSASMIKRYDEHHQDLTLLKALVRQQLPEKYKEIFFDQSKNGYAGYIDGGASQEEFYKFIKPILEKMDGTEELLVKLNREDLLRKQRTFDNGSIPHQIHLGELHAILRRQEDFYPFLKDNREKIEKILTFRIPYYVGPLARGNSRFAWMTRKSEETITPWNFEEVVDKGASAQSFIERMTNFDKNLPNEKVLPKHSLLYEYFTVYNELTKVKYVTEGMRKPAFLSGEQKKAIVDLLFKTNRKVTVKQLKEDYFKKIECFDSVEISGVEDRFNASLGTYHDLLKIIKDKDFLDNEENEDILEDIVLTLTLFEDREMIEERLKTYAHLFDDKVMKQLKRRRYTGWGRLSRKLINGIRDKQSGKTILDFLKSDGFANRNFMQLIHDDSLTFKEDIQKAQVSGQGDSLHEHIANLAGSPAIKKGILQTVKVVDELVKVMGRHKPENIVIEMARENQTTQKGQKNSRERMKRIEEGIKELGSQILKEHPVENTQLQNEKLYLYYLQNGRDMYVDQELDINRLSDYDVDHIVPQSFLKDDSIDNKVLTRSDKARGKSDNVPSEEVVKKMKNYWRQLLNAKLITQRKFDNLTKAERGGLSELDKAGFIKRQLVETRQITKHVAQILDSRMNTKYDENDKLIREVKVITLKSKLVSDFRKDFQFYKVREINNYHHAHDAYLNAVVGTALIKKYPKLESEFVYGDYKVYDVRKMIAKSEQEIGKATAKYFFYSNIMNFFKTEITLANGEIRKRPLIETNGETGEIVWDKGRDFATVRKVLSMPQVNIVKKTEVQTGGFSKESILPKRNSDKLIARKKDWDPKKYGGFDSPTVAYSVLVVAKVEKGKSKKLKSVKELLGITIMERSSFEKNPIDFLEAKGYKEVKKDLIIKLPKYSLFELENGRKRMLASAGELQKGNELALPSKYVNFLYLASHYEKLKGSPEDNEQKQLFVEQHKHYLDEIIEQISEFSKRVILADANLDKVLSAYNKHRDKPIREQAENIIHLFTLTNLGAPAAFKYFDTTIDRKRYTSTKEVLDATLIHQSITGLYETRIDLSQLGGDGGGGGEAAAKGGTVSLQDEHRLFDIPVTTSLPDVWLQDFPQAWAETGGLGRAKCQAPIIIDLKPTAVPVSIKQYPMSLEAHMGIRQHIIKFLELGVLRPCRSPWNTPLLPVKKPGTQDYRPVQDLREINKRTVDIHPTVPNPYNLLSTLKPDYSWYTVLDLKDAFFCLPLAPQSQELFAFEWKDPERGISGQLTWTRLPQGFKNSPTLFNEALHRDLTDFRTQHPEVTLLQYVDDLLLAAPTKKACTQGTRHLLQELGEKGYRASAKKAQICQTKVTYLGYILSEGKRWLTPGRIETVARIPPPRNPREVREFLGTAGFCRLWIPGFAELAAPLYALTKPSTPFTWQTEHQLAFEALKKALLSAPALGLPDTSKPFTLFLDERQGIAKGVLTQKLGPWKRPVAYLSKKLDPVAAGWPPCLRIMAATAMLVKDSAKLTLGQPLTVITPHTLEAIVRQPPDRWITNARLTHYQALLLDTDRVQFGPPVTLNPATLLPVPENQPSPHDCRQVLAETHGTREDLKDQELPDADHTWYTDGSSYLDSGTRRAGAAVVDGHNTIWAQSLPPGTSAQKAELIALTKALELSKGKKANIYTDSRYAFATAHTHGSIYERRGWLTSEGKEIKNKAEIIALLKALFLPQEVAIIHCPGHQKGQDPVAVGNRQADRVARQAAMAEVLTLATEPDNTSHITAGKRTADGSEFEKRTADGSEFESPKKKAKVE

SEQ ID NO: 1567 - protein, 2102 aa, synthetic construct
MPAAKRVKLDGGDKKYSIGLDIGTNSVGWAVITDEYKVPSKKFKVLGNTDRHSIKKNLIGALLFDSGETAEATRLKRTARRRYTRRKNRICYLQEIFSNEMAKVDDSFFHRLEESFLVEEDKKHERHPIFGNIVDEVAYHEKYPTIYHLRKKLVDSTDKADLRLIYLALAHMIKFRGHFLIEGDLNPDNSDVDKLFIQLVQTYNQLFEENPINASGVDAKAILSARLSKSRRLENLIAQLPGEKKNGLFGNLIALSLGLTPNFKSNFDLAEDAKLQLSKDTYDDDLDNLLAQIGDQYADLFLAAKNLSDAILLSDILRVNTEITKAPLSASMIKRYDEHHQDLTLLKALVRQQLPEKYKEIFFDQSKNGYAGYIDGGASQEEFYKFIKPILEKMDGTEELLVKLNREDLLRKQRTFDNGSIPHQIHLGELHAILRRQEDFYPFLKDNREKIEKILTFRIPYYVGPLARGNSRFAWMTRKSEETITPWNFEEVVDKGASAQSFIERMTNFDKNLPNEKVLPKHSLLYEYFTVYNELTKVKYVTEGMRKPAFLSGEQKKAIVDLLFKTNRKVTVKQLKEDYFKKIECFDSVEISGVEDRFNASLGTYHDLLKIIKDKDFLDNEENEDILEDIVLTLTLFEDREMIEERLKTYAHLFDDKVMKQLKRRRYTGWGRLSRKLINGIRDKQSGKTILDFLKSDGFANRNFMQLIHDDSLTFKEDIQKAQVSGQGDSLHEHIANLAGSPAIKKGILQTVKVVDELVKVMGRHKPENIVIEMARENQTTQKGQKNSRERMKRIEEGIKELGSQILKEHPVENTQLQNEKLYLYYLQNGRDMYVDQELDINRLSDYDVDHIVPQSFLKDDSIDNKVLTRSDKARGKSDNVPSEEVVKKMKNYWRQLLNAKLITQRKFDNLTKAERGGLSELDKAGFIKRQLVETRQITKHVAQILDSRMNTKYDENDKLIREVKVITLKSKLVSDFRKDFQFYKVREINNYHHAHDAYLNAVVGTALIKKYPKLESEFVYGDYKVYDVRKMIAKSEQEIGKATAKYFFYSNIMNFFKTEITLANGEIRKRPLIETNGETGEIVWDKGRDFATVRKVLSMPQVNIVKKTEVQTGGFSKESILPKRNSDKLIARKKDWDPKKYGGFDSPTVAYSVLVVAKVEKGKSKKLKSVKELLGITIMERSSFEKNPIDFLEAKGYKEVKKDLIIKLPKYSLFELENGRKRMLASAGELQKGNELALPSKYVNFLYLASHYEKLKGSPEDNEQKQLFVEQHKHYLDEIIEQISEFSKRVILADANLDKVLSAYNKHRDKPIREQAENIIHLFTLTNLGAPAAFKYFDTTIDRKRYTSTKEVLDATLIHQSITGLYETRIDLSQLGGDGGGSSGGSEAAAKGGTVSLQDEHRLFDIPVTTSLPDVWLQDFPQAWAETGGLGRAKCQAPIIIDLKPTAVPVSIKQYPMSLEAHMGIRQHIIKFLELGVLRPCRSPWNTPLLPVKKPGTQDYRPVQDLREINKRTVDIHPTVPNPYNLLSTLKPDYSWYTVLDLKDAFFCLPLAPQSQELFAFEWKDPERGISGQLTWTRLPQGFKNSPTLFNEALHRDLTDFRTQHPEVTLLQYVDDLLLAAPTKKACTQGTRHLLQELGEKGYRASAKKAQICQTKVTYLGYILSEGKRWLTPGRIETVARIPPPRNPREVREFLGTAGFCRLWIPGFAELAAPLYALTKPSTPFTWQTEHQLAFEALKKALLSAPALGLPDTSKPFTLFLDERQGIAKGVLTQKLGPWKRPVAYLSKKLDPVAAGWPPCLRIMAATAMLVKDSAKLTLGQPLTVITPHTLEAIVRQPPDRWITNARLTHYQALLLDTDRVQFGPPVTLNPATLLPVPENQPSPHDCRQVLAETHGTREDLKDQELPDADHTWYTDGSSYLDSGTRRAGAAVVDGHNTIWAQSLPPGTSAQKAELIALTKALELSKGKKANIYTDSRYAFATAHTHGSIYERRGWLTSEGKEIKNKAEIIALLKALFLPQEVAIIHCPGHQKGQDPVAVGNRQADRVARQAAMAEVLTLATEPDNTSHITAGKRTADGSEFEKRTADGSEFESPKKKAKVE

SEQ ID NO: 1568 - protein, 2100 aa, synthetic construct
MPAAKRVKLDGGDKKYSIGLDIGTNSVGWAVITDEYKVPSKKFKVLGNTDRHSIKKNLIGALLFDSGETAEATRLKRTARRRYTRRKNRICYLQEIFSNEMAKVDDSFFHRLEESFLVEEDKKHERHPIFGNIVDEVAYHEKYPTIYHLRKKLVDSTDKADLRLIYLALAHMIKFRGHFLIEGDLNPDNSDVDKLFIQLVQTYNQLFEENPINASGVDAKAILSARLSKSRRLENLIAQLPGEKKNGLFGNLIALSLGLTPNFKSNFDLAEDAKLQLSKDTYDDDLDNLLAQIGDQYADLFLAAKNLSDAILLSDILRVNTEITKAPLSASMIKRYDEHHQDLTLLKALVRQQLPEKYKEIFFDQSKNGYAGYIDGGASQEEFYKFIKPILEKMDGTEELLVKLNREDLLRKQRTFDNGSIPHQIHLGELHAILRRQEDFYPFLKDNREKIEKILTFRIPYYVGPLARGNSRFAWMTRKSEETITPWNFEEVVDKGASAQSFIERMTNFDKNLPNEKVLPKHSLLYEYFTVYNELTKVKYVTEGMRKPAFLSGEQKKAIVDLLFKTNRKVTVKQLKEDYFKKIECFDSVEISGVEDRFNASLGTYHDLLKIIKDKDFLDNEENEDILEDIVLTLTLFEDREMIEERLKTYAHLFDDKVMKQLKRRRYTGWGRLSRKLINGIRDKQSGKTILDFLKSDGFANRNFMQLIHDDSLTFKEDIQKAQVSGQGDSLHEHIANLAGSPAIKKGILQTVKVVDELVKVMGRHKPENIVIEMARENQTTQKGQKNSRERMKRIEEGIKELGSQILKEHPVENTQLQNEKLYLYYLQNGRDMYVDQELDINRLSDYDVDHIVPQSFLKDDSIDNKVLTRSDKARGKSDNVPSEEVVKKMKNYWRQLLNAKLITQRKFDNLTKAERGGLSELDKAGFIKRQLVETRQITKHVAQILDSRMNTKYDENDKLIREVKVITLKSKLVSDFRKDFQFYKVREINNYHHAHDAYLNAVVGTALIKKYPKLESEFVYGDYKVYDVRKMIAKSEQEIGKATAKYFFYSNIMNFFKTEITLANGEIRKRPLIETNGETGEIVWDKGRDFATVRKVLSMPQVNIVKKTEVQTGGFSKESILPKRNSDKLIARKKDWDPKKYGGFDSPTVAYSVLVVAKVEKGKSKKLKSVKELLGITIMERSSFEKNPIDFLEAKGYKEVKKDLIIKLPKYSLFELENGRKRMLASAGELQKGNELALPSKYVNFLYLASHYEKLKGSPEDNEQKQLFVEQHKHYLDEIIEQISEFSKRVILADANLDKVLSAYNKHRDKPIREQAENIIHLFTLTNLGAPAAFKYFDTTIDRKRYTSTKEVLDATLIHQSITGLYETRIDLSQLGGDGGPAPGSSGGGGGTVSLQDEHRLFDIPVTTSLPDVWLQDFPQAWAETGGLGRAKCQAPIIIDLKPTAVPVSIKQYPMSLEAHMGIRQHIIKFLELGVLRPCRSPWNTPLLPVKKPGTQDYRPVQDLREINKRTVDIHPTVPNPYNLLSTLKPDYSWYTVLDLKDAFFCLPLAPQSQELFAFEWKDPERGISGQLTWTRLPQGFKNSPTLFNEALHRDLTDFRTQHPEVTLLQYVDDLLLAAPTKKACTQGTRHLLQELGEKGYRASAKKAQICQTKVTYLGYILSEGKRWLTPGRIETVARIPPPRNPREVREFLGTAGFCRLWIPGFAELAAPLYALTKPSTPFTWQTEHQLAFEALKKALLSAPALGLPDTSKPFTLFLDERQGIAKGVLTQKLGPWKRPVAYLSKKLDPVAAGWPPCLRIMAATAMLVKDSAKLTLGQPLTVITPHTLEAIVRQPPDRWITNARLTHYQALLLDTDRVQFGPPVTLNPATLLPVPENQPSPHDCRQVLAETHGTREDLKDQELPDADHTWYTDGSSYLDSGTRRAGAAVVDGHNTIWAQSLPPGTSAQKAELIALTKALELSKGKKANIYTDSRYAFATAHTHGSIYERRGWLTSEGKEIKNKAEIIALLKALFLPQEVAIIHCPGHQKGQDPVAVGNRQADRVARQAAMAEVLTLATEPDNTSHITAGKRTADGSEFEKRTADGSEFESPKKKAKVE

SEQ ID NO: 1569 - protein, 2099 aa, synthetic construct
MPAAKRVKLDGGDKKYSIGLDIGTNSVGWAVITDEYKVPSKKFKVLGNTDRHSIKKNLIGALLFDSGETAEATRLKRTARRRYTRRKNRICYLQEIFSNEMAKVDDSFFHRLEESFLVEEDKKHERHPIFGNIVDEVAYHEKYPTIYHLRKKLVDSTDKADLRLIYLALAHMIKFRGHFLIEGDLNPDNSDVDKLFIQLVQTYNQLFEENPINASGVDAKAILSARLSKSRRLENLIAQLPGEKKNGLFGNLIALSLGLTPNFKSNFDLAEDAKLQLSKDTYDDDLDNLLAQIGDQYADLFLAAKNLSDAILLSDILRVNTEITKAPLSASMIKRYDEHHQDLTLLKALVRQQLPEKYKEIFFDQSKNGYAGYIDGGASQEEFYKFIKPILEKMDGTEELLVKLNREDLLRKQRTFDNGSIPHQIHLGELHAILRRQEDFYPFLKDNREKIEKILTFRIPYYVGPLARGNSRFAWMTRKSEETITPWNFEEVVDKGASAQSFIERMTNFDKNLPNEKVLPKHSLLYEYFTVYNELTKVKYVTEGMRKPAFLSGEQKKAIVDLLFKTNRKVTVKQLKEDYFKKIECFDSVEISGVEDRFNASLGTYHDLLKIIKDKDFLDNEENEDILEDIVLTLTLFEDREMIEERLKTYAHLFDDKVMKQLKRRRYTGWGRLSRKLINGIRDKQSGKTILDFLKSDGFANRNFMQLIHDDSLTFKEDIQKAQVSGQGDSLHEHIANLAGSPAIKKGILQTVKVVDELVKVMGRHKPENIVIEMARENQTTQKGQKNSRERMKRIEEGIKELGSQILKEHPVENTQLQNEKLYLYYLQNGRDMYVDQELDINRLSDYDVDHIVPQSFLKDDSIDNKVLTRSDKARGKSDNVPSEEVVKKMKNYWRQLLNAKLITQRKFDNLTKAERGGLSELDKAGFIKRQLVETRQITKHVAQILDSRMNTKYDENDKLIREVKVITLKSKLVSDFRKDFQFYKVREINNYHHAHDAYLNAVVGTALIKKYPKLESEFVYGDYKVYDVRKMIAKSEQEIGKATAKYFFYSNIMNFFKTEITLANGEIRKRPLIETNGETGEIVWDKGRDFATVRKVLSMPQVNIVKKTEVQTGGFSKESILPKRNSDKLIARKKDWDPKKYGGFDSPTVAYSVLVVAKVEKGKSKKLKSVKELLGITIMERSSFEKNPIDFLEAKGYKEVKKDLIIKLPKYSLFELENGRKRMLASAGELQKGNELALPSKYVNFLYLASHYEKLKGSPEDNEQKQLFVEQHKHYLDEIIEQISEFSKRVILADANLDKVLSAYNKHRDKPIREQAENIIHLFTLTNLGAPAAFKYFDTTIDRKRYTSTKEVLDATLIHQSITGLYETRIDLSQLGGDGGPAPEAAAKGGTVSLQDEHRLFDIPVTTSLPDVWLQDFPQAWAETGGLGRAKCQAPIIIDLKPTAVPVSIKQYPMSLEAHMGIRQHIIKFLELGVLRPCRSPWNTPLLPVKKPGTQDYRPVQDLREINKRTVDIHPTVPNPYNLLSTLKPDYSWYTVLDLKDAFFCLPLAPQSQELFAFEWKDPERGISGQLTWTRLPQGFKNSPTLFNEALHRDLTDFRTQHPEVTLLQYVDDLLLAAPTKKACTQGTRHLLQELGEKGYRASAKKAQICQTKVTYLGYILSEGKRWLTPGRIETVARIPPPRNPREVREFLGTAGFCRLWIPGFAELAAPLYALTKPSTPFTWQTEHQLAFEALKKALLSAPALGLPDTSKPFTLFLDERQGIAKGVLTQKLGPWKRPVAYLSKKLDPVAAGWPPCLRIMAATAMLVKDSAKLTLGQPLTVITPHTLEAIVRQPPDRWITNARLTHYQALLLDTDRVQFGPPVTLNPATLLPVPENQPSPHDCRQVLAETHGTREDLKDQELPDADHTWYTDGSSYLDSGTRRAGAAVVDGHNTIWAQSLPPGTSAQKAELIALTKALELSKGKKANIYTDSRYAFATAHTHGSIYERRGWLTSEGKEIKNKAEIIALLKALFLPQEVAIIHCPGHQKGQDPVAVGNRQADRVARQAAMAEVLTLATEPDNTSHITAGKRTADGSEFEKRTADGSEFESPKKKAKVE

SEQ ID NO: 1570 - protein, 2107 aa, synthetic construct
MPAAKRVKLDGGDKKYSIGLDIGTNSVGWAVITDEYKVPSKKFKVLGNTDRHSIKKNLIGALLFDSGETAEATRLKRTARRRYTRRKNRICYLQEIFSNEMAKVDDSFFHRLEESFLVEEDKKHERHPIFGNIVDEVAYHEKYPTIYHLRKKLVDSTDKADLRLIYLALAHMIKFRGHFLIEGDLNPDNSDVDKLFIQLVQTYNQLFEENPINASGVDAKAILSARLSKSRRLENLIAQLPGEKKNGLFGNLIALSLGLTPNFKSNFDLAEDAKLQLSKDTYDDDLDNLLAQIGDQYADLFLAAKNLSDAILLSDILRVNTEITKAPLSASMIKRYDEHHQDLTLLKALVRQQLPEKYKEIFFDQSKNGYAGYIDGGASQEEFYKFIKPILEKMDGTEELLVKLNREDLLRKQRTFDNGSIPHQIHLGELHAILRRQEDFYPFLKDNREKIEKILTFRIPYYVGPLARGNSRFAWMTRKSEETITPWNFEEVVDKGASAQSFIERMTNFDKNLPNEKVLPKHSLLYEYFTVYNELTKVKYVTEGMRKPAFLSGEQKKAIVDLLFKTNRKVTVKQLKEDYFKKIECFDSVEISGVEDRFNASLGTYHDLLKIIKDKDFLDNEENEDILEDIVLTLTLFEDREMIEERLKTYAHLFDDKVMKQLKRRRYTGWGRLSRKLINGIRDKQSGKTILDFLKSDGFANRNFMQLIHDDSLTFKEDIQKAQVSGQGDSLHEHIANLAGSPAIKKGILQTVKVVDELVKVMGRHKPENIVIEMARENQTTQKGQKNSRERMKRIEEGIKELGSQILKEHPVENTQLQNEKLYLYYLQNGRDMYVDQELDINRLSDYDVDHIVPQSFLKDDSIDNKVLTRSDKARGKSDNVPSEEVVKKMKNYWRQLLNAKLITQRKFDNLTKAERGGLSELDKAGFIKRQLVETRQITKHVAQILDSRMNTKYDENDKLIREVKVITLKSKLVSDFRKDFQFYKVREINNYHHAHDAYLNAVVGTALIKKYPKLESEFVYGDYKVYDVRKMIAKSEQEIGKATAKYFFYSNIMNFFKTEITLANGEIRKRPLIETNGETGEIVWDKGRDFATVRKVLSMPQVNIVKKTEVQTGGFSKESILPKRNSDKLIARKKDWDPKKYGGFDSPTVAYSVLVVAKVEKGKSKKLKSVKELLGITIMERSSFEKNPIDFLEAKGYKEVKKDLIIKLPKYSLFELENGRKRMLASAGELQKGNELALPSKYVNFLYLASHYEKLKGSPEDNEQKQLFVEQHKHYLDEIIEQISEFSKRVILADANLDKVLSAYNKHRDKPIREQAENIIHLFTLTNLGAPAAFKYFDTTIDRKRYTSTKEVLDATLIHQSITGLYETRIDLSQLGGDGGSGSETPGTSESATPESGGTVSLQDEHRLFDIPVTTSLPDVWLQDFPQAWAETGGLGRAKCQAPIIIDLKPTAVPVSIKQYPMSLEAHMGIRQHIIKFLELGVLRPCRSPWNTPLLPVKKPGTQDYRPVQDLREINKRTVDIHPTVPNPYNLLSTLKPDYSWYTVLDLKDAFFCLPLAPQSQELFAFEWKDPERGISGQLTWTRLPQGFKNSPTLFNEALHRDLTDFRTQHPEVTLLQYVDDLLLAAPTKKACTQGTRHLLQELGEKGYRASAKKAQICQTKVTYLGYILSEGKRWLTPGRIETVARIPPPRNPREVREFLGTAGFCRLWIPGFAELAAPLYALTKPSTPFTWQTEHQLAFEALKKALLSAPALGLPDTSKPFTLFLDERQGIAKGVLTQKLGPWKRPVAYLSKKLDPVAAGWPPCLRIMAATAMLVKDSAKLTLGQPLTVITPHTLEAIVRQPPDRWITNARLTHYQALLLDTDRVQFGPPVTLNPATLLPVPENQPSPHDCRQVLAETHGTREDLKDQELPDADHTWYTDGSSYLDSGTRRAGAAVVDGHNTIWAQSLPPGTSAQKAELIALTKALELSKGKKANIYTDSRYAFATAHTHGSIYERRGWLTSEGKEIKNKAEIIALLKALFLPQEVAIIHCPGHQKGQDPVAVGNRQADRVARQAAMAEVLTLATEPDNTSHITAGKRTADGSEFEKRTADGSEFESPKKKAKVE

SEQ ID NO: 1571 - protein, 2102 aa, synthetic construct
MPAAKRVKLDGGDKKYSIGLDIGTNSVGWAVITDEYKVPSKKFKVLGNTDRHSIKKNLIGALLFDSGETAEATRLKRTARRRYTRRKNRICYLQEIFSNEMAKVDDSFFHRLEESFLVEEDKKHERHPIFGNIVDEVAYHEKYPTIYHLRKKLVDSTDKADLRLIYLALAHMIKFRGHFLIEGDLNPDNSDVDKLFIQLVQTYNQLFEENPINASGVDAKAILSARLSKSRRLENLIAQLPGEKKNGLFGNLIALSLGLTPNFKSNFDLAEDAKLQLSKDTYDDDLDNLLAQIGDQYADLFLAAKNLSDAILLSDILRVNTEITKAPLSASMIKRYDEHHQDLTLLKALVRQQLPEKYKEIFFDQSKNGYAGYIDGGASQEEFYKFIKPILEKMDGTEELLVKLNREDLLRKQRTFDNGSIPHQIHLGELHAILRRQEDFYPFLKDNREKIEKILTFRIPYYVGPLARGNSRFAWMTRKSEETITPWNFEEVVDKGASAQSFIERMTNFDKNLPNEKVLPKHSLLYEYFTVYNELTKVKYVTEGMRKPAFLSGEQKKAIVDLLFKTNRKVTVKQLKEDYFKKIECFDSVEISGVEDRFNASLGTYHDLLKIIKDKDFLDNEENEDILEDIVLTLTLFEDREMIEERLKTYAHLFDDKVMKQLKRRRYTGWGRLSRKLINGIRDKQSGKTILDFLKSDGFANRNFMQLIHDDSLTFKEDIQKAQVSGQGDSLHEHIANLAGSPAIKKGILQTVKVVDELVKVMGRHKPENIVIEMARENQTTQKGQKNSRERMKRIEEGIKELGSQILKEHPVENTQLQNEKLYLYYLQNGRDMYVDQELDINRLSDYDVDHIVPQSFLKDDSIDNKVLTRSDKARGKSDNVPSEEVVKKMKNYWRQLLNAKLITQRKFDNLTKAERGGLSELDKAGFIKRQLVETRQITKHVAQILDSRMNTKYDENDKLIREVKVITLKSKLVSDFRKDFQFYKVREINNYHHAHDAYLNAVVGTALIKKYPKLESEFVYGDYKVYDVRKMIAKSEQEIGKATAKYFFYSNIMNFFKTEITLANGEIRKRPLIETNGETGEIVWDKGRDFATVRKVLSMPQVNIVKKTEVQTGGFSKESILPKRNSDKLIARKKDWDPKKYGGFDSPTVAYSVLVVAKVEKGKSKKLKSVKELLGITIMERSSFEKNPIDFLEAKGYKEVKKDLIIKLPKYSLFELENGRKRMLASAGELQKGNELALPSKYVNFLYLASHYEKLKGSPEDNEQKQLFVEQHKHYLDEIIEQISEFSKRVILADANLDKVLSAYNKHRDKPIREQAENIIHLFTLTNLGAPAAFKYFDTTIDRKRYTSTKEVLDATLIHQSITGLYETRIDLSQLGGDGGEAAAKGSSPAPGGTVSLQDEHRLFDIPVTTSLPDVWLQDFPQAWAETGGLGRAKCQAPIIIDLKPTAVPVSIKQYPMSLEAHMGIRQHIIKFLELGVLRPCRSPWNTPLLPVKKPGTQDYRPVQDLREINKRTVDIHPTVPNPYNLLSTLKPDYSWYTVLDLKDAFFCLPLAPQSQELFAFEWKDPERGISGQLTWTRLPQGFKNSPTLFNEALHRDLTDFRTQHPEVTLLQYVDDLLLAAPTKKACTQGTRHLLQELGEKGYRASAKKAQICQTKVTYLGYILSEGKRWLTPGRIETVARIPPPRNPREVREFLGTAGFCRLWIPGFAELAAPLYALTKPSTPFTWQTEHQLAFEALKKALLSAPALGLPDTSKPFTLFLDERQGIAKGVLTQKLGPWKRPVAYLSKKLDPVAAGWPPCLRIMAATAMLVKDSAKLTLGQPLTVITPHTLEAIVRQPPDRWITNARLTHYQALLLDTDRVQFGPPVTLNPATLLPVPENQPSPHDCRQVLAETHGTREDLKDQELPDADHTWYTDGSSYLDSGTRRAGAAVVDGHNTIWAQSLPPGTSAQKAELIALTKALELSKGKKANIYTDSRYAFATAHTHGSIYERRGWLTSEGKEIKNKAEIIALLKALFLPQEVAIIHCPGHQKGQDPVAVGNRQADRVARQAAMAEVLTLATEPDNTSHITAGKRTADGSEFEKRTADGSEFESPKKKAKVE

SEQ ID NO: 1572 - protein, 2097 aa, synthetic construct
MPAAKRVKLDGGDKKYSIGLDIGTNSVGWAVITDEYKVPSKKFKVLGNTDRHSIKKNLIGALLFDSGETAEATRLKRTARRRYTRRKNRICYLQEIFSNEMAKVDDSFFHRLEESFLVEEDKKHERHPIFGNIVDEVAYHEKYPTIYHLRKKLVDSTDKADLRLIYLALAHMIKFRGHFLIEGDLNPDNSDVDKLFIQLVQTYNQLFEENPINASGVDAKAILSARLSKSRRLENLIAQLPGEKKNGLFGNLIALSLGLTPNFKSNFDLAEDAKLQLSKDTYDDDLDNLLAQIGDQYADLFLAAKNLSDAILLSDILRVNTEITKAPLSASMIKRYDEHHQDLTLLKALVRQQLPEKYKEIFFDQSKNGYAGYIDGGASQEEFYKFIKPILEKMDGTEELLVKLNREDLLRKQRTFDNGSIPHQIHLGELHAILRRQEDFYPFLKDNREKIEKILTFRIPYYVGPLARGNSRFAWMTRKSEETITPWNFEEVVDKGASAQSFIERMTNFDKNLPNEKVLPKHSLLYEYFTVYNELTKVKYVTEGMRKPAFLSGEQKKAIVDLLFKTNRKVTVKQLKEDYFKKIECFDSVEISGVEDRFNASLGTYHDLLKIIKDKDFLDNEENEDILEDIVLTLTLFEDREMIEERLKTYAHLFDDKVMKQLKRRRYTGWGRLSRKLINGIRDKQSGKTILDFLKSDGFANRNFMQLIHDDSLTFKEDIQKAQVSGQGDSLHEHIANLAGSPAIKKGILQTVKVVDELVKVMGRHKPENIVIEMARENQTTQKGQKNSRERMKRIEEGIKELGSQILKEHPVENTQLQNEKLYLYYLQNGRDMYVDQELDINRLSDYDVDHIVPQSFLKDDSIDNKVLTRSDKARGKSDNVPSEEVVKKMKNYWRQLLNAKLITQRKFDNLTKAERGGLSELDKAGFIKRQLVETRQITKHVAQILDSRMNTKYDENDKLIREVKVITLKSKLVSDFRKDFQFYKVREINNYHHAHDAYLNAVVGTALIKKYPKLESEFVYGDYKVYDVRKMIAKSEQEIGKATAKYFFYSNIMNFFKTEITLANGEIRKRPLIETNGETGEIVWDKGRDFATVRKVLSMPQVNIVKKTEVQTGGFSKESILPKRNSDKLIARKKDWDPKKYGGFDSPTVAYSVLVVAKVEKGKSKKLKSVKELLGITIMERSSFEKNPIDFLEAKGYKEVKKDLIIKLPKYSLFELENGRKRMLASAGELQKGNELALPSKYVNFLYLASHYEKLKGSPEDNEQKQLFVEQHKHYLDEIIEQISEFSKRVILADANLDKVLSAYNKHRDKPIREQAENIIHLFTLTNLGAPAAFKYFDTTIDRKRYTSTKEVLDATLIHQSITGLYETRIDLSQLGGDGGGGGGGGGGTVSLQDEHRLFDIPVTTSLPDVWLQDFPQAWAETGGLGRAKCQAPIIIDLKPTAVPVSIKQYPMSLEAHMGIRQHIIKFLELGVLRPCRSPWNTPLLPVKKPGTQDYRPVQDLREINKRTVDIHPTVPNPYNLLSTLKPDYSWYTVLDLKDAFFCLPLAPQSQELFAFEWKDPERGISGQLTWTRLPQGFKNSPTLFNEALHRDLTDFRTQHPEVTLLQYVDDLLLAAPTKKACTQGTRHLLQELGEKGYRASAKKAQICQTKVTYLGYILSEGKRWLTPGRIETVARIPPPRNPREVREFLGTAGFCRLWIPGFAELAAPLYALTKPSTPFTWQTEHQLAFEALKKALLSAPALGLPDTSKPFTLFLDERQGIAKGVLTQKLGPWKRPVAYLSKKLDPVAAGWPPCLRIMAATAMLVKDSAKLTLGQPLTVITPHTLEAIVRQPPDRWITNARLTHYQALLLDTDRVQFGPPVTLNPATLLPVPENQPSPHDCRQVLAETHGTREDLKDQELPDADHTWYTDGSSYLDSGTRRAGAAVVDGHNTIWAQSLPPGTSAQKAELIALTKALELSKGKKANIYTDSRYAFATAHTHGSIYERRGWLTSEGKEIKNKAEIIALLKALFLPQEVAIIHCPGHQKGQDPVAVGNRQADRVARQAAMAEVLTLATEPDNTSHITAGKRTADGSEFEKRTADGSEFESPKKKAKVE

SEQ ID NO: 1573 - protein, 2100 aa, synthetic construct
MPAAKRVKLDGGDKKYSIGLDIGTNSVGWAVITDEYKVPSKKFKVLGNTDRHSIKKNLIGALLFDSGETAEATRLKRTARRRYTRRKNRICYLQEIFSNEMAKVDDSFFHRLEESFLVEEDKKHERHPIFGNIVDEVAYHEKYPTIYHLRKKLVDSTDKADLRLIYLALAHMIKFRGHFLIEGDLNPDNSDVDKLFIQLVQTYNQLFEENPINASGVDAKAILSARLSKSRRLENLIAQLPGEKKNGLFGNLIALSLGLTPNFKSNFDLAEDAKLQLSKDTYDDDLDNLLAQIGDQYADLFLAAKNLSDAILLSDILRVNTEITKAPLSASMIKRYDEHHQDLTLLKALVRQQLPEKYKEIFFDQSKNGYAGYIDGGASQEEFYKFIKPILEKMDGTEELLVKLNREDLLRKQRTFDNGSIPHQIHLGELHAILRRQEDFYPFLKDNREKIEKILTFRIPYYVGPLARGNSRFAWMTRKSEETITPWNFEEVVDKGASAQSFIERMTNFDKNLPNEKVLPKHSLLYEYFTVYNELTKVKYVTEGMRKPAFLSGEQKKAIVDLLFKTNRKVTVKQLKEDYFKKIECFDSVEISGVEDRFNASLGTYHDLLKIIKDKDFLDNEENEDILEDIVLTLTLFEDREMIEERLKTYAHLFDDKVMKQLKRRRYTGWGRLSRKLINGIRDKQSGKTILDFLKSDGFANRNFMQLIHDDSLTFKEDIQKAQVSGQGDSLHEHIANLAGSPAIKKGILQTVKVVDELVKVMGRHKPENIVIEMARENQTTQKGQKNSRERMKRIEEGIKELGSQILKEHPVENTQLQNEKLYLYYLQNGRDMYVDQELDINRLSDYDVDHIVPQSFLKDDSIDNKVLTRSDKARGKSDNVPSEEVVKKMKNYWRQLLNAKLITQRKFDNLTKAERGGLSELDKAGFIKRQLVETRQITKHVAQILDSRMNTKYDENDKLIREVKVITLKSKLVSDFRKDFQFYKVREINNYHHAHDAYLNAVVGTALIKKYPKLESEFVYGDYKVYDVRKMIAKSEQEIGKATAKYFFYSNIMNFFKTEITLANGEIRKRPLIETNGETGEIVWDKGRDFATVRKVLSMPQVNIVKKTEVQTGGFSKESILPKRNSDKLIARKKDWDPKKYGGFDSPTVAYSVLVVAKVEKGKSKKLKSVKELLGITIMERSSFEKNPIDFLEAKGYKEVKKDLIIKLPKYSLFELENGRKRMLASAGELQKGNELALPSKYVNFLYLASHYEKLKGSPEDNEQKQLFVEQHKHYLDEIIEQISEFSKRVILADANLDKVLSAYNKHRDKPIREQAENIIHLFTLTNLGAPAAFKYFDTTIDRKRYTSTKEVLDATLIHQSITGLYETRIDLSQLGGDGGGGSGGSGGSGGTVSLQDEHRLFDIPVTTSLPDVWLQDFPQAWAETGGLGRAKCQAPIIIDLKPTAVPVSIKQYPMSLEAHMGIRQHIIKFLELGVLRPCRSPWNTPLLPVKKPGTQDYRPVQDLREINKRTVDIHPTVPNPYNLLSTLKPDYSWYTVLDLKDAFFCLPLAPQSQELFAFEWKDPERGISGQLTWTRLPQGFKNSPTLFNEALHRDLTDFRTQHPEVTLLQYVDDLLLAAPTKKACTQGTRHLLQELGEKGYRASAKKAQICQTKVTYLGYILSEGKRWLTPGRIETVARIPPPRNPREVREFLGTAGFCRLWIPGFAELAAPLYALTKPSTPFTWQTEHQLAFEALKKALLSAPALGLPDTSKPFTLFLDERQGIAKGVLTQKLGPWKRPVAYLSKKLDPVAAGWPPCLRIMAATAMLVKDSAKLTLGQPLTVITPHTLEAIVRQPPDRWITNARLTHYQALLLDTDRVQFGPPVTLNPATLLPVPENQPSPHDCRQVLAETHGTREDLKDQELPDADHTWYTDGSSYLDSGTRRAGAAVVDGHNTIWAQSLPPGTSAQKAELIALTKALELSKGKKANIYTDSRYAFATAHTHGSIYERRGWLTSEGKEIKNKAEIIALLKALFLPQEVAIIHCPGHQKGQDPVAVGNRQADRVARQAAMAEVLTLATEPDNTSHITAGKRTADGSEFEKRTADGSEFESPKKKAKVE

SEQ ID NO: 1574 - protein, 2102 aa, synthetic construct
MPAAKRVKLDGGDKKYSIGLDIGTNSVGWAVITDEYKVPSKKFKVLGNTDRHSIKKNLIGALLFDSGETAEATRLKRTARRRYTRRKNRICYLQEIFSNEMAKVDDSFFHRLEESFLVEEDKKHERHPIFGNIVDEVAYHEKYPTIYHLRKKLVDSTDKADLRLIYLALAHMIKFRGHFLIEGDLNPDNSDVDKLFIQLVQTYNQLFEENPINASGVDAKAILSARLSKSRRLENLIAQLPGEKKNGLFGNLIALSLGLTPNFKSNFDLAEDAKLQLSKDTYDDDLDNLLAQIGDQYADLFLAAKNLSDAILLSDILRVNTEITKAPLSASMIKRYDEHHQDLTLLKALVRQQLPEKYKEIFFDQSKNGYAGYIDGGASQEEFYKFIKPILEKMDGTEELLVKLNREDLLRKQRTFDNGSIPHQIHLGELHAILRRQEDFYPFLKDNREKIEKILTFRIPYYVGPLARGNSRFAWMTRKSEETITPWNFEEVVDKGASAQSFIERMTNFDKNLPNEKVLPKHSLLYEYFTVYNELTKVKYVTEGMRKPAFLSGEQKKAIVDLLFKTNRKVTVKQLKEDYFKKIECFDSVEISGVEDRFNASLGTYHDLLKIIKDKDFLDNEENEDILEDIVLTLTLFEDREMIEERLKTYAHLFDDKVMKQLKRRRYTGWGRLSRKLINGIRDKQSGKTILDFLKSDGFANRNFMQLIHDDSLTFKEDIQKAQVSGQGDSLHEHIANLAGSPAIKKGILQTVKVVDELVKVMGRHKPENIVIEMARENQTTQKGQKNSRERMKRIEEGIKELGSQILKEHPVENTQLQNEKLYLYYLQNGRDMYVDQELDINRLSDYDVDHIVPQSFLKDDSIDNKVLTRSDKARGKSDNVPSEEVVKKMKNYWRQLLNAKLITQRKFDNLTKAERGGLSELDKAGFIKRQLVETRQITKHVAQILDSRMNTKYDENDKLIREVKVITLKSKLVSDFRKDFQFYKVREINNYHHAHDAYLNAVVGTALIKKYPKLESEFVYGDYKVYDVRKMIAKSEQEIGKATAKYFFYSNIMNFFKTEITLANGEIRKRPLIETNGETGEIVWDKGRDFATVRKVLSMPQVNIVKKTEVQTGGFSKESILPKRNSDKLIARKKDWDPKKYGGFDSPTVAYSVLVVAKVEKGKSKKLKSVKELLGITIMERSSFEKNPIDFLEAKGYKEVKKDLIIKLPKYSLFELENGRKRMLASAGELQKGNELALPSKYVNFLYLASHYEKLKGSPEDNEQKQLFVEQHKHYLDEIIEQISEFSKRVILADANLDKVLSAYNKHRDKPIREQAENIIHLFTLTNLGAPAAFKYFDTTIDRKRYTSTKEVLDATLIHQSITGLYETRIDLSQLGGDGGGGGEAAAKGSSGGTVSLQDEHRLFDIPVTTSLPDVWLQDFPQAWAETGGLGRAKCQAPIIIDLKPTAVPVSIKQYPMSLEAHMGIRQHIIKFLELGVLRPCRSPWNTPLLPVKKPGTQDYRPVQDLREINKRTVDIHPTVPNPYNLLSTLKPDYSWYTVLDLKDAFFCLPLAPQSQELFAFEWKDPERGISGQLTWTRLPQGFKNSPTLFNEALHRDLTDFRTQHPEVTLLQYVDDLLLAAPTKKACTQGTRHLLQELGEKGYRASAKKAQICQTKVTYLGYILSEGKRWLTPGRIETVARIPPPRNPREVREFLGTAGFCRLWIPGFAELAAPLYALTKPSTPFTWQTEHQLAFEALKKALLSAPALGLPDTSKPFTLFLDERQGIAKGVLTQKLGPWKRPVAYLSKKLDPVAAGWPPCLRIMAATAMLVKDSAKLTLGQPLTVITPHTLEAIVRQPPDRWITNARLTHYQALLLDTDRVQFGPPVTLNPATLLPVPENQPSPHDCRQVLAETHGTREDLKDQELPDADHTWYTDGSSYLDSGTRRAGAAVVDGHNTIWAQSLPPGTSAQKAELIALTKALELSKGKKANIYTDSRYAFATAHTHGSIYERRGWLTSEGKEIKNKAEIIALLKALFLPQEVAIIHCPGHQKGQDPVAVGNRQADRVARQAAMAEVLTLATEPDNTSHITAGKRTADGSEFEKRTADGSEFESPKKKAKVE

SEQ ID NO: 1575 - protein, 2102 aa, synthetic construct
MPAAKRVKLDGGDKKYSIGLDIGTNSVGWAVITDEYKVPSKKFKVLGNTDRHSIKKNLIGALLFDSGETAEATRLKRTARRRYTRRKNRICYLQEIFSNEMAKVDDSFFHRLEESFLVEEDKKHERHPIFGNIVDEVAYHEKYPTIYHLRKKLVDSTDKADLRLIYLALAHMIKFRGHFLIEGDLNPDNSDVDKLFIQLVQTYNQLFEENPINASGVDAKAILSARLSKSRRLENLIAQLPGEKKNGLFGNLIALSLGLTPNFKSNFDLAEDAKLQLSKDTYDDDLDNLLAQIGDQYADLFLAAKNLSDAILLSDILRVNTEITKAPLSASMIKRYDEHHQDLTLLKALVRQQLPEKYKEIFFDQSKNGYAGYIDGGASQEEFYKFIKPILEKMDGTEELLVKLNREDLLRKQRTFDNGSIPHQIHLGELHAILRRQEDFYPFLKDNREKIEKILTFRIPYYVGPLARGNSRFAWMTRKSEETITPWNFEEVVDKGASAQSFIERMTNFDKNLPNEKVLPKHSLLYEYFTVYNELTKVKYVTEGMRKPAFLSGEQKKAIVDLLFKTNRKVTVKQLKEDYFKKIECFDSVEISGVEDRFNASLGTYHDLLKIIKDKDFLDNEENEDILEDIVLTLTLFEDREMIEERLKTYAHLFDDKVMKQLKRRRYTGWGRLSRKLINGIRDKQSGKTILDFLKSDGFANRNFMQLIHDDSLTFKEDIQKAQVSGQGDSLHEHIANLAGSPAIKKGILQTVKVVDELVKVMGRHKPENIVIEMARENQTTQKGQKNSRERMKRIEEGIKELGSQILKEHPVENTQLQNEKLYLYYLQNGRDMYVDQELDINRLSDYDVDHIVPQSFLKDDSIDNKVLTRSDKARGKSDNVPSEEVVKKMKNYWRQLLNAKLITQRKFDNLTKAERGGLSELDKAGFIKRQLVETRQITKHVAQILDSRMNTKYDENDKLIREVKVITLKSKLVSDFRKDFQFYKVREINNYHHAHDAYLNAVVGTALIKKYPKLESEFVYGDYKVYDVRKMIAKSEQEIGKATAKYFFYSNIMNFFKTEITLANGEIRKRPLIETNGETGEIVWDKGRDFATVRKVLSMPQVNIVKKTEVQTGGFSKESILPKRNSDKLIARKKDWDPKKYGGFDSPTVAYSVLVVAKVEKGKSKKLKSVKELLGITIMERSSFEKNPIDFLEAKGYKEVKKDLIIKLPKYSLFELENGRKRMLASAGELQKGNELALPSKYVNFLYLASHYEKLKGSPEDNEQKQLFVEQHKHYLDEIIEQISEFSKRVILADANLDKVLSAYNKHRDKPIREQAENIIHLFTLTNLGAPAAFKYFDTTIDRKRYTSTKEVLDATLIHQSITGLYETRIDLSQLGGDGGPAPEAAAKGSSGGTVSLQDEHRLFDIPVTTSLPDVWLQDFPQAWAETGGLGRAKCQAPIIIDLKPTAVPVSIKQYPMSLEAHMGIRQHIIKFLELGVLRPCRSPWNTPLLPVKKPGTQDYRPVQDLREINKRTVDIHPTVPNPYNLLSTLKPDYSWYTVLDLKDAFFCLPLAPQSQELFAFEWKDPERGISGQLTWTRLPQGFKNSPTLFNEALHRDLTDFRTQHPEVTLLQYVDDLLLAAPTKKACTQGTRHLLQELGEKGYRASAKKAQICQTKVTYLGYILSEGKRWLTPGRIETVARIPPPRNPREVREFLGTAGFCRLWIPGFAELAAPLYALTKPSTPFTWQTEHQLAFEALKKALLSAPALGLPDTSKPFTLFLDERQGIAKGVLTQKLGPWKRPVAYLSKKLDPVAAGWPPCLRIMAATAMLVKDSAKLTLGQPLTVITPHTLEAIVRQPPDRWITNARLTHYQALLLDTDRVQFGPPVTLNPATLLPVPENQPSPHDCRQVLAETHGTREDLKDQELPDADHTWYTDGSSYLDSGTRRAGAAVVDGHNTIWAQSLPPGTSAQKAELIALTKALELSKGKKANIYTDSRYAFATAHTHGSIYERRGWLTSEGKEIKNKAEIIALLKALFLPQEVAIIHCPGHQKGQDPVAVGNRQADRVARQAAMAEVLTLATEPDNTSHITAGKRTADGSEFEKRTADGSEFESPKKKAKVE

SEQ ID NO: 1576 - protein, 2102 aa, synthetic construct
MPAAKRVKLDGGDKKYSIGLDIGTNSVGWAVITDEYKVPSKKFKVLGNTDRHSIKKNLIGALLFDSGETAEATRLKRTARRRYTRRKNRICYLQEIFSNEMAKVDDSFFHRLEESFLVEEDKKHERHPIFGNIVDEVAYHEKYPTIYHLRKKLVDSTDKADLRLIYLALAHMIKFRGHFLIEGDLNPDNSDVDKLFIQLVQTYNQLFEENPINASGVDAKAILSARLSKSRRLENLIAQLPGEKKNGLFGNLIALSLGLTPNFKSNFDLAEDAKLQLSKDTYDDDLDNLLAQIGDQYADLFLAAKNLSDAILLSDILRVNTEITKAPLSASMIKRYDEHHQDLTLLKALVRQQLPEKYKEIFFDQSKNGYAGYIDGGASQEEFYKFIKPILEKMDGTEELLVKLNREDLLRKQRTFDNGSIPHQIHLGELHAILRRQEDFYPFLKDNREKIEKILTFRIPYYVGPLARGNSRFAWMTRKSEETITPWNFEEVVDKGASAQSFIERMTNFDKNLPNEKVLPKHSLLYEYFTVYNELTKVKYVTEGMRKPAFLSGEQKKAIVDLLFKTNRKVTVKQLKEDYFKKIECFDSVEISGVEDRFNASLGTYHDLLKIIKDKDFLDNEENEDILEDIVLTLTLFEDREMIEERLKTYAHLFDDKVMKQLKRRRYTGWGRLSRKLINGIRDKQSGKTILDFLKSDGFANRNFMQLIHDDSLTFKEDIQKAQVSGQGDSLHEHIANLAGSPAIKKGILQTVKVVDELVKVMGRHKPENIVIEMARENQTTQKGQKNSRERMKRIEEGIKELGSQILKEHPVENTQLQNEKLYLYYLQNGRDMYVDQELDINRLSDYDVDHIVPQSFLKDDSIDNKVLTRSDKARGKSDNVPSEEVVKKMKNYWRQLLNAKLITQRKFDNLTKAERGGLSELDKAGFIKRQLVETRQITKHVAQILDSRMNTKYDENDKLIREVKVITLKSKLVSDFRKDFQFYKVREINNYHHAHDAYLNAVVGTALIKKYPKLESEFVYGDYKVYDVRKMIAKSEQEIGKATAKYFFYSNIMNFFKTEITLANGEIRKRPLIETNGETGEIVWDKGRDFATVRKVLSMPQVNIVKKTEVQTGGFSKESILPKRNSDKLIARKKDWDPKKYGGFDSPTVAYSVLVVAKVEKGKSKKLKSVKELLGITIMERSSFEKNPIDFLEAKGYKEVKKDLIIKLPKYSLFELENGRKRMLASAGELQKGNELALPSKYVNFLYLASHYEKLKGSPEDNEQKQLFVEQHKHYLDEIIEQISEFSKRVILADANLDKVLSAYNKHRDKPIREQAENIIHLFTLTNLGAPAAFKYFDTTIDRKRYTSTKEVLDATLIHQSITGLYETRIDLSQLGGDGGEAAAKGSSGGGGGTVSLQDEHRLFDIPVTTSLPDVWLQDFPQAWAETGGLGRAKCQAPIIIDLKPTAVPVSIKQYPMSLEAHMGIRQHIIKFLELGVLRPCRSPWNTPLLPVKKPGTQDYRPVQDLREINKRTVDIHPTVPNPYNLLSTLKPDYSWYTVLDLKDAFFCLPLAPQSQELFAFEWKDPERGISGQLTWTRLPQGFKNSPTLFNEALHRDLTDFRTQHPEVTLLQYVDDLLLAAPTKKACTQGTRHLLQELGEKGYRASAKKAQICQTKVTYLGYILSEGKRWLTPGRIETVARIPPPRNPREVREFLGTAGFCRLWIPGFAELAAPLYALTKPSTPFTWQTEHQLAFEALKKALLSAPALGLPDTSKPFTLFLDERQGIAKGVLTQKLGPWKRPVAYLSKKLDPVAAGWPPCLRIMAATAMLVKDSAKLTLGQPLTVITPHTLEAIVRQPPDRWITNARLTHYQALLLDTDRVQFGPPVTLNPATLLPVPENQPSPHDCRQVLAETHGTREDLKDQELPDADHTWYTDGSSYLDSGTRRAGAAVVDGHNTIWAQSLPPGTSAQKAELIALTKALELSKGKKANIYTDSRYAFATAHTHGSIYERRGWLTSEGKEIKNKAEIIALLKALFLPQEVAIIHCPGHQKGQDPVAVGNRQADRVARQAAMAEVLTLATEPDNTSHITAGKRTADGSEFEKRTADGSEFESPKKKAKVE

SEQ ID NO: 1577 - protein, 2102 aa, synthetic construct
MPAAKRVKLDGGDKKYSIGLDIGTNSVGWAVITDEYKVPSKKFKVLGNTDRHSIKKNLIGALLFDSGETAEATRLKRTARRRYTRRKNRICYLQEIFSNEMAKVDDSFFHRLEESFLVEEDKKHERHPIFGNIVDEVAYHEKYPTIYHLRKKLVDSTDKADLRLIYLALAHMIKFRGHFLIEGDLNPDNSDVDKLFIQLVQTYNQLFEENPINASGVDAKAILSARLSKSRRLENLIAQLPGEKKNGLFGNLIALSLGLTPNFKSNFDLAEDAKLQLSKDTYDDDLDNLLAQIGDQYADLFLAAKNLSDAILLSDILRVNTEITKAPLSASMIKRYDEHHQDLTLLKALVRQQLPEKYKEIFFDQSKNGYAGYIDGGASQEEFYKFIKPILEKMDGTEELLVKLNREDLLRKQRTFDNGSIPHQIHLGELHAILRRQEDFYPFLKDNREKIEKILTFRIPYYVGPLARGNSRFAWMTRKSEETITPWNFEEVVDKGASAQSFIERMTNFDKNLPNEKVLPKHSLLYEYFTVYNELTKVKYVTEGMRKPAFLSGEQKKAIVDLLFKTNRKVTVKQLKEDYFKKIECFDSVEISGVEDRFNASLGTYHDLLKIIKDKDFLDNEENEDILEDIVLTLTLFEDREMIEERLKTYAHLFDDKVMKQLKRRRYTGWGRLSRKLINGIRDKQSGKTILDFLKSDGFANRNFMQLIHDDSLTFKEDIQKAQVSGQGDSLHEHIANLAGSPAIKKGILQTVKVVDELVKVMGRHKPENIVIEMARENQTTQKGQKNSRERMKRIEEGIKELGSQILKEHPVENTQLQNEKLYLYYLQNGRDMYVDQELDINRLSDYDVDHIVPQSFLKDDSIDNKVLTRSDKARGKSDNVPSEEVVKKMKNYWRQLLNAKLITQRKFDNLTKAERGGLSELDKAGFIKRQLVETRQITKHVAQILDSRMNTKYDENDKLIREVKVITLKSKLVSDFRKDFQFYKVREINNYHHAHDAYLNAVVGTALIKKYPKLESEFVYGDYKVYDVRKMIAKSEQEIGKATAKYFFYSNIMNFFKTEITLANGEIRKRPLIETNGETGEIVWDKGRDFATVRKVLSMPQVNIVKKTEVQTGGFSKESILPKRNSDKLIARKKDWDPKKYGGFDSPTVAYSVLVVAKVEKGKSKKLKSVKELLGITIMERSSFEKNPIDFLEAKGYKEVKKDLIIKLPKYSLFELENGRKRMLASAGELQKGNELALPSKYVNFLYLASHYEKLKGSPEDNEQKQLFVEQHKHYLDEIIEQISEFSKRVILADANLDKVLSAYNKHRDKPIREQAENIIHLFTLTNLGAPAAFKYFDTTIDRKRYTSTKEVLDATLIHQSITGLYETRIDLSQLGGDGGEAAAKGGGGGSGGTVSLQDEHRLFDIPVTTSLPDVWLQDFPQAWAETGGLGRAKCQAPIIIDLKPTAVPVSIKQYPMSLEAHMGIRQHIIKFLELGVLRPCRSPWNTPLLPVKKPGTQDYRPVQDLREINKRTVDIHPTVPNPYNLLSTLKPDYSWYTVLDLKDAFFCLPLAPQSQELFAFEWKDPERGISGQLTWTRLPQGFKNSPTLFNEALHRDLTDFRTQHPEVTLLQYVDDLLLAAPTKKACTQGTRHLLQELGEKGYRASAKKAQICQTKVTYLGYILSEGKRWLTPGRIETVARIPPPRNPREVREFLGTAGFCRLWIPGFAELAAPLYALTKPSTPFTWQTEHQLAFEALKKALLSAPALGLPDTSKPFTLFLDERQGIAKGVLTQKLGPWKRPVAYLSKKLDPVAAGWPPCLRIMAATAMLVKDSAKLTLGQPLTVITPHTLEAIVRQPPDRWITNARLTHYQALLLDTDRVQFGPPVTLNPATLLPVPENQPSPHDCRQVLAETHGTREDLKDQELPDADHTWYTDGSSYLDSGTRRAGAAVVDGHNTIWAQSLPPGTSAQKAELIALTKALELSKGKKANIYTDSRYAFATAHTHGSIYERRGWLTSEGKEIKNKAEIIALLKALFLPQEVAIIHCPGHQKGQDPVAVGNRQADRVARQAAMAEVLTLATEPDNTSHITAGKRTADGSEFEKRTADGSEFESPKKKAKVE

SEQ ID NO: 1578 - protein, 2100 aa, synthetic construct
MPAAKRVKLDGGDKKYSIGLDIGTNSVGWAVITDEYKVPSKKFKVLGNTDRHSIKKNLIGALLFDSGETAEATRLKRTARRRYTRRKNRICYLQEIFSNEMAKVDDSFFHRLEESFLVEEDKKHERHPIFGNIVDEVAYHEKYPTIYHLRKKLVDSTDKADLRLIYLALAHMIKFRGHFLIEGDLNPDNSDVDKLFIQLVQTYNQLFEENPINASGVDAKAILSARLSKSRRLENLIAQLPGEKKNGLFGNLIALSLGLTPNFKSNFDLAEDAKLQLSKDTYDDDLDNLLAQIGDQYADLFLAAKNLSDAILLSDILRVNTEITKAPLSASMIKRYDEHHQDLTLLKALVRQQLPEKYKEIFFDQSKNGYAGYIDGGASQEEFYKFIKPILEKMDGTEELLVKLNREDLLRKQRTFDNGSIPHQIHLGELHAILRRQEDFYPFLKDNREKIEKILTFRIPYYVGPLARGNSRFAWMTRKSEETITPWNFEEVVDKGASAQSFIERMTNFDKNLPNEKVLPKHSLLYEYFTVYNELTKVKYVTEGMRKPAFLSGEQKKAIVDLLFKTNRKVTVKQLKEDYFKKIECFDSVEISGVEDRFNASLGTYHDLLKIIKDKDFLDNEENEDILEDIVLTLTLFEDREMIEERLKTYAHLFDDKVMKQLKRRRYTGWGRLSRKLINGIRDKQSGKTILDFLKSDGFANRNFMQLIHDDSLTFKEDIQKAQVSGQGDSLHEHIANLAGSPAIKKGILQTVKVVDELVKVMGRHKPENIVIEMARENQTTQKGQKNSRERMKRIEEGIKELGSQILKEHPVENTQLQNEKLYLYYLQNGRDMYVDQELDINRLSDYDVDHIVPQSFLKDDSIDNKVLTRSDKARGKSDNVPSEEVVKKMKNYWRQLLNAKLITQRKFDNLTKAERGGLSELDKAGFIKRQLVETRQITKHVAQILDSRMNTKYDENDKLIREVKVITLKSKLVSDFRKDFQFYKVREINNYHHAHDAYLNAVVGTALIKKYPKLESEFVYGDYKVYDVRKMIAKSEQEIGKATAKYFFYSNIMNFFKTEITLANGEIRKRPLIETNGETGEIVWDKGRDFATVRKVLSMPQVNIVKKTEVQTGGFSKESILPKRNSDKLIARKKDWDPKKYGGFDSPTVAYSVLVVAKVEKGKSKKLKSVKELLGITIMERSSFEKNPIDFLEAKGYKEVKKDLIIKLPKYSLFELENGRKRMLASAGELQKGNELALPSKYVNFLYLASHYEKLKGSPEDNEQKQLFVEQHKHYLDEIIEQISEFSKRVILADANLDKVLSAYNKHRDKPIREQAENIIHLFTLTNLGAPAAFKYFDTTIDRKRYTSTKEVLDATLIHQSITGLYETRIDLSQLGGDGGGGGGSSPAPGGTVSLQDEHRLFDIPVTTSLPDVWLQDFPQAWAETGGLGRAKCQAPIIIDLKPTAVPVSIKQYPMSLEAHMGIRQHIIKFLELGVLRPCRSPWNTPLLPVKKPGTQDYRPVQDLREINKRTVDIHPTVPNPYNLLSTLKPDYSWYTVLDLKDAFFCLPLAPQSQELFAFEWKDPERGISGQLTWTRLPQGFKNSPTLFNEALHRDLTDFRTQHPEVTLLQYVDDLLLAAPTKKACTQGTRHLLQELGEKGYRASAKKAQICQTKVTYLGYILSEGKRWLTPGRIETVARIPPPRNPREVREFLGTAGFCRLWIPGFAELAAPLYALTKPSTPFTWQTEHQLAFEALKKALLSAPALGLPDTSKPFTLFLDERQGIAKGVLTQKLGPWKRPVAYLSKKLDPVAAGWPPCLRIMAATAMLVKDSAKLTLGQPLTVITPHTLEAIVRQPPDRWITNARLTHYQALLLDTDRVQFGPPVTLNPATLLPVPENQPSPHDCRQVLAETHGTREDLKDQELPDADHTWYTDGSSYLDSGTRRAGAAVVDGHNTIWAQSLPPGTSAQKAELIALTKALELSKGKKANIYTDSRYAFATAHTHGSIYERRGWLTSEGKEIKNKAEIIALLKALFLPQEVAIIHCPGHQKGQDPVAVGNRQADRVARQAAMAEVLTLATEPDNTSHITAGKRTADGSEFEKRTADGSEFESPKKKAKVE

SEQ ID NO: 1579 - protein, 2102 aa, synthetic construct
MPAAKRVKLDGGDKKYSIGLDIGTNSVGWAVITDEYKVPSKKFKVLGNTDRHSIKKNLIGALLFDSGETAEATRLKRTARRRYTRRKNRICYLQEIFSNEMAKVDDSFFHRLEESFLVEEDKKHERHPIFGNIVDEVAYHEKYPTIYHLRKKLVDSTDKADLRLIYLALAHMIKFRGHFLIEGDLNPDNSDVDKLFIQLVQTYNQLFEENPINASGVDAKAILSARLSKSRRLENLIAQLPGEKKNGLFGNLIALSLGLTPNFKSNFDLAEDAKLQLSKDTYDDDLDNLLAQIGDQYADLFLAAKNLSDAILLSDILRVNTEITKAPLSASMIKRYDEHHQDLTLLKALVRQQLPEKYKEIFFDQSKNGYAGYIDGGASQEEFYKFIKPILEKMDGTEELLVKLNREDLLRKQRTFDNGSIPHQIHLGELHAILRRQEDFYPFLKDNREKIEKILTFRIPYYVGPLARGNSRFAWMTRKSEETITPWNFEEVVDKGASAQSFIERMTNFDKNLPNEKVLPKHSLLYEYFTVYNELTKVKYVTEGMRKPAFLSGEQKKAIVDLLFKTNRKVTVKQLKEDYFKKIECFDSVEISGVEDRFNASLGTYHDLLKIIKDKDFLDNEENEDILEDIVLTLTLFEDREMIEERLKTYAHLFDDKVMKQLKRRRYTGWGRLSRKLINGIRDKQSGKTILDFLKSDGFANRNFMQLIHDDSLTFKEDIQKAQVSGQGDSLHEHIANLAGSPAIKKGILQTVKVVDELVKVMGRHKPENIVIEMARENQTTQKGQKNSRERMKRIEEGIKELGSQILKEHPVENTQLQNEKLYLYYLQNGRDMYVDQELDINRLSDYDVDHIVPQSFLKDDSIDNKVLTRSDKARGKSDNVPSEEVVKKMKNYWRQLLNAKLITQRKFDNLTKAERGGLSELDKAGFIKRQLVETRQITKHVAQILDSRMNTKYDENDKLIREVKVITLKSKLVSDFRKDFQFYKVREINNYHHAHDAYLNAVVGTALIKKYPKLESEFVYGDYKVYDVRKMIAKSEQEIGKATAKYFFYSNIMNFFKTEITLANGEIRKRPLIETNGETGEIVWDKGRDFATVRKVLSMPQVNIVKKTEVQTGGFSKESILPKRNSDKLIARKKDWDPKKYGGFDSPTVAYSVLVVAKVEKGKSKKLKSVKELLGITIMERSSFEKNPIDFLEAKGYKEVKKDLIIKLPKYSLFELENGRKRMLASAGELQKGNELALPSKYVNFLYLASHYEKLKGSPEDNEQKQLFVEQHKHYLDEIIEQISEFSKRVILADANLDKVLSAYNKHRDKPIREQAENIIHLFTLTNLGAPAAFKYFDTTIDRKRYTSTKEVLDATLIHQSITGLYETRIDLSQLGGDGGEAAAKPAPGGSGGTVSLQDEHRLFDIPVTTSLPDVWLQDFPQAWAETGGLGRAKCQAPIIIDLKPTAVPVSIKQYPMSLEAHMGIRQHIIKFLELGVLRPCRSPWNTPLLPVKKPGTQDYRPVQDLREINKRTVDIHPTVPNPYNLLSTLKPDYSWYTVLDLKDAFFCLPLAPQSQELFAFEWKDPERGISGQLTWTRLPQGFKNSPTLFNEALHRDLTDFRTQHPEVTLLQYVDDLLLAAPTKKACTQGTRHLLQELGEKGYRASAKKAQICQTKVTYLGYILSEGKRWLTPGRIETVARIPPPRNPREVREFLGTAGFCRLWIPGFAELAAPLYALTKPSTPFTWQTEHQLAFEALKKALLSAPALGLPDTSKPFTLFLDERQGIAKGVLTQKLGPWKRPVAYLSKKLDPVAAGWPPCLRIMAATAMLVKDSAKLTLGQPLTVITPHTLEAIVRQPPDRWITNARLTHYQALLLDTDRVQFGPPVTLNPATLLPVPENQPSPHDCRQVLAETHGTREDLKDQELPDADHTWYTDGSSYLDSGTRRAGAAVVDGHNTIWAQSLPPGTSAQKAELIALTKALELSKGKKANIYTDSRYAFATAHTHGSIYERRGWLTSEGKEIKNKAEIIALLKALFLPQEVAIIHCPGHQKGQDPVAVGNRQADRVARQAAMAEVLTLATEPDNTSHITAGKRTADGSEFEKRTADGSEFESPKKKAKVE

SEQ ID NO: 1580 - protein, 2102 aa, synthetic construct
MPAAKRVKLDGGDKKYSIGLDIGTNSVGWAVITDEYKVPSKKFKVLGNTDRHSIKKNLIGALLFDSGETAEATRLKRTARRRYTRRKNRICYLQEIFSNEMAKVDDSFFHRLEESFLVEEDKKHERHPIFGNIVDEVAYHEKYPTIYHLRKKLVDSTDKADLRLIYLALAHMIKFRGHFLIEGDLNPDNSDVDKLFIQLVQTYNQLFEENPINASGVDAKAILSARLSKSRRLENLIAQLPGEKKNGLFGNLIALSLGLTPNFKSNFDLAEDAKLQLSKDTYDDDLDNLLAQIGDQYADLFLAAKNLSDAILLSDILRVNTEITKAPLSASMIKRYDEHHQDLTLLKALVRQQLPEKYKEIFFDQSKNGYAGYIDGGASQEEFYKFIKPILEKMDGTEELLVKLNREDLLRKQRTFDNGSIPHQIHLGELHAILRRQEDFYPFLKDNREKIEKILTFRIPYYVGPLARGNSRFAWMTRKSEETITPWNFEEVVDKGASAQSFIERMTNFDKNLPNEKVLPKHSLLYEYFTVYNELTKVKYVTEGMRKPAFLSGEQKKAIVDLLFKTNRKVTVKQLKEDYFKKIECFDSVEISGVEDRFNASLGTYHDLLKIIKDKDFLDNEENEDILEDIVLTLTLFEDREMIEERLKTYAHLFDDKVMKQLKRRRYTGWGRLSRKLINGIRDKQSGKTILDFLKSDGFANRNFMQLIHDDSLTFKEDIQKAQVSGQGDSLHEHIANLAGSPAIKKGILQTVKVVDELVKVMGRHKPENIVIEMARENQTTQKGQKNSRERMKRIEEGIKELGSQILKEHPVENTQLQNEKLYLYYLQNGRDMYVDQELDINRLSDYDVDHIVPQSFLKDDSIDNKVLTRSDKARGKSDNVPSEEVVKKMKNYWRQLLNAKLITQRKFDNLTKAERGGLSELDKAGFIKRQLVETRQITKHVAQILDSRMNTKYDENDKLIREVKVITLKSKLVSDFRKDFQFYKVREINNYHHAHDAYLNAVVGTALIKKYPKLESEFVYGDYKVYDVRKMIAKSEQEIGKATAKYFFYSNIMNFFKTEITLANGEIRKRPLIETNGETGEIVWDKGRDFATVRKVLSMPQVNIVKKTEVQTGGFSKESILPKRNSDKLIARKKDWDPKKYGGFDSPTVAYSVLVVAKVEKGKSKKLKSVKELLGITIMERSSFEKNPIDFLEAKGYKEVKKDLIIKLPKYSLFELENGRKRMLASAGELQKGNELALPSKYVNFLYLASHYEKLKGSPEDNEQKQLFVEQHKHYLDEIIEQISEFSKRVILADANLDKVLSAYNKHRDKPIREQAENIIHLFTLTNLGAPAAFKYFDTTIDRKRYTSTKEVLDATLIHQSITGLYETRIDLSQLGGDGGPAPGGGEAAAKGGTVSLQDEHRLFDIPVTTSLPDVWLQDFPQAWAETGGLGRAKCQAPIIIDLKPTAVPVSIKQYPMSLEAHMGIRQHIIKFLELGVLRPCRSPWNTPLLPVKKPGTQDYRPVQDLREINKRTVDIHPTVPNPYNLLSTLKPDYSWYTVLDLKDAFFCLPLAPQSQELFAFEWKDPERGISGQLTWTRLPQGFKNSPTLFNEALHRDLTDFRTQHPEVTLLQYVDDLLLAAPTKKACTQGTRHLLQELGEKGYRASAKKAQICQTKVTYLGYILSEGKRWLTPGRIETVARIPPPRNPREVREFLGTAGFCRLWIPGFAELAAPLYALTKPSTPFTWQTEHQLAFEALKKALLSAPALGLPDTSKPFTLFLDERQGIAKGVLTQKLGPWKRPVAYLSKKLDPVAAGWPPCLRIMAATAMLVKDSAKLTLGQPLTVITPHTLEAIVRQPPDRWITNARLTHYQALLLDTDRVQFGPPVTLNPATLLPVPENQPSPHDCRQVLAETHGTREDLKDQELPDADHTWYTDGSSYLDSGTRRAGAAVVDGHNTIWAQSLPPGTSAQKAELIALTKALELSKGKKANIYTDSRYAFATAHTHGSIYERRGWLTSEGKEIKNKAEIIALLKALFLPQEVAIIHCPGHQKGQDPVAVGNRQADRVARQAAMAEVLTLATEPDNTSHITAGKRTADGSEFEKRTADGSEFESPKKKAKVE

SEQ ID NO: 1581 - protein, 2102 aa, synthetic construct
MPAAKRVKLDGGDKKYSIGLDIGTNSVGWAVITDEYKVPSKKFKVLGNTDRHSIKKNLIGALLFDSGETAEATRLKRTARRRYTRRKNRICYLQEIFSNEMAKVDDSFFHRLEESFLVEEDKKHERHPIFGNIVDEVAYHEKYPTIYHLRKKLVDSTDKADLRLIYLALAHMIKFRGHFLIEGDLNPDNSDVDKLFIQLVQTYNQLFEENPINASGVDAKAILSARLSKSRRLENLIAQLPGEKKNGLFGNLIALSLGLTPNFKSNFDLAEDAKLQLSKDTYDDDLDNLLAQIGDQYADLFLAAKNLSDAILLSDILRVNTEITKAPLSASMIKRYDEHHQDLTLLKALVRQQLPEKYKEIFFDQSKNGYAGYIDGGASQEEFYKFIKPILEKMDGTEELLVKLNREDLLRKQRTFDNGSIPHQIHLGELHAILRRQEDFYPFLKDNREKIEKILTFRIPYYVGPLARGNSRFAWMTRKSEETITPWNFEEVVDKGASAQSFIERMTNFDKNLPNEKVLPKHSLLYEYFTVYNELTKVKYVTEGMRKPAFLSGEQKKAIVDLLFKTNRKVTVKQLKEDYFKKIECFDSVEISGVEDRFNASLGTYHDLLKIIKDKDFLDNEENEDILEDIVLTLTLFEDREMIEERLKTYAHLFDDKVMKQLKRRRYTGWGRLSRKLINGIRDKQSGKTILDFLKSDGFANRNFMQLIHDDSLTFKEDIQKAQVSGQGDSLHEHIANLAGSPAIKKGILQTVKVVDELVKVMGRHKPENIVIEMARENQTTQKGQKNSRERMKRIEEGIKELGSQILKEHPVENTQLQNEKLYLYYLQNGRDMYVDQELDINRLSDYDVDHIVPQSFLKDDSIDNKVLTRSDKARGKSDNVPSEEVVKKMKNYWRQLLNAKLITQRKFDNLTKAERGGLSELDKAGFIKRQLVETRQITKHVAQILDSRMNTKYDENDKLIREVKVITLKSKLVSDFRKDFQFYKVREINNYHHAHDAYLNAVVGTALIKKYPKLESEFVYGDYKVYDVRKMIAKSEQEIGKATAKYFFYSNIMNFFKTEITLANGEIRKRPLIETNGETGEIVWDKGRDFATVRKVLSMPQVNIVKKTEVQTGGFSKESILPKRNSDKLIARKKDWDPKKYGGFDSPTVAYSVLVVAKVEKGKSKKLKSVKELLGITIMERSSFEKNPIDFLEAKGYKEVKKDLIIKLPKYSLFELENGRKRMLASAGELQKGNELALPSKYVNFLYLASHYEKLKGSPEDNEQKQLFVEQHKHYLDEIIEQISEFSKRVILADANLDKVLSAYNKHRDKPIREQAENIIHLFTLTNLGAPAAFKYFDTTIDRKRYTSTKEVLDATLIHQSITGLYETRIDLSQLGGDGGPAPEAAAKGGGGGTVSLQDEHRLFDIPVTTSLPDVWLQDFPQAWAETGGLGRAKCQAPIIIDLKPTAVPVSIKQYPMSLEAHMGIRQHIIKFLELGVLRPCRSPWNTPLLPVKKPGTQDYRPVQDLREINKRTVDIHPTVPNPYNLLSTLKPDYSWYTVLDLKDAFFCLPLAPQSQELFAFEWKDPERGISGQLTWTRLPQGFKNSPTLFNEALHRDLTDFRTQHPEVTLLQYVDDLLLAAPTKKACTQGTRHLLQELGEKGYRASAKKAQICQTKVTYLGYILSEGKRWLTPGRIETVARIPPPRNPREVREFLGTAGFCRLWIPGFAELAAPLYALTKPSTPFTWQTEHQLAFEALKKALLSAPALGLPDTSKPFTLFLDERQGIAKGVLTQKLGPWKRPVAYLSKKLDPVAAGWPPCLRIMAATAMLVKDSAKLTLGQPLTVITPHTLEAIVRQPPDRWITNARLTHYQALLLDTDRVQFGPPVTLNPATLLPVPENQPSPHDCRQVLAETHGTREDLKDQELPDADHTWYTDGSSYLDSGTRRAGAAVVDGHNTIWAQSLPPGTSAQKAELIALTKALELSKGKKANIYTDSRYAFATAHTHGSIYERRGWLTSEGKEIKNKAEIIALLKALFLPQEVAIIHCPGHQKGQDPVAVGNRQADRVARQAAMAEVLTLATEPDNTSHITAGKRTADGSEFEKRTADGSEFESPKKKAKVE

SEQ ID NO: 1582 - protein, 2100 aa, synthetic construct
MPAAKRVKLDGGDKKYSIGLDIGTNSVGWAVITDEYKVPSKKFKVLGNTDRHSIKKNLIGALLFDSGETAEATRLKRTARRRYTRRKNRICYLQEIFSNEMAKVDDSFFHRLEESFLVEEDKKHERHPIFGNIVDEVAYHEKYPTIYHLRKKLVDSTDKADLRLIYLALAHMIKFRGHFLIEGDLNPDNSDVDKLFIQLVQTYNQLFEENPINASGVDAKAILSARLSKSRRLENLIAQLPGEKKNGLFGNLIALSLGLTPNFKSNFDLAEDAKLQLSKDTYDDDLDNLLAQIGDQYADLFLAAKNLSDAILLSDILRVNTEITKAPLSASMIKRYDEHHQDLTLLKALVRQQLPEKYKEIFFDQSKNGYAGYIDGGASQEEFYKFIKPILEKMDGTEELLVKLNREDLLRKQRTFDNGSIPHQIHLGELHAILRRQEDFYPFLKDNREKIEKILTFRIPYYVGPLARGNSRFAWMTRKSEETITPWNFEEVVDKGASAQSFIERMTNFDKNLPNEKVLPKHSLLYEYFTVYNELTKVKYVTEGMRKPAFLSGEQKKAIVDLLFKTNRKVTVKQLKEDYFKKIECFDSVEISGVEDRFNASLGTYHDLLKIIKDKDFLDNEENEDILEDIVLTLTLFEDREMIEERLKTYAHLFDDKVMKQLKRRRYTGWGRLSRKLINGIRDKQSGKTILDFLKSDGFANRNFMQLIHDDSLTFKEDIQKAQVSGQGDSLHEHIANLAGSPAIKKGILQTVKVVDELVKVMGRHKPENIVIEMARENQTTQKGQKNSRERMKRIEEGIKELGSQILKEHPVENTQLQNEKLYLYYLQNGRDMYVDQELDINRLSDYDVDHIVPQSFLKDDSIDNKVLTRSDKARGKSDNVPSEEVVKKMKNYWRQLLNAKLITQRKFDNLTKAERGGLSELDKAGFIKRQLVETRQITKHVAQILDSRMNTKYDENDKLIREVKVITLKSKLVSDFRKDFQFYKVREINNYHHAHDAYLNAVVGTALIKKYPKLESEFVYGDYKVYDVRKMIAKSEQEIGKATAKYFFYSNIMNFFKTEITLANGEIRKRPLIETNGETGEIVWDKGRDFATVRKVLSMPQVNIVKKTEVQTGGFSKESILPKRNSDKLIARKKDWDPKKYGGFDSPTVAYSVLVVAKVEKGKSKKLKSVKELLGITIMERSSFEKNPIDFLEAKGYKEVKKDLIIKLPKYSLFELENGRKRMLASAGELQKGNELALPSKYVNFLYLASHYEKLKGSPEDNEQKQLFVEQHKHYLDEIIEQISEFSKRVILADANLDKVLSAYNKHRDKPIREQAENIIHLFTLTNLGAPAAFKYFDTTIDRKRYTSTKEVLDATLIHQSITGLYETRIDLSQLGGDGGGSSGSSGSSGGTVSLQDEHRLFDIPVTTSLPDVWLQDFPQAWAETGGLGRAKCQAPIIIDLKPTAVPVSIKQYPMSLEAHMGIRQHIIKFLELGVLRPCRSPWNTPLLPVKKPGTQDYRPVQDLREINKRTVDIHPTVPNPYNLLSTLKPDYSWYTVLDLKDAFFCLPLAPQSQELFAFEWKDPERGISGQLTWTRLPQGFKNSPTLFNEALHRDLTDFRTQHPEVTLLQYVDDLLLAAPTKKACTQGTRHLLQELGEKGYRASAKKAQICQTKVTYLGYILSEGKRWLTPGRIETVARIPPPRNPREVREFLGTAGFCRLWIPGFAELAAPLYALTKPSTPFTWQTEHQLAFEALKKALLSAPALGLPDTSKPFTLFLDERQGIAKGVLTQKLGPWKRPVAYLSKKLDPVAAGWPPCLRIMAATAMLVKDSAKLTLGQPLTVITPHTLEAIVRQPPDRWITNARLTHYQALLLDTDRVQFGPPVTLNPATLLPVPENQPSPHDCRQVLAETHGTREDLKDQELPDADHTWYTDGSSYLDSGTRRAGAAVVDGHNTIWAQSLPPGTSAQKAELIALTKALELSKGKKANIYTDSRYAFATAHTHGSIYERRGWLTSEGKEIKNKAEIIALLKALFLPQEVAIIHCPGHQKGQDPVAVGNRQADRVARQAAMAEVLTLATEPDNTSHITAGKRTADGSEFEKRTADGSEFESPKKKAKVE

SEQ ID NO: 1583 - protein, 2099 aa, synthetic construct
MPAAKRVKLDGGDKKYSIGLDIGTNSVGWAVITDEYKVPSKKFKVLGNTDRHSIKKNLIGALLFDSGETAEATRLKRTARRRYTRRKNRICYLQEIFSNEMAKVDDSFFHRLEESFLVEEDKKHERHPIFGNIVDEVAYHEKYPTIYHLRKKLVDSTDKADLRLIYLALAHMIKFRGHFLIEGDLNPDNSDVDKLFIQLVQTYNQLFEENPINASGVDAKAILSARLSKSRRLENLIAQLPGEKKNGLFGNLIALSLGLTPNFKSNFDLAEDAKLQLSKDTYDDDLDNLLAQIGDQYADLFLAAKNLSDAILLSDILRVNTEITKAPLSASMIKRYDEHHQDLTLLKALVRQQLPEKYKEIFFDQSKNGYAGYIDGGASQEEFYKFIKPILEKMDGTEELLVKLNREDLLRKQRTFDNGSIPHQIHLGELHAILRRQEDFYPFLKDNREKIEKILTFRIPYYVGPLARGNSRFAWMTRKSEETITPWNFEEVVDKGASAQSFIERMTNFDKNLPNEKVLPKHSLLYEYFTVYNELTKVKYVTEGMRKPAFLSGEQKKAIVDLLFKTNRKVTVKQLKEDYFKKIECFDSVEISGVEDRFNASLGTYHDLLKIIKDKDFLDNEENEDILEDIVLTLTLFEDREMIEERLKTYAHLFDDKVMKQLKRRRYTGWGRLSRKLINGIRDKQSGKTILDFLKSDGFANRNFMQLIHDDSLTFKEDIQKAQVSGQGDSLHEHIANLAGSPAIKKGILQTVKVVDELVKVMGRHKPENIVIEMARENQTTQKGQKNSRERMKRIEEGIKELGSQILKEHPVENTQLQNEKLYLYYLQNGRDMYVDQELDINRLSDYDVDHIVPQSFLKDDSIDNKVLTRSDKARGKSDNVPSEEVVKKMKNYWRQLLNAKLITQRKFDNLTKAERGGLSELDKAGFIKRQLVETRQITKHVAQILDSRMNTKYDENDKLIREVKVITLKSKLVSDFRKDFQFYKVREINNYHHAHDAYLNAVVGTALIKKYPKLESEFVYGDYKVYDVRKMIAKSEQEIGKATAKYFFYSNIMNFFKTEITLANGEIRKRPLIETNGETGEIVWDKGRDFATVRKVLSMPQVNIVKKTEVQTGGFSKESILPKRNSDKLIARKKDWDPKKYGGFDSPTVAYSVLVVAKVEKGKSKKLKSVKELLGITIMERSSFEKNPIDFLEAKGYKEVKKDLIIKLPKYSLFELENGRKRMLASAGELQKGNELALPSKYVNFLYLASHYEKLKGSPEDNEQKQLFVEQHKHYLDEIIEQISEFSKRVILADANLDKVLSAYNKHRDKPIREQAENIIHLFTLTNLGAPAAFKYFDTTIDRKRYTSTKEVLDATLIHQSITGLYETRIDLSQLGGDGGEAAAKGSSGGTVSLQDEHRLFDIPVTTSLPDVWLQDFPQAWAETGGLGRAKCQAPIIIDLKPTAVPVSIKQYPMSLEAHMGIRQHIIKFLELGVLRPCRSPWNTPLLPVKKPGTQDYRPVQDLREINKRTVDIHPTVPNPYNLLSTLKPDYSWYTVLDLKDAFFCLPLAPQSQELFAFEWKDPERGISGQLTWTRLPQGFKNSPTLFNEALHRDLTDFRTQHPEVTLLQYVDDLLLAAPTKKACTQGTRHLLQELGEKGYRASAKKAQICQTKVTYLGYILSEGKRWLTPGRIETVARIPPPRNPREVREFLGTAGFCRLWIPGFAELAAPLYALTKPSTPFTWQTEHQLAFEALKKALLSAPALGLPDTSKPFTLFLDERQGIAKGVLTQKLGPWKRPVAYLSKKLDPVAAGWPPCLRIMAATAMLVKDSAKLTLGQPLTVITPHTLEAIVRQPPDRWITNARLTHYQALLLDTDRVQFGPPVTLNPATLLPVPENQPSPHDCRQVLAETHGTREDLKDQELPDADHTWYTDGSSYLDSGTRRAGAAVVDGHNTIWAQSLPPGTSAQKAELIALTKALELSKGKKANIYTDSRYAFATAHTHGSIYERRGWLTSEGKEIKNKAEIIALLKALFLPQEVAIIHCPGHQKGQDPVAVGNRQADRVARQAAMAEVLTLATEPDNTSHITAGKRTADGSEFEKRTADGSEFESPKKKAKVE

SEQ ID NO: 1584 - protein, 2100 aa, synthetic construct
MPAAKRVKLDGGDKKYSIGLDIGTNSVGWAVITDEYKVPSKKFKVLGNTDRHSIKKNLIGALLFDSGETAEATRLKRTARRRYTRRKNRICYLQEIFSNEMAKVDDSFFHRLEESFLVEEDKKHERHPIFGNIVDEVAYHEKYPTIYHLRKKLVDSTDKADLRLIYLALAHMIKFRGHFLIEGDLNPDNSDVDKLFIQLVQTYNQLFEENPINASGVDAKAILSARLSKSRRLENLIAQLPGEKKNGLFGNLIALSLGLTPNFKSNFDLAEDAKLQLSKDTYDDDLDNLLAQIGDQYADLFLAAKNLSDAILLSDILRVNTEITKAPLSASMIKRYDEHHQDLTLLKALVRQQLPEKYKEIFFDQSKNGYAGYIDGGASQEEFYKFIKPILEKMDGTEELLVKLNREDLLRKQRTFDNGSIPHQIHLGELHAILRRQEDFYPFLKDNREKIEKILTFRIPYYVGPLARGNSRFAWMTRKSEETITPWNFEEVVDKGASAQSFIERMTNFDKNLPNEKVLPKHSLLYEYFTVYNELTKVKYVTEGMRKPAFLSGEQKKAIVDLLFKTNRKVTVKQLKEDYFKKIECFDSVEISGVEDRFNASLGTYHDLLKIIKDKDFLDNEENEDILEDIVLTLTLFEDREMIEERLKTYAHLFDDKVMKQLKRRRYTGWGRLSRKLINGIRDKQSGKTILDFLKSDGFANRNFMQLIHDDSLTFKEDIQKAQVSGQGDSLHEHIANLAGSPAIKKGILQTVKVVDELVKVMGRHKPENIVIEMARENQTTQKGQKNSRERMKRIEEGIKELGSQILKEHPVENTQLQNEKLYLYYLQNGRDMYVDQELDINRLSDYDVDHIVPQSFLKDDSIDNKVLTRSDKARGKSDNVPSEEVVKKMKNYWRQLLNAKLITQRKFDNLTKAERGGLSELDKAGFIKRQLVETRQITKHVAQILDSRMNTKYDENDKLIREVKVITLKSKLVSDFRKDFQFYKVREINNYHHAHDAYLNAVVGTALIKKYPKLESEFVYGDYKVYDVRKMIAKSEQEIGKATAKYFFYSNIMNFFKTEITLANGEIRKRPLIETNGETGEIVWDKGRDFATVRKVLSMPQVNIVKKTEVQTGGFSKESILPKRNSDKLIARKKDWDPKKYGGFDSPTVAYSVLVVAKVEKGKSKKLKSVKELLGITIMERSSFEKNPIDFLEAKGYKEVKKDLIIKLPKYSLFELENGRKRMLASAGELQKGNELALPSKYVNFLYLASHYEKLKGSPEDNEQKQLFVEQHKHYLDEIIEQISEFSKRVILADANLDKVLSAYNKHRDKPIREQAENIIHLFTLTNLGAPAAFKYFDTTIDRKRYTSTKEVLDATLIHQSITGLYETRIDLSQLGGDGGGSSGGSPAPGGTVSLQDEHRLFDIPVTTSLPDVWLQDFPQAWAETGGLGRAKCQAPIIIDLKPTAVPVSIKQYPMSLEAHMGIRQHIIKFLELGVLRPCRSPWNTPLLPVKKPGTQDYRPVQDLREINKRTVDIHPTVPNPYNLLSTLKPDYSWYTVLDLKDAFFCLPLAPQSQELFAFEWKDPERGISGQLTWTRLPQGFKNSPTLFNEALHRDLTDFRTQHPEVTLLQYVDDLLLAAPTKKACTQGTRHLLQELGEKGYRASAKKAQICQTKVTYLGYILSEGKRWLTPGRIETVARIPPPRNPREVREFLGTAGFCRLWIPGFAELAAPLYALTKPSTPFTWQTEHQLAFEALKKALLSAPALGLPDTSKPFTLFLDERQGIAKGVLTQKLGPWKRPVAYLSKKLDPVAAGWPPCLRIMAATAMLVKDSAKLTLGQPLTVITPHTLEAIVRQPPDRWITNARLTHYQALLLDTDRVQFGPPVTLNPATLLPVPENQPSPHDCRQVLAETHGTREDLKDQELPDADHTWYTDGSSYLDSGTRRAGAAVVDGHNTIWAQSLPPGTSAQKAELIALTKALELSKGKKANIYTDSRYAFATAHTHGSIYERRGWLTSEGKEIKNKAEIIALLKALFLPQEVAIIHCPGHQKGQDPVAVGNRQADRVARQAAMAEVLTLATEPDNTSHITAGKRTADGSEFEKRTADGSEFESPKKKAKVE

SEQ ID NO: 1585 - protein, 2102 aa, synthetic construct
MPAAKRVKLDGGDKKYSIGLDIGTNSVGWAVITDEYKVPSKKFKVLGNTDRHSIKKNLIGALLFDSGETAEATRLKRTARRRYTRRKNRICYLQEIFSNEMAKVDDSFFHRLEESFLVEEDKKHERHPIFGNIVDEVAYHEKYPTIYHLRKKLVDSTDKADLRLIYLALAHMIKFRGHFLIEGDLNPDNSDVDKLFIQLVQTYNQLFEENPINASGVDAKAILSARLSKSRRLENLIAQLPGEKKNGLFGNLIALSLGLTPNFKSNFDLAEDAKLQLSKDTYDDDLDNLLAQIGDQYADLFLAAKNLSDAILLSDILRVNTEITKAPLSASMIKRYDEHHQDLTLLKALVRQQLPEKYKEIFFDQSKNGYAGYIDGGASQEEFYKFIKPILEKMDGTEELLVKLNREDLLRKQRTFDNGSIPHQIHLGELHAILRRQEDFYPFLKDNREKIEKILTFRIPYYVGPLARGNSRFAWMTRKSEETITPWNFEEVVDKGASAQSFIERMTNFDKNLPNEKVLPKHSLLYEYFTVYNELTKVKYVTEGMRKPAFLSGEQKKAIVDLLFKTNRKVTVKQLKEDYFKKIECFDSVEISGVEDRFNASLGTYHDLLKIIKDKDFLDNEENEDILEDIVLTLTLFEDREMIEERLKTYAHLFDDKVMKQLKRRRYTGWGRLSRKLINGIRDKQSGKTILDFLKSDGFANRNFMQLIHDDSLTFKEDIQKAQVSGQGDSLHEHIANLAGSPAIKKGILQTVKVVDELVKVMGRHKPENIVIEMARENQTTQKGQKNSRERMKRIEEGIKELGSQILKEHPVENTQLQNEKLYLYYLQNGRDMYVDQELDINRLSDYDVDHIVPQSFLKDDSIDNKVLTRSDKARGKSDNVPSEEVVKKMKNYWRQLLNAKLITQRKFDNLTKAERGGLSELDKAGFIKRQLVETRQITKHVAQILDSRMNTKYDENDKLIREVKVITLKSKLVSDFRKDFQFYKVREINNYHHAHDAYLNAVVGTALIKKYPKLESEFVYGDYKVYDVRKMIAKSEQEIGKATAKYFFYSNIMNFFKTEITLANGEIRKRPLIETNGETGEIVWDKGRDFATVRKVLSMPQVNIVKKTEVQTGGFSKESILPKRNSDKLIARKKDWDPKKYGGFDSPTVAYSVLVVAKVEKGKSKKLKSVKELLGITIMERSSFEKNPIDFLEAKGYKEVKKDLIIKLPKYSLFELENGRKRMLASAGELQKGNELALPSKYVNFLYLASHYEKLKGSPEDNEQKQLFVEQHKHYLDEIIEQISEFSKRVILADANLDKVLSAYNKHRDKPIREQAENIIHLFTLTNLGAPAAFKYFDTTIDRKRYTSTKEVLDATLIHQSITGLYETRIDLSQLGGDGGGGGEAAAKGGSGGTVSLQDEHRLFDIPVTTSLPDVWLQDFPQAWAETGGLGRAKCQAPIIIDLKPTAVPVSIKQYPMSLEAHMGIRQHIIKFLELGVLRPCRSPWNTPLLPVKKPGTQDYRPVQDLREINKRTVDIHPTVPNPYNLLSTLKPDYSWYTVLDLKDAFFCLPLAPQSQELFAFEWKDPERGISGQLTWTRLPQGFKNSPTLFNEALHRDLTDFRTQHPEVTLLQYVDDLLLAAPTKKACTQGTRHLLQELGEKGYRASAKKAQICQTKVTYLGYILSEGKRWLTPGRIETVARIPPPRNPREVREFLGTAGFCRLWIPGFAELAAPLYALTKPSTPFTWQTEHQLAFEALKKALLSAPALGLPDTSKPFTLFLDERQGIAKGVLTQKLGPWKRPVAYLSKKLDPVAAGWPPCLRIMAATAMLVKDSAKLTLGQPLTVITPHTLEAIVRQPPDRWITNARLTHYQALLLDTDRVQFGPPVTLNPATLLPVPENQPSPHDCRQVLAETHGTREDLKDQELPDADHTWYTDGSSYLDSGTRRAGAAVVDGHNTIWAQSLPPGTSAQKAELIALTKALELSKGKKANIYTDSRYAFATAHTHGSIYERRGWLTSEGKEIKNKAEIIALLKALFLPQEVAIIHCPGHQKGQDPVAVGNRQADRVARQAAMAEVLTLATEPDNTSHITAGKRTADGSEFEKRTADGSEFESPKKKAKVE

SEQ ID NO: 1586 - protein, 2100 aa, synthetic construct
MPAAKRVKLDGGDKKYSIGLDIGTNSVGWAVITDEYKVPSKKFKVLGNTDRHSIKKNLIGALLFDSGETAEATRLKRTARRRYTRRKNRICYLQEIFSNEMAKVDDSFFHRLEESFLVEEDKKHERHPIFGNIVDEVAYHEKYPTIYHLRKKLVDSTDKADLRLIYLALAHMIKFRGHFLIEGDLNPDNSDVDKLFIQLVQTYNQLFEENPINASGVDAKAILSARLSKSRRLENLIAQLPGEKKNGLFGNLIALSLGLTPNFKSNFDLAEDAKLQLSKDTYDDDLDNLLAQIGDQYADLFLAAKNLSDAILLSDILRVNTEITKAPLSASMIKRYDEHHQDLTLLKALVRQQLPEKYKEIFFDQSKNGYAGYIDGGASQEEFYKFIKPILEKMDGTEELLVKLNREDLLRKQRTFDNGSIPHQIHLGELHAILRRQEDFYPFLKDNREKIEKILTFRIPYYVGPLARGNSRFAWMTRKSEETITPWNFEEVVDKGASAQSFIERMTNFDKNLPNEKVLPKHSLLYEYFTVYNELTKVKYVTEGMRKPAFLSGEQKKAIVDLLFKTNRKVTVKQLKEDYFKKIECFDSVEISGVEDRFNASLGTYHDLLKIIKDKDFLDNEENEDILEDIVLTLTLFEDREMIEERLKTYAHLFDDKVMKQLKRRRYTGWGRLSRKLINGIRDKQSGKTILDFLKSDGFANRNFMQLIHDDSLTFKEDIQKAQVSGQGDSLHEHIANLAGSPAIKKGILQTVKVVDELVKVMGRHKPENIVIEMARENQTTQKGQKNSRERMKRIEEGIKELGSQILKEHPVENTQLQNEKLYLYYLQNGRDMYVDQELDINRLSDYDVDHIVPQSFLKDDSIDNKVLTRSDKARGKSDNVPSEEVVKKMKNYWRQLLNAKLITQRKFDNLTKAERGGLSELDKAGFIKRQLVETRQITKHVAQILDSRMNTKYDENDKLIREVKVITLKSKLVSDFRKDFQFYKVREINNYHHAHDAYLNAVVGTALIKKYPKLESEFVYGDYKVYDVRKMIAKSEQEIGKATAKYFFYSNIMNFFKTEITLANGEIRKRPLIETNGETGEIVWDKGRDFATVRKVLSMPQVNIVKKTEVQTGGFSKESILPKRNSDKLIARKKDWDPKKYGGFDSPTVAYSVLVVAKVEKGKSKKLKSVKELLGITIMERSSFEKNPIDFLEAKGYKEVKKDLIIKLPKYSLFELENGRKRMLASAGELQKGNELALPSKYVNFLYLASHYEKLKGSPEDNEQKQLFVEQHKHYLDEIIEQISEFSKRVILADANLDKVLSAYNKHRDKPIREQAENIIHLFTLTNLGAPAAFKYFDTTIDRKRYTSTKEVLDATLIHQSITGLYETRIDLSQLGGDGGPAPGSSGGSGGTVSLQDEHRLFDIPVTTSLPDVWLQDFPQAWAETGGLGRAKCQAPIIIDLKPTAVPVSIKQYPMSLEAHMGIRQHIIKFLELGVLRPCRSPWNTPLLPVKKPGTQDYRPVQDLREINKRTVDIHPTVPNPYNLLSTLKPDYSWYTVLDLKDAFFCLPLAPQSQELFAFEWKDPERGISGQLTWTRLPQGFKNSPTLFNEALHRDLTDFRTQHPEVTLLQYVDDLLLAAPTKKACTQGTRHLLQELGEKGYRASAKKAQICQTKVTYLGYILSEGKRWLTPGRIETVARIPPPRNPREVREFLGTAGFCRLWIPGFAELAAPLYALTKPSTPFTWQTEHQLAFEALKKALLSAPALGLPDTSKPFTLFLDERQGIAKGVLTQKLGPWKRPVAYLSKKLDPVAAGWPPCLRIMAATAMLVKDSAKLTLGQPLTVITPHTLEAIVRQPPDRWITNARLTHYQALLLDTDRVQFGPPVTLNPATLLPVPENQPSPHDCRQVLAETHGTREDLKDQELPDADHTWYTDGSSYLDSGTRRAGAAVVDGHNTIWAQSLPPGTSAQKAELIALTKALELSKGKKANIYTDSRYAFATAHTHGSIYERRGWLTSEGKEIKNKAEIIALLKALFLPQEVAIIHCPGHQKGQDPVAVGNRQADRVARQAAMAEVLTLATEPDNTSHITAGKRTADGSEFEKRTADGSEFESPKKKAKVE

SEQ ID NO: 1587 - protein, 2101 aa, synthetic construct
MPAAKRVKLDGGDKKYSIGLDIGTNSVGWAVITDEYKVPSKKFKVLGNTDRHSIKKNLIGALLFDSGETAEATRLKRTARRRYTRRKNRICYLQEIFSNEMAKVDDSFFHRLEESFLVEEDKKHERHPIFGNIVDEVAYHEKYPTIYHLRKKLVDSTDKADLRLIYLALAHMIKFRGHFLIEGDLNPDNSDVDKLFIQLVQTYNQLFEENPINASGVDAKAILSARLSKSRRLENLIAQLPGEKKNGLFGNLIALSLGLTPNFKSNFDLAEDAKLQLSKDTYDDDLDNLLAQIGDQYADLFLAAKNLSDAILLSDILRVNTEITKAPLSASMIKRYDEHHQDLTLLKALVRQQLPEKYKEIFFDQSKNGYAGYIDGGASQEEFYKFIKPILEKMDGTEELLVKLNREDLLRKQRTFDNGSIPHQIHLGELHAILRRQEDFYPFLKDNREKIEKILTFRIPYYVGPLARGNSRFAWMTRKSEETITPWNFEEVVDKGASAQSFIERMTNFDKNLPNEKVLPKHSLLYEYFTVYNELTKVKYVTEGMRKPAFLSGEQKKAIVDLLFKTNRKVTVKQLKEDYFKKIECFDSVEISGVEDRFNASLGTYHDLLKIIKDKDFLDNEENEDILEDIVLTLTLFEDREMIEERLKTYAHLFDDKVMKQLKRRRYTGWGRLSRKLINGIRDKQSGKTILDFLKSDGFANRNFMQLIHDDSLTFKEDIQKAQVSGQGDSLHEHIANLAGSPAIKKGILQTVKVVDELVKVMGRHKPENIVIEMARENQTTQKGQKNSRERMKRIEEGIKELGSQILKEHPVENTQLQNEKLYLYYLQNGRDMYVDQELDINRLSDYDVDHIVPQSFLKDDSIDNKVLTRSDKARGKSDNVPSEEVVKKMKNYWRQLLNAKLITQRKFDNLTKAERGGLSELDKAGFIKRQLVETRQITKHVAQILDSRMNTKYDENDKLIREVKVITLKSKLVSDFRKDFQFYKVREINNYHHAHDAYLNAVVGTALIKKYPKLESEFVYGDYKVYDVRKMIAKSEQEIGKATAKYFFYSNIMNFFKTEITLANGEIRKRPLIETNGETGEIVWDKGRDFATVRKVLSMPQVNIVKKTEVQTGGFSKESILPKRNSDKLIARKKDWDPKKYGGFDSPTVAYSVLVVAKVEKGKSKKLKSVKELLGITIMERSSFEKNPIDFLEAKGYKEVKKDLIIKLPKYSLFELENGRKRMLASAGELQKGNELALPSKYVNFLYLASHYEKLKGSPEDNEQKQLFVEQHKHYLDEIIEQISEFSKRVILADANLDKVLSAYNKHRDKPIREQAENIIHLFTLTNLGAPAAFKYFDTTIDRKRYTSTKEVLDATLIHQSITGLYETRIDLSQLGGDGGEAAAKEAAAKGGTVSLQDEHRLFDIPVTTSLPDVWLQDFPQAWAETGGLGRAKCQAPIIIDLKPTAVPVSIKQYPMSLEAHMGIRQHIIKFLELGVLRPCRSPWNTPLLPVKKPGTQDYRPVQDLREINKRTVDIHPTVPNPYNLLSTLKPDYSWYTVLDLKDAFFCLPLAPQSQELFAFEWKDPERGISGQLTWTRLPQGFKNSPTLFNEALHRDLTDFRTQHPEVTLLQYVDDLLLAAPTKKACTQGTRHLLQELGEKGYRASAKKAQICQTKVTYLGYILSEGKRWLTPGRIETVARIPPPRNPREVREFLGTAGFCRLWIPGFAELAAPLYALTKPSTPFTWQTEHQLAFEALKKALLSAPALGLPDTSKPFTLFLDERQGIAKGVLTQKLGPWKRPVAYLSKKLDPVAAGWPPCLRIMAATAMLVKDSAKLTLGQPLTVITPHTLEAIVRQPPDRWITNARLTHYQALLLDTDRVQFGPPVTLNPATLLPVPENQPSPHDCRQVLAETHGTREDLKDQELPDADHTWYTDGSSYLDSGTRRAGAAVVDGHNTIWAQSLPPGTSAQKAELIALTKALELSKGKKANIYTDSRYAFATAHTHGSIYERRGWLTSEGKEIKNKAEIIALLKALFLPQEVAIIHCPGHQKGQDPVAVGNRQADRVARQAAMAEVLTLATEPDNTSHITAGKRTADGSEFEKRTADGSEFESPKKKAKVE

SEQ ID NO: 1588 - protein, 2109 aa, synthetic construct
MPAAKRVKLDGGDKKYSIGLDIGTNSVGWAVITDEYKVPSKKFKVLGNTDRHSIKKNLIGALLFDSGETAEATRLKRTARRRYTRRKNRICYLQEIFSNEMAKVDDSFFHRLEESFLVEEDKKHERHPIFGNIVDEVAYHEKYPTIYHLRKKLVDSTDKADLRLIYLALAHMIKFRGHFLIEGDLNPDNSDVDKLFIQLVQTYNQLFEENPINASGVDAKAILSARLSKSRRLENLIAQLPGEKKNGLFGNLIALSLGLTPNFKSNFDLAEDAKLQLSKDTYDDDLDNLLAQIGDQYADLFLAAKNLSDAILLSDILRVNTEITKAPLSASMIKRYDEHHQDLTLLKALVRQQLPEKYKEIFFDQSKNGYAGYIDGGASQEEFYKFIKPILEKMDGTEELLVKLNREDLLRKQRTFDNGSIPHQIHLGELHAILRRQEDFYPFLKDNREKIEKILTFRIPYYVGPLARGNSRFAWMTRKSEETITPWNFEEVVDKGASAQSFIERMTNFDKNLPNEKVLPKHSLLYEYFTVYNELTKVKYVTEGMRKPAFLSGEQKKAIVDLLFKTNRKVTVKQLKEDYFKKIECFDSVEISGVEDRFNASLGTYHDLLKIIKDKDFLDNEENEDILEDIVLTLTLFEDREMIEERLKTYAHLFDDKVMKQLKRRRYTGWGRLSRKLINGIRDKQSGKTILDFLKSDGFANRNFMQLIHDDSLTFKEDIQKAQVSGQGDSLHEHIANLAGSPAIKKGILQTVKVVDELVKVMGRHKPENIVIEMARENQTTQKGQKNSRERMKRIEEGIKELGSQILKEHPVENTQLQNEKLYLYYLQNGRDMYVDQELDINRLSDYDVDHIVPQSFLKDDSIDNKVLTRSDKARGKSDNVPSEEVVKKMKNYWRQLLNAKLITQRKFDNLTKAERGGLSELDKAGFIKRQLVETRQITKHVAQILDSRMNTKYDENDKLIREVKVITLKSKLVSDFRKDFQFYKVREINNYHHAHDAYLNAVVGTALIKKYPKLESEFVYGDYKVYDVRKMIAKSEQEIGKATAKYFFYSNIMNFFKTEITLANGEIRKRPLIETNGETGEIVWDKGRDFATVRKVLSMPQVNIVKKTEVQTGGFSKESILPKRNSDKLIARKKDWDPKKYGGFDSPTVAYSVLVVAKVEKGKSKKLKSVKELLGITIMERSSFEKNPIDFLEAKGYKEVKKDLIIKLPKYSLFELENGRKRMLASAGELQKGNELALPSKYVNFLYLASHYEKLKGSPEDNEQKQLFVEQHKHYLDEIIEQISEFSKRVILADANLDKVLSAYNKHRDKPIREQAENIIHLFTLTNLGAPAAFKYFDTTIDRKRYTSTKEVLDATLIHQSITGLYETRIDLSQLGGDGGGSSGSSGSSGSSGSSGSSGGTVSLQDEHRLFDIPVTTSLPDVWLQDFPQAWAETGGLGRAKCQAPIIIDLKPTAVPVSIKQYPMSLEAHMGIRQHIIKFLELGVLRPCRSPWNTPLLPVKKPGTQDYRPVQDLREINKRTVDIHPTVPNPYNLLSTLKPDYSWYTVLDLKDAFFCLPLAPQSQELFAFEWKDPERGISGQLTWTRLPQGFKNSPTLFNEALHRDLTDFRTQHPEVTLLQYVDDLLLAAPTKKACTQGTRHLLQELGEKGYRASAKKAQICQTKVTYLGYILSEGKRWLTPGRIETVARIPPPRNPREVREFLGTAGFCRLWIPGFAELAAPLYALTKPSTPFTWQTEHQLAFEALKKALLSAPALGLPDTSKPFTLFLDERQGIAKGVLTQKLGPWKRPVAYLSKKLDPVAAGWPPCLRIMAATAMLVKDSAKLTLGQPLTVITPHTLEAIVRQPPDRWITNARLTHYQALLLDTDRVQFGPPVTLNPATLLPVPENQPSPHDCRQVLAETHGTREDLKDQELPDADHTWYTDGSSYLDSGTRRAGAAVVDGHNTIWAQSLPPGTSAQKAELIALTKALELSKGKKANIYTDSRYAFATAHTHGSIYERRGWLTSEGKEIKNKAEIIALLKALFLPQEVAIIHCPGHQKGQDPVAVGNRQADRVARQAAMAEVLTLATEPDNTSHITAGKRTADGSEFEKRTADGSEFESPKKKAKVE

SEQ ID NO: 1589 - protein, 2102 aa, synthetic construct
MPAAKRVKLDGGDKKYSIGLDIGTNSVGWAVITDEYKVPSKKFKVLGNTDRHSIKKNLIGALLFDSGETAEATRLKRTARRRYTRRKNRICYLQEIFSNEMAKVDDSFFHRLEESFLVEEDKKHERHPIFGNIVDEVAYHEKYPTIYHLRKKLVDSTDKADLRLIYLALAHMIKFRGHFLIEGDLNPDNSDVDKLFIQLVQTYNQLFEENPINASGVDAKAILSARLSKSRRLENLIAQLPGEKKNGLFGNLIALSLGLTPNFKSNFDLAEDAKLQLSKDTYDDDLDNLLAQIGDQYADLFLAAKNLSDAILLSDILRVNTEITKAPLSASMIKRYDEHHQDLTLLKALVRQQLPEKYKEIFFDQSKNGYAGYIDGGASQEEFYKFIKPILEKMDGTEELLVKLNREDLLRKQRTFDNGSIPHQIHLGELHAILRRQEDFYPFLKDNREKIEKILTFRIPYYVGPLARGNSRFAWMTRKSEETITPWNFEEVVDKGASAQSFIERMTNFDKNLPNEKVLPKHSLLYEYFTVYNELTKVKYVTEGMRKPAFLSGEQKKAIVDLLFKTNRKVTVKQLKEDYFKKIECFDSVEISGVEDRFNASLGTYHDLLKIIKDKDFLDNEENEDILEDIVLTLTLFEDREMIEERLKTYAHLFDDKVMKQLKRRRYTGWGRLSRKLINGIRDKQSGKTILDFLKSDGFANRNFMQLIHDDSLTFKEDIQKAQVSGQGDSLHEHIANLAGSPAIKKGILQTVKVVDELVKVMGRHKPENIVIEMARENQTTQKGQKNSRERMKRIEEGIKELGSQILKEHPVENTQLQNEKLYLYYLQNGRDMYVDQELDINRLSDYDVDHIVPQSFLKDDSIDNKVLTRSDKARGKSDNVPSEEVVKKMKNYWRQLLNAKLITQRKFDNLTKAERGGLSELDKAGFIKRQLVETRQITKHVAQILDSRMNTKYDENDKLIREVKVITLKSKLVSDFRKDFQFYKVREINNYHHAHDAYLNAVVGTALIKKYPKLESEFVYGDYKVYDVRKMIAKSEQEIGKATAKYFFYSNIMNFFKTEITLANGEIRKRPLIETNGETGEIVWDKGRDFATVRKVLSMPQVNIVKKTEVQTGGFSKESILPKRNSDKLIARKKDWDPKKYGGFDSPTVAYSVLVVAKVEKGKSKKLKSVKELLGITIMERSSFEKNPIDFLEAKGYKEVKKDLIIKLPKYSLFELENGRKRMLASAGELQKGNELALPSKYVNFLYLASHYEKLKGSPEDNEQKQLFVEQHKHYLDEIIEQISEFSKRVILADANLDKVLSAYNKHRDKPIREQAENIIHLFTLTNLGAPAAFKYFDTTIDRKRYTSTKEVLDATLIHQSITGLYETRIDLSQLGGDGGGGGEAAAKPAPGGTVSLQDEHRLFDIPVTTSLPDVWLQDFPQAWAETGGLGRAKCQAPIIIDLKPTAVPVSIKQYPMSLEAHMGIRQHIIKFLELGVLRPCRSPWNTPLLPVKKPGTQDYRPVQDLREINKRTVDIHPTVPNPYNLLSTLKPDYSWYTVLDLKDAFFCLPLAPQSQELFAFEWKDPERGISGQLTWTRLPQGFKNSPTLFNEALHRDLTDFRTQHPEVTLLQYVDDLLLAAPTKKACTQGTRHLLQELGEKGYRASAKKAQICQTKVTYLGYILSEGKRWLTPGRIETVARIPPPRNPREVREFLGTAGFCRLWIPGFAELAAPLYALTKPSTPFTWQTEHQLAFEALKKALLSAPALGLPDTSKPFTLFLDERQGIAKGVLTQKLGPWKRPVAYLSKKLDPVAAGWPPCLRIMAATAMLVKDSAKLTLGQPLTVITPHTLEAIVRQPPDRWITNARLTHYQALLLDTDRVQFGPPVTLNPATLLPVPENQPSPHDCRQVLAETHGTREDLKDQELPDADHTWYTDGSSYLDSGTRRAGAAVVDGHNTIWAQSLPPGTSAQKAELIALTKALELSKGKKANIYTDSRYAFATAHTHGSIYERRGWLTSEGKEIKNKAEIIALLKALFLPQEVAIIHCPGHQKGQDPVAVGNRQADRVARQAAMAEVLTLATEPDNTSHITAGKRTADGSEFEKRTADGSEFESPKKKAKVE

SEQ ID NO: 1590 - protein, 2097 aa, synthetic construct
MPAAKRVKLDGGDKKYSIGLDIGTNSVGWAVITDEYKVPSKKFKVLGNTDRHSIKKNLIGALLFDSGETAEATRLKRTARRRYTRRKNRICYLQEIFSNEMAKVDDSFFHRLEESFLVEEDKKHERHPIFGNIVDEVAYHEKYPTIYHLRKKLVDSTDKADLRLIYLALAHMIKFRGHFLIEGDLNPDNSDVDKLFIQLVQTYNQLFEENPINASGVDAKAILSARLSKSRRLENLIAQLPGEKKNGLFGNLIALSLGLTPNFKSNFDLAEDAKLQLSKDTYDDDLDNLLAQIGDQYADLFLAAKNLSDAILLSDILRVNTEITKAPLSASMIKRYDEHHQDLTLLKALVRQQLPEKYKEIFFDQSKNGYAGYIDGGASQEEFYKFIKPILEKMDGTEELLVKLNREDLLRKQRTFDNGSIPHQIHLGELHAILRRQEDFYPFLKDNREKIEKILTFRIPYYVGPLARGNSRFAWMTRKSEETITPWNFEEVVDKGASAQSFIERMTNFDKNLPNEKVLPKHSLLYEYFTVYNELTKVKYVTEGMRKPAFLSGEQKKAIVDLLFKTNRKVTVKQLKEDYFKKIECFDSVEISGVEDRFNASLGTYHDLLKIIKDKDFLDNEENEDILEDIVLTLTLFEDREMIEERLKTYAHLFDDKVMKQLKRRRYTGWGRLSRKLINGIRDKQSGKTILDFLKSDGFANRNFMQLIHDDSLTFKEDIQKAQVSGQGDSLHEHIANLAGSPAIKKGILQTVKVVDELVKVMGRHKPENIVIEMARENQTTQKGQKNSRERMKRIEEGIKELGSQILKEHPVENTQLQNEKLYLYYLQNGRDMYVDQELDINRLSDYDVDHIVPQSFLKDDSIDNKVLTRSDKARGKSDNVPSEEVVKKMKNYWRQLLNAKLITQRKFDNLTKAERGGLSELDKAGFIKRQLVETRQITKHVAQILDSRMNTKYDENDKLIREVKVITLKSKLVSDFRKDFQFYKVREINNYHHAHDAYLNAVVGTALIKKYPKLESEFVYGDYKVYDVRKMIAKSEQEIGKATAKYFFYSNIMNFFKTEITLANGEIRKRPLIETNGETGEIVWDKGRDFATVRKVLSMPQVNIVKKTEVQTGGFSKESILPKRNSDKLIARKKDWDPKKYGGFDSPTVAYSVLVVAKVEKGKSKKLKSVKELLGITIMERSSFEKNPIDFLEAKGYKEVKKDLIIKLPKYSLFELENGRKRMLASAGELQKGNELALPSKYVNFLYLASHYEKLKGSPEDNEQKQLFVEQHKHYLDEIIEQISEFSKRVILADANLDKVLSAYNKHRDKPIREQAENIIHLFTLTNLGAPAAFKYFDTTIDRKRYTSTKEVLDATLIHQSITGLYETRIDLSQLGGDGGPAPGGGGGTVSLQDEHRLFDIPVTTSLPDVWLQDFPQAWAETGGLGRAKCQAPIIIDLKPTAVPVSIKQYPMSLEAHMGIRQHIIKFLELGVLRPCRSPWNTPLLPVKKPGTQDYRPVQDLREINKRTVDIHPTVPNPYNLLSTLKPDYSWYTVLDLKDAFFCLPLAPQSQELFAFEWKDPERGISGQLTWTRLPQGFKNSPTLFNEALHRDLTDFRTQHPEVTLLQYVDDLLLAAPTKKACTQGTRHLLQELGEKGYRASAKKAQICQTKVTYLGYILSEGKRWLTPGRIETVARIPPPRNPREVREFLGTAGFCRLWIPGFAELAAPLYALTKPSTPFTWQTEHQLAFEALKKALLSAPALGLPDTSKPFTLFLDERQGIAKGVLTQKLGPWKRPVAYLSKKLDPVAAGWPPCLRIMAATAMLVKDSAKLTLGQPLTVITPHTLEAIVRQPPDRWITNARLTHYQALLLDTDRVQFGPPVTLNPATLLPVPENQPSPHDCRQVLAETHGTREDLKDQELPDADHTWYTDGSSYLDSGTRRAGAAVVDGHNTIWAQSLPPGTSAQKAELIALTKALELSKGKKANIYTDSRYAFATAHTHGSIYERRGWLTSEGKEIKNKAEIIALLKALFLPQEVAIIHCPGHQKGQDPVAVGNRQADRVARQAAMAEVLTLATEPDNTSHITAGKRTADGSEFEKRTADGSEFESPKKKAKVE

SEQ ID NO: 1591 - protein, 2100 aa, synthetic construct
MPAAKRVKLDGGDKKYSIGLDIGTNSVGWAVITDEYKVPSKKFKVLGNTDRHSIKKNLIGALLFDSGETAEATRLKRTARRRYTRRKNRICYLQEIFSNEMAKVDDSFFHRLEESFLVEEDKKHERHPIFGNIVDEVAYHEKYPTIYHLRKKLVDSTDKADLRLIYLALAHMIKFRGHFLIEGDLNPDNSDVDKLFIQLVQTYNQLFEENPINASGVDAKAILSARLSKSRRLENLIAQLPGEKKNGLFGNLIALSLGLTPNFKSNFDLAEDAKLQLSKDTYDDDLDNLLAQIGDQYADLFLAAKNLSDAILLSDILRVNTEITKAPLSASMIKRYDEHHQDLTLLKALVRQQLPEKYKEIFFDQSKNGYAGYIDGGASQEEFYKFIKPILEKMDGTEELLVKLNREDLLRKQRTFDNGSIPHQIHLGELHAILRRQEDFYPFLKDNREKIEKILTFRIPYYVGPLARGNSRFAWMTRKSEETITPWNFEEVVDKGASAQSFIERMTNFDKNLPNEKVLPKHSLLYEYFTVYNELTKVKYVTEGMRKPAFLSGEQKKAIVDLLFKTNRKVTVKQLKEDYFKKIECFDSVEISGVEDRFNASLGTYHDLLKIIKDKDFLDNEENEDILEDIVLTLTLFEDREMIEERLKTYAHLFDDKVMKQLKRRRYTGWGRLSRKLINGIRDKQSGKTILDFLKSDGFANRNFMQLIHDDSLTFKEDIQKAQVSGQGDSLHEHIANLAGSPAIKKGILQTVKVVDELVKVMGRHKPENIVIEMARENQTTQKGQKNSRERMKRIEEGIKELGSQILKEHPVENTQLQNEKLYLYYLQNGRDMYVDQELDINRLSDYDVDHIVPQSFLKDDSIDNKVLTRSDKARGKSDNVPSEEVVKKMKNYWRQLLNAKLITQRKFDNLTKAERGGLSELDKAGFIKRQLVETRQITKHVAQILDSRMNTKYDENDKLIREVKVITLKSKLVSDFRKDFQFYKVREINNYHHAHDAYLNAVVGTALIKKYPKLESEFVYGDYKVYDVRKMIAKSEQEIGKATAKYFFYSNIMNFFKTEITLANGEIRKRPLIETNGETGEIVWDKGRDFATVRKVLSMPQVNIVKKTEVQTGGFSKESILPKRNSDKLIARKKDWDPKKYGGFDSPTVAYSVLVVAKVEKGKSKKLKSVKELLGITIMERSSFEKNPIDFLEAKGYKEVKKDLIIKLPKYSLFELENGRKRMLASAGELQKGNELALPSKYVNFLYLASHYEKLKGSPEDNEQKQLFVEQHKHYLDEIIEQISEFSKRVILADANLDKVLSAYNKHRDKPIREQAENIIHLFTLTNLGAPAAFKYFDTTIDRKRYTSTKEVLDATLIHQSITGLYETRIDLSQLGGDGGGGSPAPGSSGGTVSLQDEHRLFDIPVTTSLPDVWLQDFPQAWAETGGLGRAKCQAPIIIDLKPTAVPVSIKQYPMSLEAHMGIRQHIIKFLELGVLRPCRSPWNTPLLPVKKPGTQDYRPVQDLREINKRTVDIHPTVPNPYNLLSTLKPDYSWYTVLDLKDAFFCLPLAPQSQELFAFEWKDPERGISGQLTWTRLPQGFKNSPTLFNEALHRDLTDFRTQHPEVTLLQYVDDLLLAAPTKKACTQGTRHLLQELGEKGYRASAKKAQICQTKVTYLGYILSEGKRWLTPGRIETVARIPPPRNPREVREFLGTAGFCRLWIPGFAELAAPLYALTKPSTPFTWQTEHQLAFEALKKALLSAPALGLPDTSKPFTLFLDERQGIAKGVLTQKLGPWKRPVAYLSKKLDPVAAGWPPCLRIMAATAMLVKDSAKLTLGQPLTVITPHTLEAIVRQPPDRWITNARLTHYQALLLDTDRVQFGPPVTLNPATLLPVPENQPSPHDCRQVLAETHGTREDLKDQELPDADHTWYTDGSSYLDSGTRRAGAAVVDGHNTIWAQSLPPGTSAQKAELIALTKALELSKGKKANIYTDSRYAFATAHTHGSIYERRGWLTSEGKEIKNKAEIIALLKALFLPQEVAIIHCPGHQKGQDPVAVGNRQADRVARQAAMAEVLTLATEPDNTSHITAGKRTADGSEFEKRTADGSEFESPKKKAKVE

SEQ ID NO: 1592 - protein, 2097 aa, synthetic construct
MPAAKRVKLDGGDKKYSIGLDIGTNSVGWAVITDEYKVPSKKFKVLGNTDRHSIKKNLIGALLFDSGETAEATRLKRTARRRYTRRKNRICYLQEIFSNEMAKVDDSFFHRLEESFLVEEDKKHERHPIFGNIVDEVAYHEKYPTIYHLRKKLVDSTDKADLRLIYLALAHMIKFRGHFLIEGDLNPDNSDVDKLFIQLVQTYNQLFEENPINASGVDAKAILSARLSKSRRLENLIAQLPGEKKNGLFGNLIALSLGLTPNFKSNFDLAEDAKLQLSKDTYDDDLDNLLAQIGDQYADLFLAAKNLSDAILLSDILRVNTEITKAPLSASMIKRYDEHHQDLTLLKALVRQQLPEKYKEIFFDQSKNGYAGYIDGGASQEEFYKFIKPILEKMDGTEELLVKLNREDLLRKQRTFDNGSIPHQIHLGELHAILRRQEDFYPFLKDNREKIEKILTFRIPYYVGPLARGNSRFAWMTRKSEETITPWNFEEVVDKGASAQSFIERMTNFDKNLPNEKVLPKHSLLYEYFTVYNELTKVKYVTEGMRKPAFLSGEQKKAIVDLLFKTNRKVTVKQLKEDYFKKIECFDSVEISGVEDRFNASLGTYHDLLKIIKDKDFLDNEENEDILEDIVLTLTLFEDREMIEERLKTYAHLFDDKVMKQLKRRRYTGWGRLSRKLINGIRDKQSGKTILDFLKSDGFANRNFMQLIHDDSLTFKEDIQKAQVSGQGDSLHEHIANLAGSPAIKKGILQTVKVVDELVKVMGRHKPENIVIEMARENQTTQKGQKNSRERMKRIEEGIKELGSQILKEHPVENTQLQNEKLYLYYLQNGRDMYVDQELDINRLSDYDVDHIVPQSFLKDDSIDNKVLTRSDKARGKSDNVPSEEVVKKMKNYWRQLLNAKLITQRKFDNLTKAERGGLSELDKAGFIKRQLVETRQITKHVAQILDSRMNTKYDENDKLIREVKVITLKSKLVSDFRKDFQFYKVREINNYHHAHDAYLNAVVGTALIKKYPKLESEFVYGDYKVYDVRKMIAKSEQEIGKATAKYFFYSNIMNFFKTEITLANGEIRKRPLIETNGETGEIVWDKGRDFATVRKVLSMPQVNIVKKTEVQTGGFSKESILPKRNSDKLIARKKDWDPKKYGGFDSPTVAYSVLVVAKVEKGKSKKLKSVKELLGITIMERSSFEKNPIDFLEAKGYKEVKKDLIIKLPKYSLFELENGRKRMLASAGELQKGNELALPSKYVNFLYLASHYEKLKGSPEDNEQKQLFVEQHKHYLDEIIEQISEFSKRVILADANLDKVLSAYNKHRDKPIREQAENIIHLFTLTNLGAPAAFKYFDTTIDRKRYTSTKEVLDATLIHQSITGLYETRIDLSQLGGDGGGSSPAPGGTVSLQDEHRLFDIPVTTSLPDVWLQDFPQAWAETGGLGRAKCQAPIIIDLKPTAVPVSIKQYPMSLEAHMGIRQHIIKFLELGVLRPCRSPWNTPLLPVKKPGTQDYRPVQDLREINKRTVDIHPTVPNPYNLLSTLKPDYSWYTVLDLKDAFFCLPLAPQSQELFAFEWKDPERGISGQLTWTRLPQGFKNSPTLFNEALHRDLTDFRTQHPEVTLLQYVDDLLLAAPTKKACTQGTRHLLQELGEKGYRASAKKAQICQTKVTYLGYILSEGKRWLTPGRIETVARIPPPRNPREVREFLGTAGFCRLWIPGFAELAAPLYALTKPSTPFTWQTEHQLAFEALKKALLSAPALGLPDTSKPFTLFLDERQGIAKGVLTQKLGPWKRPVAYLSKKLDPVAAGWPPCLRIMAATAMLVKDSAKLTLGQPLTVITPHTLEAIVRQPPDRWITNARLTHYQALLLDTDRVQFGPPVTLNPATLLPVPENQPSPHDCRQVLAETHGTREDLKDQELPDADHTWYTDGSSYLDSGTRRAGAAVVDGHNTIWAQSLPPGTSAQKAELIALTKALELSKGKKANIYTDSRYAFATAHTHGSIYERRGWLTSEGKEIKNKAEIIALLKALFLPQEVAIIHCPGHQKGQDPVAVGNRQADRVARQAAMAEVLTLATEPDNTSHITAGKRTADGSEFEKRTADGSEFESPKKKAKVE

SEQ ID NO: 1593 - protein, 2102 aa, synthetic construct
MPAAKRVKLDGGDKKYSIGLDIGTNSVGWAVITDEYKVPSKKFKVLGNTDRHSIKKNLIGALLFDSGETAEATRLKRTARRRYTRRKNRICYLQEIFSNEMAKVDDSFFHRLEESFLVEEDKKHERHPIFGNIVDEVAYHEKYPTIYHLRKKLVDSTDKADLRLIYLALAHMIKFRGHFLIEGDLNPDNSDVDKLFIQLVQTYNQLFEENPINASGVDAKAILSARLSKSRRLENLIAQLPGEKKNGLFGNLIALSLGLTPNFKSNFDLAEDAKLQLSKDTYDDDLDNLLAQIGDQYADLFLAAKNLSDAILLSDILRVNTEITKAPLSASMIKRYDEHHQDLTLLKALVRQQLPEKYKEIFFDQSKNGYAGYIDGGASQEEFYKFIKPILEKMDGTEELLVKLNREDLLRKQRTFDNGSIPHQIHLGELHAILRRQEDFYPFLKDNREKIEKILTFRIPYYVGPLARGNSRFAWMTRKSEETITPWNFEEVVDKGASAQSFIERMTNFDKNLPNEKVLPKHSLLYEYFTVYNELTKVKYVTEGMRKPAFLSGEQKKAIVDLLFKTNRKVTVKQLKEDYFKKIECFDSVEISGVEDRFNASLGTYHDLLKIIKDKDFLDNEENEDILEDIVLTLTLFEDREMIEERLKTYAHLFDDKVMKQLKRRRYTGWGRLSRKLINGIRDKQSGKTILDFLKSDGFANRNFMQLIHDDSLTFKEDIQKAQVSGQGDSLHEHIANLAGSPAIKKGILQTVKVVDELVKVMGRHKPENIVIEMARENQTTQKGQKNSRERMKRIEEGIKELGSQILKEHPVENTQLQNEKLYLYYLQNGRDMYVDQELDINRLSDYDVDHIVPQSFLKDDSIDNKVLTRSDKARGKSDNVPSEEVVKKMKNYWRQLLNAKLITQRKFDNLTKAERGGLSELDKAGFIKRQLVETRQITKHVAQILDSRMNTKYDENDKLIREVKVITLKSKLVSDFRKDFQFYKVREINNYHHAHDAYLNAVVGTALIKKYPKLESEFVYGDYKVYDVRKMIAKSEQEIGKATAKYFFYSNIMNFFKTEITLANGEIRKRPLIETNGETGEIVWDKGRDFATVRKVLSMPQVNIVKKTEVQTGGFSKESILPKRNSDKLIARKKDWDPKKYGGFDSPTVAYSVLVVAKVEKGKSKKLKSVKELLGITIMERSSFEKNPIDFLEAKGYKEVKKDLIIKLPKYSLFELENGRKRMLASAGELQKGNELALPSKYVNFLYLASHYEKLKGSPEDNEQKQLFVEQHKHYLDEIIEQISEFSKRVILADANLDKVLSAYNKHRDKPIREQAENIIHLFTLTNLGAPAAFKYFDTTIDRKRYTSTKEVLDATLIHQSITGLYETRIDLSQLGGDGGEAAAKGGGGSSGGTVSLQDEHRLFDIPVTTSLPDVWLQDFPQAWAETGGLGRAKCQAPIIIDLKPTAVPVSIKQYPMSLEAHMGIRQHIIKFLELGVLRPCRSPWNTPLLPVKKPGTQDYRPVQDLREINKRTVDIHPTVPNPYNLLSTLKPDYSWYTVLDLKDAFFCLPLAPQSQELFAFEWKDPERGISGQLTWTRLPQGFKNSPTLFNEALHRDLTDFRTQHPEVTLLQYVDDLLLAAPTKKACTQGTRHLLQELGEKGYRASAKKAQICQTKVTYLGYILSEGKRWLTPGRIETVARIPPPRNPREVREFLGTAGFCRLWIPGFAELAAPLYALTKPSTPFTWQTEHQLAFEALKKALLSAPALGLPDTSKPFTLFLDERQGIAKGVLTQKLGPWKRPVAYLSKKLDPVAAGWPPCLRIMAATAMLVKDSAKLTLGQPLTVITPHTLEAIVRQPPDRWITNARLTHYQALLLDTDRVQFGPPVTLNPATLLPVPENQPSPHDCRQVLAETHGTREDLKDQELPDADHTWYTDGSSYLDSGTRRAGAAVVDGHNTIWAQSLPPGTSAQKAELIALTKALELSKGKKANIYTDSRYAFATAHTHGSIYERRGWLTSEGKEIKNKAEIIALLKALFLPQEVAIIHCPGHQKGQDPVAVGNRQADRVARQAAMAEVLTLATEPDNTSHITAGKRTADGSEFEKRTADGSEFESPKKKAKVE

SEQ ID NO: 1594 - protein, 2103 aa, synthetic construct
MPAAKRVKLDGGDKKYSIGLDIGTNSVGWAVITDEYKVPSKKFKVLGNTDRHSIKKNLIGALLFDSGETAEATRLKRTARRRYTRRKNRICYLQEIFSNEMAKVDDSFFHRLEESFLVEEDKKHERHPIFGNIVDEVAYHEKYPTIYHLRKKLVDSTDKADLRLIYLALAHMIKFRGHFLIEGDLNPDNSDVDKLFIQLVQTYNQLFEENPINASGVDAKAILSARLSKSRRLENLIAQLPGEKKNGLFGNLIALSLGLTPNFKSNFDLAEDAKLQLSKDTYDDDLDNLLAQIGDQYADLFLAAKNLSDAILLSDILRVNTEITKAPLSASMIKRYDEHHQDLTLLKALVRQQLPEKYKEIFFDQSKNGYAGYIDGGASQEEFYKFIKPILEKMDGTEELLVKLNREDLLRKQRTFDNGSIPHQIHLGELHAILRRQEDFYPFLKDNREKIEKILTFRIPYYVGPLARGNSRFAWMTRKSEETITPWNFEEVVDKGASAQSFIERMTNFDKNLPNEKVLPKHSLLYEYFTVYNELTKVKYVTEGMRKPAFLSGEQKKAIVDLLFKTNRKVTVKQLKEDYFKKIECFDSVEISGVEDRFNASLGTYHDLLKIIKDKDFLDNEENEDILEDIVLTLTLFEDREMIEERLKTYAHLFDDKVMKQLKRRRYTGWGRLSRKLINGIRDKQSGKTILDFLKSDGFANRNFMQLIHDDSLTFKEDIQKAQVSGQGDSLHEHIANLAGSPAIKKGILQTVKVVDELVKVMGRHKPENIVIEMARENQTTQKGQKNSRERMKRIEEGIKELGSQILKEHPVENTQLQNEKLYLYYLQNGRDMYVDQELDINRLSDYDVDHIVPQSFLKDDSIDNKVLTRSDKARGKSDNVPSEEVVKKMKNYWRQLLNAKLITQRKFDNLTKAERGGLSELDKAGFIKRQLVETRQITKHVAQILDSRMNTKYDENDKLIREVKVITLKSKLVSDFRKDFQFYKVREINNYHHAHDAYLNAVVGTALIKKYPKLESEFVYGDYKVYDVRKMIAKSEQEIGKATAKYFFYSNIMNFFKTEITLANGEIRKRPLIETNGETGEIVWDKGRDFATVRKVLSMPQVNIVKKTEVQTGGFSKESILPKRNSDKLIARKKDWDPKKYGGFDSPTVAYSVLVVAKVEKGKSKKLKSVKELLGITIMERSSFEKNPIDFLEAKGYKEVKKDLIIKLPKYSLFELENGRKRMLASAGELQKGNELALPSKYVNFLYLASHYEKLKGSPEDNEQKQLFVEQHKHYLDEIIEQISEFSKRVILADANLDKVLSAYNKHRDKPIREQAENIIHLFTLTNLGAPAAFKYFDTTIDRKRYTSTKEVLDATLIHQSITGLYETRIDLSQLGGDGGGSAGSAAGSGEFGGTVSLQDEHRLFDIPVTTSLPDVWLQDFPQAWAETGGLGRAKCQAPIIIDLKPTAVPVSIKQYPMSLEAHMGIRQHIIKFLELGVLRPCRSPWNTPLLPVKKPGTQDYRPVQDLREINKRTVDIHPTVPNPYNLLSTLKPDYSWYTVLDLKDAFFCLPLAPQSQELFAFEWKDPERGISGQLTWTRLPQGFKNSPTLFNEALHRDLTDFRTQHPEVTLLQYVDDLLLAAPTKKACTQGTRHLLQELGEKGYRASAKKAQICQTKVTYLGYILSEGKRWLTPGRIETVARIPPPRNPREVREFLGTAGFCRLWIPGFAELAAPLYALTKPSTPFTWQTEHQLAFEALKKALLSAPALGLPDTSKPFTLFLDERQGIAKGVLTQKLGPWKRPVAYLSKKLDPVAAGWPPCLRIMAATAMLVKDSAKLTLGQPLTVITPHTLEAIVRQPPDRWITNARLTHYQALLLDTDRVQFGPPVTLNPATLLPVPENQPSPHDCRQVLAETHGTREDLKDQELPDADHTWYTDGSSYLDSGTRRAGAAVVDGHNTIWAQSLPPGTSAQKAELIALTKALELSKGKKANIYTDSRYAFATAHTHGSIYERRGWLTSEGKEIKNKAEIIALLKALFLPQEVAIIHCPGHQKGQDPVAVGNRQADRVARQAAMAEVLTLATEPDNTSHITAGKRTADGSEFEKRTADGSEFESPKKKAKVE

SEQ ID NO: 1595 - protein, 2100 aa, synthetic construct
MPAAKRVKLDGGDKKYSIGLDIGTNSVGWAVITDEYKVPSKKFKVLGNTDRHSIKKNLIGALLFDSGETAEATRLKRTARRRYTRRKNRICYLQEIFSNEMAKVDDSFFHRLEESFLVEEDKKHERHPIFGNIVDEVAYHEKYPTIYHLRKKLVDSTDKADLRLIYLALAHMIKFRGHFLIEGDLNPDNSDVDKLFIQLVQTYNQLFEENPINASGVDAKAILSARLSKSRRLENLIAQLPGEKKNGLFGNLIALSLGLTPNFKSNFDLAEDAKLQLSKDTYDDDLDNLLAQIGDQYADLFLAAKNLSDAILLSDILRVNTEITKAPLSASMIKRYDEHHQDLTLLKALVRQQLPEKYKEIFFDQSKNGYAGYIDGGASQEEFYKFIKPILEKMDGTEELLVKLNREDLLRKQRTFDNGSIPHQIHLGELHAILRRQEDFYPFLKDNREKIEKILTFRIPYYVGPLARGNSRFAWMTRKSEETITPWNFEEVVDKGASAQSFIERMTNFDKNLPNEKVLPKHSLLYEYFTVYNELTKVKYVTEGMRKPAFLSGEQKKAIVDLLFKTNRKVTVKQLKEDYFKKIECFDSVEISGVEDRFNASLGTYHDLLKIIKDKDFLDNEENEDILEDIVLTLTLFEDREMIEERLKTYAHLFDDKVMKQLKRRRYTGWGRLSRKLINGIRDKQSGKTILDFLKSDGFANRNFMQLIHDDSLTFKEDIQKAQVSGQGDSLHEHIANLAGSPAIKKGILQTVKVVDELVKVMGRHKPENIVIEMARENQTTQKGQKNSRERMKRIEEGIKELGSQILKEHPVENTQLQNEKLYLYYLQNGRDMYVDQELDINRLSDYDVDHIVPQSFLKDDSIDNKVLTRSDKARGKSDNVPSEEVVKKMKNYWRQLLNAKLITQRKFDNLTKAERGGLSELDKAGFIKRQLVETRQITKHVAQILDSRMNTKYDENDKLIREVKVITLKSKLVSDFRKDFQFYKVREINNYHHAHDAYLNAVVGTALIKKYPKLESEFVYGDYKVYDVRKMIAKSEQEIGKATAKYFFYSNIMNFFKTEITLANGEIRKRPLIETNGETGEIVWDKGRDFATVRKVLSMPQVNIVKKTEVQTGGFSKESILPKRNSDKLIARKKDWDPKKYGGFDSPTVAYSVLVVAKVEKGKSKKLKSVKELLGITIMERSSFEKNPIDFLEAKGYKEVKKDLIIKLPKYSLFELENGRKRMLASAGELQKGNELALPSKYVNFLYLASHYEKLKGSPEDNEQKQLFVEQHKHYLDEIIEQISEFSKRVILADANLDKVLSAYNKHRDKPIREQAENIIHLFTLTNLGAPAAFKYFDTTIDRKRYTSTKEVLDATLIHQSITGLYETRIDLSQLGGDGGGGGPAPGGSGGTVSLQDEHRLFDIPVTTSLPDVWLQDFPQAWAETGGLGRAKCQAPIIIDLKPTAVPVSIKQYPMSLEAHMGIRQHIIKFLELGVLRPCRSPWNTPLLPVKKPGTQDYRPVQDLREINKRTVDIHPTVPNPYNLLSTLKPDYSWYTVLDLKDAFFCLPLAPQSQELFAFEWKDPERGISGQLTWTRLPQGFKNSPTLFNEALHRDLTDFRTQHPEVTLLQYVDDLLLAAPTKKACTQGTRHLLQELGEKGYRASAKKAQICQTKVTYLGYILSEGKRWLTPGRIETVARIPPPRNPREVREFLGTAGFCRLWIPGFAELAAPLYALTKPSTPFTWQTEHQLAFEALKKALLSAPALGLPDTSKPFTLFLDERQGIAKGVLTQKLGPWKRPVAYLSKKLDPVAAGWPPCLRIMAATAMLVKDSAKLTLGQPLTVITPHTLEAIVRQPPDRWITNARLTHYQALLLDTDRVQFGPPVTLNPATLLPVPENQPSPHDCRQVLAETHGTREDLKDQELPDADHTWYTDGSSYLDSGTRRAGAAVVDGHNTIWAQSLPPGTSAQKAELIALTKALELSKGKKANIYTDSRYAFATAHTHGSIYERRGWLTSEGKEIKNKAEIIALLKALFLPQEVAIIHCPGHQKGQDPVAVGNRQADRVARQAAMAEVLTLATEPDNTSHITAGKRTADGSEFEKRTADGSEFESPKKKAKVE

SEQ ID NO: 1596 - protein, 2102 aa, synthetic construct
MPAAKRVKLDGGDKKYSIGLDIGTNSVGWAVITDEYKVPSKKFKVLGNTDRHSIKKNLIGALLFDSGETAEATRLKRTARRRYTRRKNRICYLQEIFSNEMAKVDDSFFHRLEESFLVEEDKKHERHPIFGNIVDEVAYHEKYPTIYHLRKKLVDSTDKADLRLIYLALAHMIKFRGHFLIEGDLNPDNSDVDKLFIQLVQTYNQLFEENPINASGVDAKAILSARLSKSRRLENLIAQLPGEKKNGLFGNLIALSLGLTPNFKSNFDLAEDAKLQLSKDTYDDDLDNLLAQIGDQYADLFLAAKNLSDAILLSDILRVNTEITKAPLSASMIKRYDEHHQDLTLLKALVRQQLPEKYKEIFFDQSKNGYAGYIDGGASQEEFYKFIKPILEKMDGTEELLVKLNREDLLRKQRTFDNGSIPHQIHLGELHAILRRQEDFYPFLKDNREKIEKILTFRIPYYVGPLARGNSRFAWMTRKSEETITPWNFEEVVDKGASAQSFIERMTNFDKNLPNEKVLPKHSLLYEYFTVYNELTKVKYVTEGMRKPAFLSGEQKKAIVDLLFKTNRKVTVKQLKEDYFKKIECFDSVEISGVEDRFNASLGTYHDLLKIIKDKDFLDNEENEDILEDIVLTLTLFEDREMIEERLKTYAHLFDDKVMKQLKRRRYTGWGRLSRKLINGIRDKQSGKTILDFLKSDGFANRNFMQLIHDDSLTFKEDIQKAQVSGQGDSLHEHIANLAGSPAIKKGILQTVKVVDELVKVMGRHKPENIVIEMARENQTTQKGQKNSRERMKRIEEGIKELGSQILKEHPVENTQLQNEKLYLYYLQNGRDMYVDQELDINRLSDYDVDHIVPQSFLKDDSIDNKVLTRSDKARGKSDNVPSEEVVKKMKNYWRQLLNAKLITQRKFDNLTKAERGGLSELDKAGFIKRQLVETRQITKHVAQILDSRMNTKYDENDKLIREVKVITLKSKLVSDFRKDFQFYKVREINNYHHAHDAYLNAVVGTALIKKYPKLESEFVYGDYKVYDVRKMIAKSEQEIGKATAKYFFYSNIMNFFKTEITLANGEIRKRPLIETNGETGEIVWDKGRDFATVRKVLSMPQVNIVKKTEVQTGGFSKESILPKRNSDKLIARKKDWDPKKYGGFDSPTVAYSVLVVAKVEKGKSKKLKSVKELLGITIMERSSFEKNPIDFLEAKGYKEVKKDLIIKLPKYSLFELENGRKRMLASAGELQKGNELALPSKYVNFLYLASHYEKLKGSPEDNEQKQLFVEQHKHYLDEIIEQISEFSKRVILADANLDKVLSAYNKHRDKPIREQAENIIHLFTLTNLGAPAAFKYFDTTIDRKRYTSTKEVLDATLIHQSITGLYETRIDLSQLGGDGGGSSPAPEAAAKGGTVSLQDEHRLFDIPVTTSLPDVWLQDFPQAWAETGGLGRAKCQAPIIIDLKPTAVPVSIKQYPMSLEAHMGIRQHIIKFLELGVLRPCRSPWNTPLLPVKKPGTQDYRPVQDLREINKRTVDIHPTVPNPYNLLSTLKPDYSWYTVLDLKDAFFCLPLAPQSQELFAFEWKDPERGISGQLTWTRLPQGFKNSPTLFNEALHRDLTDFRTQHPEVTLLQYVDDLLLAAPTKKACTQGTRHLLQELGEKGYRASAKKAQICQTKVTYLGYILSEGKRWLTPGRIETVARIPPPRNPREVREFLGTAGFCRLWIPGFAELAAPLYALTKPSTPFTWQTEHQLAFEALKKALLSAPALGLPDTSKPFTLFLDERQGIAKGVLTQKLGPWKRPVAYLSKKLDPVAAGWPPCLRIMAATAMLVKDSAKLTLGQPLTVITPHTLEAIVRQPPDRWITNARLTHYQALLLDTDRVQFGPPVTLNPATLLPVPENQPSPHDCRQVLAETHGTREDLKDQELPDADHTWYTDGSSYLDSGTRRAGAAVVDGHNTIWAQSLPPGTSAQKAELIALTKALELSKGKKANIYTDSRYAFATAHTHGSIYERRGWLTSEGKEIKNKAEIIALLKALFLPQEVAIIHCPGHQKGQDPVAVGNRQADRVARQAAMAEVLTLATEPDNTSHITAGKRTADGSEFEKRTADGSEFESPKKKAKVE

SEQ ID NO: 1597 - protein, 2101 aa, synthetic construct
MPAAKRVKLDGGDKKYSIGLDIGTNSVGWAVITDEYKVPSKKFKVLGNTDRHSIKKNLIGALLFDSGETAEATRLKRTARRRYTRRKNRICYLQEIFSNEMAKVDDSFFHRLEESFLVEEDKKHERHPIFGNIVDEVAYHEKYPTIYHLRKKLVDSTDKADLRLIYLALAHMIKFRGHFLIEGDLNPDNSDVDKLFIQLVQTYNQLFEENPINASGVDAKAILSARLSKSRRLENLIAQLPGEKKNGLFGNLIALSLGLTPNFKSNFDLAEDAKLQLSKDTYDDDLDNLLAQIGDQYADLFLAAKNLSDAILLSDILRVNTEITKAPLSASMIKRYDEHHQDLTLLKALVRQQLPEKYKEIFFDQSKNGYAGYIDGGASQEEFYKFIKPILEKMDGTEELLVKLNREDLLRKQRTFDNGSIPHQIHLGELHAILRRQEDFYPFLKDNREKIEKILTFRIPYYVGPLARGNSRFAWMTRKSEETITPWNFEEVVDKGASAQSFIERMTNFDKNLPNEKVLPKHSLLYEYFTVYNELTKVKYVTEGMRKPAFLSGEQKKAIVDLLFKTNRKVTVKQLKEDYFKKIECFDSVEISGVEDRFNASLGTYHDLLKIIKDKDFLDNEENEDILEDIVLTLTLFEDREMIEERLKTYAHLFDDKVMKQLKRRRYTGWGRLSRKLINGIRDKQSGKTILDFLKSDGFANRNFMQLIHDDSLTFKEDIQKAQVSGQGDSLHEHIANLAGSPAIKKGILQTVKVVDELVKVMGRHKPENIVIEMARENQTTQKGQKNSRERMKRIEEGIKELGSQILKEHPVENTQLQNEKLYLYYLQNGRDMYVDQELDINRLSDYDVDHIVPQSFLKDDSIDNKVLTRSDKARGKSDNVPSEEVVKKMKNYWRQLLNAKLITQRKFDNLTKAERGGLSELDKAGFIKRQLVETRQITKHVAQILDSRMNTKYDENDKLIREVKVITLKSKLVSDFRKDFQFYKVREINNYHHAHDAYLNAVVGTALIKKYPKLESEFVYGDYKVYDVRKMIAKSEQEIGKATAKYFFYSNIMNFFKTEITLANGEIRKRPLIETNGETGEIVWDKGRDFATVRKVLSMPQVNIVKKTEVQTGGFSKESILPKRNSDKLIARKKDWDPKKYGGFDSPTVAYSVLVVAKVEKGKSKKLKSVKELLGITIMERSSFEKNPIDFLEAKGYKEVKKDLIIKLPKYSLFELENGRKRMLASAGELQKGNELALPSKYVNFLYLASHYEKLKGSPEDNEQKQLFVEQHKHYLDEIIEQISEFSKRVILADANLDKVLSAYNKHRDKPIREQAENIIHLFTLTNLGAPAAFKYFDTTIDRKRYTSTKEVLDATLIHQSITGLYETRIDLSQLGGDGGGGGGSGGGGSGGTVSLQDEHRLFDIPVTTSLPDVWLQDFPQAWAETGGLGRAKCQAPIIIDLKPTAVPVSIKQYPMSLEAHMGIRQHIIKFLELGVLRPCRSPWNTPLLPVKKPGTQDYRPVQDLREINKRTVDIHPTVPNPYNLLSTLKPDYSWYTVLDLKDAFFCLPLAPQSQELFAFEWKDPERGISGQLTWTRLPQGFKNSPTLFNEALHRDLTDFRTQHPEVTLLQYVDDLLLAAPTKKACTQGTRHLLQELGEKGYRASAKKAQICQTKVTYLGYILSEGKRWLTPGRIETVARIPPPRNPREVREFLGTAGFCRLWIPGFAELAAPLYALTKPSTPFTWQTEHQLAFEALKKALLSAPALGLPDTSKPFTLFLDERQGIAKGVLTQKLGPWKRPVAYLSKKLDPVAAGWPPCLRIMAATAMLVKDSAKLTLGQPLTVITPHTLEAIVRQPPDRWITNARLTHYQALLLDTDRVQFGPPVTLNPATLLPVPENQPSPHDCRQVLAETHGTREDLKDQELPDADHTWYTDGSSYLDSGTRRAGAAVVDGHNTIWAQSLPPGTSAQKAELIALTKALELSKGKKANIYTDSRYAFATAHTHGSIYERRGWLTSEGKEIKNKAEIIALLKALFLPQEVAIIHCPGHQKGQDPVAVGNRQADRVARQAAMAEVLTLATEPDNTSHITAGKRTADGSEFEKRTADGSEFESPKKKAKVE

SEQ ID NO: 1598 - protein, 2102 aa, synthetic construct
MPAAKRVKLDGGDKKYSIGLDIGTNSVGWAVITDEYKVPSKKFKVLGNTDRHSIKKNLIGALLFDSGETAEATRLKRTARRRYTRRKNRICYLQEIFSNEMAKVDDSFFHRLEESFLVEEDKKHERHPIFGNIVDEVAYHEKYPTIYHLRKKLVDSTDKADLRLIYLALAHMIKFRGHFLIEGDLNPDNSDVDKLFIQLVQTYNQLFEENPINASGVDAKAILSARLSKSRRLENLIAQLPGEKKNGLFGNLIALSLGLTPNFKSNFDLAEDAKLQLSKDTYDDDLDNLLAQIGDQYADLFLAAKNLSDAILLSDILRVNTEITKAPLSASMIKRYDEHHQDLTLLKALVRQQLPEKYKEIFFDQSKNGYAGYIDGGASQEEFYKFIKPILEKMDGTEELLVKLNREDLLRKQRTFDNGSIPHQIHLGELHAILRRQEDFYPFLKDNREKIEKILTFRIPYYVGPLARGNSRFAWMTRKSEETITPWNFEEVVDKGASAQSFIERMTNFDKNLPNEKVLPKHSLLYEYFTVYNELTKVKYVTEGMRKPAFLSGEQKKAIVDLLFKTNRKVTVKQLKEDYFKKIECFDSVEISGVEDRFNASLGTYHDLLKIIKDKDFLDNEENEDILEDIVLTLTLFEDREMIEERLKTYAHLFDDKVMKQLKRRRYTGWGRLSRKLINGIRDKQSGKTILDFLKSDGFANRNFMQLIHDDSLTFKEDIQKAQVSGQGDSLHEHIANLAGSPAIKKGILQTVKVVDELVKVMGRHKPENIVIEMARENQTTQKGQKNSRERMKRIEEGIKELGSQILKEHPVENTQLQNEKLYLYYLQNGRDMYVDQELDINRLSDYDVDHIVPQSFLKDDSIDNKVLTRSDKARGKSDNVPSEEVVKKMKNYWRQLLNAKLITQRKFDNLTKAERGGLSELDKAGFIKRQLVETRQITKHVAQILDSRMNTKYDENDKLIREVKVITLKSKLVSDFRKDFQFYKVREINNYHHAHDAYLNAVVGTALIKKYPKLESEFVYGDYKVYDVRKMIAKSEQEIGKATAKYFFYSNIMNFFKTEITLANGEIRKRPLIETNGETGEIVWDKGRDFATVRKVLSMPQVNIVKKTEVQTGGFSKESILPKRNSDKLIARKKDWDPKKYGGFDSPTVAYSVLVVAKVEKGKSKKLKSVKELLGITIMERSSFEKNPIDFLEAKGYKEVKKDLIIKLPKYSLFELENGRKRMLASAGELQKGNELALPSKYVNFLYLASHYEKLKGSPEDNEQKQLFVEQHKHYLDEIIEQISEFSKRVILADANLDKVLSAYNKHRDKPIREQAENIIHLFTLTNLGAPAAFKYFDTTIDRKRYTSTKEVLDATLIHQSITGLYETRIDLSQLGGDGGGGSPAPEAAAKGGTVSLQDEHRLFDIPVTTSLPDVWLQDFPQAWAETGGLGRAKCQAPIIIDLKPTAVPVSIKQYPMSLEAHMGIRQHIIKFLELGVLRPCRSPWNTPLLPVKKPGTQDYRPVQDLREINKRTVDIHPTVPNPYNLLSTLKPDYSWYTVLDLKDAFFCLPLAPQSQELFAFEWKDPERGISGQLTWTRLPQGFKNSPTLFNEALHRDLTDFRTQHPEVTLLQYVDDLLLAAPTKKACTQGTRHLLQELGEKGYRASAKKAQICQTKVTYLGYILSEGKRWLTPGRIETVARIPPPRNPREVREFLGTAGFCRLWIPGFAELAAPLYALTKPSTPFTWQTEHQLAFEALKKALLSAPALGLPDTSKPFTLFLDERQGIAKGVLTQKLGPWKRPVAYLSKKLDPVAAGWPPCLRIMAATAMLVKDSAKLTLGQPLTVITPHTLEAIVRQPPDRWITNARLTHYQALLLDTDRVQFGPPVTLNPATLLPVPENQPSPHDCRQVLAETHGTREDLKDQELPDADHTWYTDGSSYLDSGTRRAGAAVVDGHNTIWAQSLPPGTSAQKAELIALTKALELSKGKKANIYTDSRYAFATAHTHGSIYERRGWLTSEGKEIKNKAEIIALLKALFLPQEVAIIHCPGHQKGQDPVAVGNRQADRVARQAAMAEVLTLATEPDNTSHITAGKRTADGSEFEKRTADGSEFESPKKKAKVE

SEQ ID NO: 1599 - protein, 2100 aa, synthetic construct
MPAAKRVKLDGGDKKYSIGLDIGTNSVGWAVITDEYKVPSKKFKVLGNTDRHSIKKNLIGALLFDSGETAEATRLKRTARRRYTRRKNRICYLQEIFSNEMAKVDDSFFHRLEESFLVEEDKKHERHPIFGNIVDEVAYHEKYPTIYHLRKKLVDSTDKADLRLIYLALAHMIKFRGHFLIEGDLNPDNSDVDKLFIQLVQTYNQLFEENPINASGVDAKAILSARLSKSRRLENLIAQLPGEKKNGLFGNLIALSLGLTPNFKSNFDLAEDAKLQLSKDTYDDDLDNLLAQIGDQYADLFLAAKNLSDAILLSDILRVNTEITKAPLSASMIKRYDEHHQDLTLLKALVRQQLPEKYKEIFFDQSKNGYAGYIDGGASQEEFYKFIKPILEKMDGTEELLVKLNREDLLRKQRTFDNGSIPHQIHLGELHAILRRQEDFYPFLKDNREKIEKILTFRIPYYVGPLARGNSRFAWMTRKSEETITPWNFEEVVDKGASAQSFIERMTNFDKNLPNEKVLPKHSLLYEYFTVYNELTKVKYVTEGMRKPAFLSGEQKKAIVDLLFKTNRKVTVKQLKEDYFKKIECFDSVEISGVEDRFNASLGTYHDLLKIIKDKDFLDNEENEDILEDIVLTLTLFEDREMIEERLKTYAHLFDDKVMKQLKRRRYTGWGRLSRKLINGIRDKQSGKTILDFLKSDGFANRNFMQLIHDDSLTFKEDIQKAQVSGQGDSLHEHIANLAGSPAIKKGILQTVKVVDELVKVMGRHKPENIVIEMARENQTTQKGQKNSRERMKRIEEGIKELGSQILKEHPVENTQLQNEKLYLYYLQNGRDMYVDQELDINRLSDYDVDHIVPQSFLKDDSIDNKVLTRSDKARGKSDNVPSEEVVKKMKNYWRQLLNAKLITQRKFDNLTKAERGGLSELDKAGFIKRQLVETRQITKHVAQILDSRMNTKYDENDKLIREVKVITLKSKLVSDFRKDFQFYKVREINNYHHAHDAYLNAVVGTALIKKYPKLESEFVYGDYKVYDVRKMIAKSEQEIGKATAKYFFYSNIMNFFKTEITLANGEIRKRPLIETNGETGEIVWDKGRDFATVRKVLSMPQVNIVKKTEVQTGGFSKESILPKRNSDKLIARKKDWDPKKYGGFDSPTVAYSVLVVAKVEKGKSKKLKSVKELLGITIMERSSFEKNPIDFLEAKGYKEVKKDLIIKLPKYSLFELENGRKRMLASAGELQKGNELALPSKYVNFLYLASHYEKLKGSPEDNEQKQLFVEQHKHYLDEIIEQISEFSKRVILADANLDKVLSAYNKHRDKPIREQAENIIHLFTLTNLGAPAAFKYFDTTIDRKRYTSTKEVLDATLIHQSITGLYETRIDLSQLGGDGGPAPGGSGSSGGTVSLQDEHRLFDIPVTTSLPDVWLQDFPQAWAETGGLGRAKCQAPIIIDLKPTAVPVSIKQYPMSLEAHMGIRQHIIKFLELGVLRPCRSPWNTPLLPVKKPGTQDYRPVQDLREINKRTVDIHPTVPNPYNLLSTLKPDYSWYTVLDLKDAFFCLPLAPQSQELFAFEWKDPERGISGQLTWTRLPQGFKNSPTLFNEALHRDLTDFRTQHPEVTLLQYVDDLLLAAPTKKACTQGTRHLLQELGEKGYRASAKKAQICQTKVTYLGYILSEGKRWLTPGRIETVARIPPPRNPREVREFLGTAGFCRLWIPGFAELAAPLYALTKPSTPFTWQTEHQLAFEALKKALLSAPALGLPDTSKPFTLFLDERQGIAKGVLTQKLGPWKRPVAYLSKKLDPVAAGWPPCLRIMAATAMLVKDSAKLTLGQPLTVITPHTLEAIVRQPPDRWITNARLTHYQALLLDTDRVQFGPPVTLNPATLLPVPENQPSPHDCRQVLAETHGTREDLKDQELPDADHTWYTDGSSYLDSGTRRAGAAVVDGHNTIWAQSLPPGTSAQKAELIALTKALELSKGKKANIYTDSRYAFATAHTHGSIYERRGWLTSEGKEIKNKAEIIALLKALFLPQEVAIIHCPGHQKGQDPVAVGNRQADRVARQAAMAEVLTLATEPDNTSHITAGKRTADGSEFEKRTADGSEFESPKKKAKVE

SEQ ID NO: 1600 - protein, 2006 aa, synthetic construct
MPAAKRVKLDGGDKKYSIGLDIGTNSVGWAVITDEYKVPSKKFKVLGNTDRHSIKKNLIGALLFDSGETAEATRLKRTARRRYTRRKNRICYLQEIFSNEMAKVDDSFFHRLEESFLVEEDKKHERHPIFGNIVDEVAYHEKYPTIYHLRKKLVDSTDKADLRLIYLALAHMIKFRGHFLIEGDLNPDNSDVDKLFIQLVQTYNQLFEENPINASGVDAKAILSARLSKSRRLENLIAQLPGEKKNGLFGNLIALSLGLTPNFKSNFDLAEDAKLQLSKDTYDDDLDNLLAQIGDQYADLFLAAKNLSDAILLSDILRVNTEITKAPLSASMIKRYDEHHQDLTLLKALVRQQLPEKYKEIFFDQSKNGYAGYIDGGASQEEFYKFIKPILEKMDGTEELLVKLNREDLLRKQRTFDNGSIPHQIHLGELHAILRRQEDFYPFLKDNREKIEKILTFRIPYYVGPLARGNSRFAWMTRKSEETITPWNFEEVVDKGASAQSFIERMTNFDKNLPNEKVLPKHSLLYEYFTVYNELTKVKYVTEGMRKPAFLSGEQKKAIVDLLFKTNRKVTVKQLKEDYFKKIECFDSVEISGVEDRFNASLGTYHDLLKIIKDKDFLDNEENEDILEDIVLTLTLFEDREMIEERLKTYAHLFDDKVMKQLKRRRYTGWGRLSRKLINGIRDKQSGKTILDFLKSDGFANRNFMQLIHDDSLTFKEDIQKAQVSGQGDSLHEHIANLAGSPAIKKGILQTVKVVDELVKVMGRHKPENIVIEMARENQTTQKGQKNSRERMKRIEEGIKELGSQILKEHPVENTQLQNEKLYLYYLQNGRDMYVDQELDINRLSDYDVDHIVPQSFLKDDSIDNKVLTRSDKARGKSDNVPSEEVVKKMKNYWRQLLNAKLITQRKFDNLTKAERGGLSELDKAGFIKRQLVETRQITKHVAQILDSRMNTKYDENDKLIREVKVITLKSKLVSDFRKDFQFYKVREINNYHHAHDAYLNAVVGTALIKKYPKLESEFVYGDYKVYDVRKMIAKSEQEIGKATAKYFFYSNIMNFFKTEITLANGEIRKRPLIETNGETGEIVWDKGRDFATVRKVLSMPQVNIVKKTEVQTGGFSKESILPKRNSDKLIARKKDWDPKKYGGFDSPTVAYSVLVVAKVEKGKSKKLKSVKELLGITIMERSSFEKNPIDFLEAKGYKEVKKDLIIKLPKYSLFELENGRKRMLASAGELQKGNELALPSKYVNFLYLASHYEKLKGSPEDNEQKQLFVEQHKHYLDEIIEQISEFSKRVILADANLDKVLSAYNKHRDKPIREQAENIIHLFTLTNLGAPAAFKYFDTTIDRKRYTSTKEVLDATLIHQSITGLYETRIDLSQLGGDGGEAAAKGGGPAPGGPLGTSDSPVTHADPIDWKSEEPVWVDQWPLTQEKLSAAQQLVQEQLRLGHIEPSTSAWNSPIFVIKKKSGKWRLLQDLRKVNETMMHMGALQPGLPTPSPIPDKSYIIVIDLKDCFYTIPLAPQDCKRFAFSLPSVNFKEPMQRYQWRVLPQGMTNSPTLCQKFVATAIAPVRQRFPQLYLVHYMDDILLAHTDEHLLYQAFSILKQHLSLNGLVIADEKIQTHFPYNYLGFSLYPRVYNTQLVKLQTDHLKTLNDFQKLLGDINWIRPYLKLPTYTLQPLFDILKGDSDPASPRTLSLEGRTALQSIEEAIRQQQITYCDYQRSWGLYILPTPRAPTGVLYQDKPLRWIYLSATPTKHLLPYYELVAKIIAKGRHEAIQYFGMEPPFICVPYALEQQDWLFQFSDNWSIAFANYPGQITHHYPSDKLLQFASSHAFIFPKIVRRQPIPEATLIFTDGSSNGTAALIINHQTYYAQTSFSSAQVVELFAVHQALLTVPTSFNLFTDSSYVVGALQMIETVPIIGTTSPEVLNLFTLIQQVLHCRQHPCFFGHIRAHSTLPGALVQGNHTADVLTKQVFFQSAGKRTADGSEFEKRTADGSEFESPKKKAKVE

SEQ ID NO: 1601 - protein, 2006 aa, synthetic construct
MPAAKRVKLDGGDKKYSIGLDIGTNSVGWAVITDEYKVPSKKFKVLGNTDRHSIKKNLIGALLFDSGETAEATRLKRTARRRYTRRKNRICYLQEIFSNEMAKVDDSFFHRLEESFLVEEDKKHERHPIFGNIVDEVAYHEKYPTIYHLRKKLVDSTDKADLRLIYLALAHMIKFRGHFLIEGDLNPDNSDVDKLFIQLVQTYNQLFEENPINASGVDAKAILSARLSKSRRLENLIAQLPGEKKNGLFGNLIALSLGLTPNFKSNFDLAEDAKLQLSKDTYDDDLDNLLAQIGDQYADLFLAAKNLSDAILLSDILRVNTEITKAPLSASMIKRYDEHHQDLTLLKALVRQQLPEKYKEIFFDQSKNGYAGYIDGGASQEEFYKFIKPILEKMDGTEELLVKLNREDLLRKQRTFDNGSIPHQIHLGELHAILRRQEDFYPFLKDNREKIEKILTFRIPYYVGPLARGNSRFAWMTRKSEETITPWNFEEVVDKGASAQSFIERMTNFDKNLPNEKVLPKHSLLYEYFTVYNELTKVKYVTEGMRKPAFLSGEQKKAIVDLLFKTNRKVTVKQLKEDYFKKIECFDSVEISGVEDRFNASLGTYHDLLKIIKDKDFLDNEENEDILEDIVLTLTLFEDREMIEERLKTYAHLFDDKVMKQLKRRRYTGWGRLSRKLINGIRDKQSGKTILDFLKSDGFANRNFMQLIHDDSLTFKEDIQKAQVSGQGDSLHEHIANLAGSPAIKKGILQTVKVVDELVKVMGRHKPENIVIEMARENQTTQKGQKNSRERMKRIEEGIKELGSQILKEHPVENTQLQNEKLYLYYLQNGRDMYVDQELDINRLSDYDVDHIVPQSFLKDDSIDNKVLTRSDKARGKSDNVPSEEVVKKMKNYWRQLLNAKLITQRKFDNLTKAERGGLSELDKAGFIKRQLVETRQITKHVAQILDSRMNTKYDENDKLIREVKVITLKSKLVSDFRKDFQFYKVREINNYHHAHDAYLNAVVGTALIKKYPKLESEFVYGDYKVYDVRKMIAKSEQEIGKATAKYFFYSNIMNFFKTEITLANGEIRKRPLIETNGETGEIVWDKGRDFATVRKVLSMPQVNIVKKTEVQTGGFSKESILPKRNSDKLIARKKDWDPKKYGGFDSPTVAYSVLVVAKVEKGKSKKLKSVKELLGITIMERSSFEKNPIDFLEAKGYKEVKKDLIIKLPKYSLFELENGRKRMLASAGELQKGNELALPSKYVNFLYLASHYEKLKGSPEDNEQKQLFVEQHKHYLDEIIEQISEFSKRVILADANLDKVLSAYNKHRDKPIREQAENIIHLFTLTNLGAPAAFKYFDTTIDRKRYTSTKEVLDATLIHQSITGLYETRIDLSQLGGDGGGGSEAAAKGSSGGPLGTSDSPVTHADPIDWKSEEPVWVDQWPLTQEKLSAAQQLVQEQLRLGHIEPSTSAWNSPIFVIKKKSGKWRLLQDLRKVNETMMHMGALQPGLPTPSPIPDKSYIIVIDLKDCFYTIPLAPQDCKRFAFSLPSVNFKEPMQRYQWRVLPQGMTNSPTLCQKFVATAIAPVRQRFPQLYLVHYMDDILLAHTDEHLLYQAFSILKQHLSLNGLVIADEKIQTHFPYNYLGFSLYPRVYNTQLVKLQTDHLKTLNDFQKLLGDINWIRPYLKLPTYTLQPLFDILKGDSDPASPRTLSLEGRTALQSIEEAIRQQQITYCDYQRSWGLYILPTPRAPTGVLYQDKPLRWIYLSATPTKHLLPYYELVAKIIAKGRHEAIQYFGMEPPFICVPYALEQQDWLFQFSDNWSIAFANYPGQITHHYPSDKLLQFASSHAFIFPKIVRRQPIPEATLIFTDGSSNGTAALIINHQTYYAQTSFSSAQVVELFAVHQALLTVPTSFNLFTDSSYVVGALQMIETVPIIGTTSPEVLNLFTLIQQVLHCRQHPCFFGHIRAHSTLPGALVQGNHTADVLTKQVFFQSAGKRTADGSEFEKRTADGSEFESPKKKAKVE

SEQ ID NO: 1602 - protein, 2013 aa, synthetic construct
MPAAKRVKLDGGDKKYSIGLDIGTNSVGWAVITDEYKVPSKKFKVLGNTDRHSIKKNLIGALLFDSGETAEATRLKRTARRRYTRRKNRICYLQEIFSNEMAKVDDSFFHRLEESFLVEEDKKHERHPIFGNIVDEVAYHEKYPTIYHLRKKLVDSTDKADLRLIYLALAHMIKFRGHFLIEGDLNPDNSDVDKLFIQLVQTYNQLFEENPINASGVDAKAILSARLSKSRRLENLIAQLPGEKKNGLFGNLIALSLGLTPNFKSNFDLAEDAKLQLSKDTYDDDLDNLLAQIGDQYADLFLAAKNLSDAILLSDILRVNTEITKAPLSASMIKRYDEHHQDLTLLKALVRQQLPEKYKEIFFDQSKNGYAGYIDGGASQEEFYKFIKPILEKMDGTEELLVKLNREDLLRKQRTFDNGSIPHQIHLGELHAILRRQEDFYPFLKDNREKIEKILTFRIPYYVGPLARGNSRFAWMTRKSEETITPWNFEEVVDKGASAQSFIERMTNFDKNLPNEKVLPKHSLLYEYFTVYNELTKVKYVTEGMRKPAFLSGEQKKAIVDLLFKTNRKVTVKQLKEDYFKKIECFDSVEISGVEDRFNASLGTYHDLLKIIKDKDFLDNEENEDILEDIVLTLTLFEDREMIEERLKTYAHLFDDKVMKQLKRRRYTGWGRLSRKLINGIRDKQSGKTILDFLKSDGFANRNFMQLIHDDSLTFKEDIQKAQVSGQGDSLHEHIANLAGSPAIKKGILQTVKVVDELVKVMGRHKPENIVIEMARENQTTQKGQKNSRERMKRIEEGIKELGSQILKEHPVENTQLQNEKLYLYYLQNGRDMYVDQELDINRLSDYDVDHIVPQSFLKDDSIDNKVLTRSDKARGKSDNVPSEEVVKKMKNYWRQLLNAKLITQRKFDNLTKAERGGLSELDKAGFIKRQLVETRQITKHVAQILDSRMNTKYDENDKLIREVKVITLKSKLVSDFRKDFQFYKVREINNYHHAHDAYLNAVVGTALIKKYPKLESEFVYGDYKVYDVRKMIAKSEQEIGKATAKYFFYSNIMNFFKTEITLANGEIRKRPLIETNGETGEIVWDKGRDFATVRKVLSMPQVNIVKKTEVQTGGFSKESILPKRNSDKLIARKKDWDPKKYGGFDSPTVAYSVLVVAKVEKGKSKKLKSVKELLGITIMERSSFEKNPIDFLEAKGYKEVKKDLIIKLPKYSLFELENGRKRMLASAGELQKGNELALPSKYVNFLYLASHYEKLKGSPEDNEQKQLFVEQHKHYLDEIIEQISEFSKRVILADANLDKVLSAYNKHRDKPIREQAENIIHLFTLTNLGAPAAFKYFDTTIDRKRYTSTKEVLDATLIHQSITGLYETRIDLSQLGGDGGGSSGSSGSSGSSGSSGSSGGPLGTSDSPVTHADPIDWKSEEPVWVDQWPLTQEKLSAAQQLVQEQLRLGHIEPSTSAWNSPIFVIKKKSGKWRLLQDLRKVNETMMHMGALQPGLPTPSPIPDKSYIIVIDLKDCFYTIPLAPQDCKRFAFSLPSVNFKEPMQRYQWRVLPQGMTNSPTLCQKFVATAIAPVRQRFPQLYLVHYMDDILLAHTDEHLLYQAFSILKQHLSLNGLVIADEKIQTHFPYNYLGFSLYPRVYNTQLVKLQTDHLKTLNDFQKLLGDINWIRPYLKLPTYTLQPLFDILKGDSDPASPRTLSLEGRTALQSIEEAIRQQQITYCDYQRSWGLYILPTPRAPTGVLYQDKPLRWIYLSATPTKHLLPYYELVAKIIAKGRHEAIQYFGMEPPFICVPYALEQQDWLFQFSDNWSIAFANYPGQITHHYPSDKLLQFASSHAFIFPKIVRRQPIPEATLIFTDGSSNGTAALIINHQTYYAQTSFSSAQVVELFAVHQALLTVPTSFNLFTDSSYVVGALQMIETVPIIGTTSPEVLNLFTLIQQVLHCRQHPCFFGHIRAHSTLPGALVQGNHTADVLTKQVFFQSAGKRTADGSEFEKRTADGSEFESPKKKAKVE

SEQ ID NO: 1603 - protein, 2001 aa, synthetic construct
MPAAKRVKLDGGDKKYSIGLDIGTNSVGWAVITDEYKVPSKKFKVLGNTDRHSIKKNLIGALLFDSGETAEATRLKRTARRRYTRRKNRICYLQEIFSNEMAKVDDSFFHRLEESFLVEEDKKHERHPIFGNIVDEVAYHEKYPTIYHLRKKLVDSTDKADLRLIYLALAHMIKFRGHFLIEGDLNPDNSDVDKLFIQLVQTYNQLFEENPINASGVDAKAILSARLSKSRRLENLIAQLPGEKKNGLFGNLIALSLGLTPNFKSNFDLAEDAKLQLSKDTYDDDLDNLLAQIGDQYADLFLAAKNLSDAILLSDILRVNTEITKAPLSASMIKRYDEHHQDLTLLKALVRQQLPEKYKEIFFDQSKNGYAGYIDGGASQEEFYKFIKPILEKMDGTEELLVKLNREDLLRKQRTFDNGSIPHQIHLGELHAILRRQEDFYPFLKDNREKIEKILTFRIPYYVGPLARGNSRFAWMTRKSEETITPWNFEEVVDKGASAQSFIERMTNFDKNLPNEKVLPKHSLLYEYFTVYNELTKVKYVTEGMRKPAFLSGEQKKAIVDLLFKTNRKVTVKQLKEDYFKKIECFDSVEISGVEDRFNASLGTYHDLLKIIKDKDFLDNEENEDILEDIVLTLTLFEDREMIEERLKTYAHLFDDKVMKQLKRRRYTGWGRLSRKLINGIRDKQSGKTILDFLKSDGFANRNFMQLIHDDSLTFKEDIQKAQVSGQGDSLHEHIANLAGSPAIKKGILQTVKVVDELVKVMGRHKPENIVIEMARENQTTQKGQKNSRERMKRIEEGIKELGSQILKEHPVENTQLQNEKLYLYYLQNGRDMYVDQELDINRLSDYDVDHIVPQSFLKDDSIDNKVLTRSDKARGKSDNVPSEEVVKKMKNYWRQLLNAKLITQRKFDNLTKAERGGLSELDKAGFIKRQLVETRQITKHVAQILDSRMNTKYDENDKLIREVKVITLKSKLVSDFRKDFQFYKVREINNYHHAHDAYLNAVVGTALIKKYPKLESEFVYGDYKVYDVRKMIAKSEQEIGKATAKYFFYSNIMNFFKTEITLANGEIRKRPLIETNGETGEIVWDKGRDFATVRKVLSMPQVNIVKKTEVQTGGFSKESILPKRNSDKLIARKKDWDPKKYGGFDSPTVAYSVLVVAKVEKGKSKKLKSVKELLGITIMERSSFEKNPIDFLEAKGYKEVKKDLIIKLPKYSLFELENGRKRMLASAGELQKGNELALPSKYVNFLYLASHYEKLKGSPEDNEQKQLFVEQHKHYLDEIIEQISEFSKRVILADANLDKVLSAYNKHRDKPIREQAENIIHLFTLTNLGAPAAFKYFDTTIDRKRYTSTKEVLDATLIHQSITGLYETRIDLSQLGGDGGGSSGSSGGPLGTSDSPVTHADPIDWKSEEPVWVDQWPLTQEKLSAAQQLVQEQLRLGHIEPSTSAWNSPIFVIKKKSGKWRLLQDLRKVNETMMHMGALQPGLPTPSPIPDKSYIIVIDLKDCFYTIPLAPQDCKRFAFSLPSVNFKEPMQRYQWRVLPQGMTNSPTLCQKFVATAIAPVRQRFPQLYLVHYMDDILLAHTDEHLLYQAFSILKQHLSLNGLVIADEKIQTHFPYNYLGFSLYPRVYNTQLVKLQTDHLKTLNDFQKLLGDINWIRPYLKLPTYTLQPLFDILKGDSDPASPRTLSLEGRTALQSIEEAIRQQQITYCDYQRSWGLYILPTPRAPTGVLYQDKPLRWIYLSATPTKHLLPYYELVAKIIAKGRHEAIQYFGMEPPFICVPYALEQQDWLFQFSDNWSIAFANYPGQITHHYPSDKLLQFASSHAFIFPKIVRRQPIPEATLIFTDGSSNGTAALIINHQTYYAQTSFSSAQVVELFAVHQALLTVPTSFNLFTDSSYVVGALQMIETVPIIGTTSPEVLNLFTLIQQVLHCRQHPCFFGHIRAHSTLPGALVQGNHTADVLTKQVFFQSAGKRTADGSEFEKRTADGSEFESPKKKAKVE

SEQ ID NO: 1604 - protein, 2216 aa, synthetic construct
MPAAKRVKLDGGDKKYSIGLDIGTNSVGWAVITDEYKVPSKKFKVLGNTDRHSIKKNLIGALLFDSGETAEATRLKRTARRRYTRRKNRICYLQEIFSNEMAKVDDSFFHRLEESFLVEEDKKHERHPIFGNIVDEVAYHEKYPTIYHLRKKLVDSTDKADLRLIYLALAHMIKFRGHFLIEGDLNPDNSDVDKLFIQLVQTYNQLFEENPINASGVDAKAILSARLSKSRRLENLIAQLPGEKKNGLFGNLIALSLGLTPNFKSNFDLAEDAKLQLSKDTYDDDLDNLLAQIGDQYADLFLAAKNLSDAILLSDILRVNTEITKAPLSASMIKRYDEHHQDLTLLKALVRQQLPEKYKEIFFDQSKNGYAGYIDGGASQEEFYKFIKPILEKMDGTEELLVKLNREDLLRKQRTFDNGSIPHQIHLGELHAILRRQEDFYPFLKDNREKIEKILTFRIPYYVGPLARGNSRFAWMTRKSEETITPWNFEEVVDKGASAQSFIERMTNFDKNLPNEKVLPKHSLLYEYFTVYNELTKVKYVTEGMRKPAFLSGEQKKAIVDLLFKTNRKVTVKQLKEDYFKKIECFDSVEISGVEDRFNASLGTYHDLLKIIKDKDFLDNEENEDILEDIVLTLTLFEDREMIEERLKTYAHLFDDKVMKQLKRRRYTGWGRLSRKLINGIRDKQSGKTILDFLKSDGFANRNFMQLIHDDSLTFKEDIQKAQVSGQGDSLHEHIANLAGSPAIKKGILQTVKVVDELVKVMGRHKPENIVIEMARENQTTQKGQKNSRERMKRIEEGIKELGSQILKEHPVENTQLQNEKLYLYYLQNGRDMYVDQELDINRLSDYDVDHIVPQSFLKDDSIDNKVLTRSDKARGKSDNVPSEEVVKKMKNYWRQLLNAKLITQRKFDNLTKAERGGLSELDKAGFIKRQLVETRQITKHVAQILDSRMNTKYDENDKLIREVKVITLKSKLVSDFRKDFQFYKVREINNYHHAHDAYLNAVVGTALIKKYPKLESEFVYGDYKVYDVRKMIAKSEQEIGKATAKYFFYSNIMNFFKTEITLANGEIRKRPLIETNGETGEIVWDKGRDFATVRKVLSMPQVNIVKKTEVQTGGFSKESILPKRNSDKLIARKKDWDPKKYGGFDSPTVAYSVLVVAKVEKGKSKKLKSVKELLGITIMERSSFEKNPIDFLEAKGYKEVKKDLIIKLPKYSLFELENGRKRMLASAGELQKGNELALPSKYVNFLYLASHYEKLKGSPEDNEQKQLFVEQHKHYLDEIIEQISEFSKRVILADANLDKVLSAYNKHRDKPIREQAENIIHLFTLTNLGAPAAFKYFDTTIDRKRYTSTKEVLDATLIHQSITGLYETRIDLSQLGGDGGPAPGSSGGGGGTLGDQGSRGSDPLPEPRVTLTVEGIPTEFLVNTGAEHSVLTKPMGKMGSKRTVVAGATGSKVYPWTTKRLLKIGQKQVTHSFLVIPECPAPLLGRDLLTKLKAQIQFSTEGPQVTWEDRPAMCLVLNLEEEYRLHEKPVPPSIDPSWLQLFPMVWAEKAGMGLANQVPPVVVELKSDASPVAVRQYPMSKEAREGIRPHIQRFLDLGILVPCQSPWNTPLLPVKKPGTNDYRPVQDLREVNKRVQDIHPTVPNPYNLLSSLPPSHTWYSVLDLKDAFFCLKLHPNSQPLFAFEWRDPEKGNTGQLTWTRLPQGFKNSPTLFDEALHRDLASFRALNPQVVMLQYVDDLLVAAPTYRDCKEGTRRLLQELSKLGYRVSAKKAQLCREEVTYLGYLLKGGKRWLTPARKATVMKIPTPTTPRQVREFLGTAGFCRLWIPGFASLAAPLYPLTREKVPFTWTEAHQEAFGRIKEALLSAPALALPDLTKPFALYVDEKEGVARGVLTQTLGPWRRPVAYLSKKLDPVASGWPTCLKAIAAVALLLKDADKLTLGQNVLVIAPHNLESIVRQPPDRWMTNARMTHYQSLLLNERVSFAPPAILNPATLLPVESDDTPIHICSEILAEETGTRPDLRDQPLPGVPAWYTDGSSFIMDGRRQAGAAIVDNKRTVWASNLPEGTSAQKAELIALTQALRLAEGKSINIYTDSRYAFATAHVHGAIYKQRGLLTSAGKDIKNKEEILALLEAIHLPKRVAIIHCPGHQRGTDPVATGNRKADEAAKQAAQSTRILTETTKNAGKRTADGSEFEKRTADGSEFESPKKKAKVE

SEQ ID NO: 1605 - protein, 2218 aa, synthetic construct
MPAAKRVKLDGGDKKYSIGLDIGTNSVGWAVITDEYKVPSKKFKVLGNTDRHSIKKNLIGALLFDSGETAEATRLKRTARRRYTRRKNRICYLQEIFSNEMAKVDDSFFHRLEESFLVEEDKKHERHPIFGNIVDEVAYHEKYPTIYHLRKKLVDSTDKADLRLIYLALAHMIKFRGHFLIEGDLNPDNSDVDKLFIQLVQTYNQLFEENPINASGVDAKAILSARLSKSRRLENLIAQLPGEKKNGLFGNLIALSLGLTPNFKSNFDLAEDAKLQLSKDTYDDDLDNLLAQIGDQYADLFLAAKNLSDAILLSDILRVNTEITKAPLSASMIKRYDEHHQDLTLLKALVRQQLPEKYKEIFFDQSKNGYAGYIDGGASQEEFYKFIKPILEKMDGTEELLVKLNREDLLRKQRTFDNGSIPHQIHLGELHAILRRQEDFYPFLKDNREKIEKILTFRIPYYVGPLARGNSRFAWMTRKSEETITPWNFEEVVDKGASAQSFIERMTNFDKNLPNEKVLPKHSLLYEYFTVYNELTKVKYVTEGMRKPAFLSGEQKKAIVDLLFKTNRKVTVKQLKEDYFKKIECFDSVEISGVEDRFNASLGTYHDLLKIIKDKDFLDNEENEDILEDIVLTLTLFEDREMIEERLKTYAHLFDDKVMKQLKRRRYTGWGRLSRKLINGIRDKQSGKTILDFLKSDGFANRNFMQLIHDDSLTFKEDIQKAQVSGQGDSLHEHIANLAGSPAIKKGILQTVKVVDELVKVMGRHKPENIVIEMARENQTTQKGQKNSRERMKRIEEGIKELGSQILKEHPVENTQLQNEKLYLYYLQNGRDMYVDQELDINRLSDYDVDHIVPQSFLKDDSIDNKVLTRSDKARGKSDNVPSEEVVKKMKNYWRQLLNAKLITQRKFDNLTKAERGGLSELDKAGFIKRQLVETRQITKHVAQILDSRMNTKYDENDKLIREVKVITLKSKLVSDFRKDFQFYKVREINNYHHAHDAYLNAVVGTALIKKYPKLESEFVYGDYKVYDVRKMIAKSEQEIGKATAKYFFYSNIMNFFKTEITLANGEIRKRPLIETNGETGEIVWDKGRDFATVRKVLSMPQVNIVKKTEVQTGGFSKESILPKRNSDKLIARKKDWDPKKYGGFDSPTVAYSVLVVAKVEKGKSKKLKSVKELLGITIMERSSFEKNPIDFLEAKGYKEVKKDLIIKLPKYSLFELENGRKRMLASAGELQKGNELALPSKYVNFLYLASHYEKLKGSPEDNEQKQLFVEQHKHYLDEIIEQISEFSKRVILADANLDKVLSAYNKHRDKPIREQAENIIHLFTLTNLGAPAAFKYFDTTIDRKRYTSTKEVLDATLIHQSITGLYETRIDLSQLGGDGGPAPGGGEAAAKGGTLGDQGSRGSDPLPEPRVTLTVEGIPTEFLVNTGAEHSVLTKPMGKMGSKRTVVAGATGSKVYPWTTKRLLKIGQKQVTHSFLVIPECPAPLLGRDLLTKLKAQIQFSTEGPQVTWEDRPAMCLVLNLEEEYRLHEKPVPPSIDPSWLQLFPMVWAEKAGMGLANQVPPVVVELKSDASPVAVRQYPMSKEAREGIRPHIQRFLDLGILVPCQSPWNTPLLPVKKPGTNDYRPVQDLREVNKRVQDIHPTVPNPYNLLSSLPPSHTWYSVLDLKDAFFCLKLHPNSQPLFAFEWRDPEKGNTGQLTWTRLPQGFKNSPTLFDEALHRDLASFRALNPQVVMLQYVDDLLVAAPTYRDCKEGTRRLLQELSKLGYRVSAKKAQLCREEVTYLGYLLKGGKRWLTPARKATVMKIPTPTTPRQVREFLGTAGFCRLWIPGFASLAAPLYPLTREKVPFTWTEAHQEAFGRIKEALLSAPALALPDLTKPFALYVDEKEGVARGVLTQTLGPWRRPVAYLSKKLDPVASGWPTCLKAIAAVALLLKDADKLTLGQNVLVIAPHNLESIVRQPPDRWMTNARMTHYQSLLLNERVSFAPPAILNPATLLPVESDDTPIHICSEILAEETGTRPDLRDQPLPGVPAWYTDGSSFIMDGRRQAGAAIVDNKRTVWASNLPEGTSAQKAELIALTQALRLAEGKSINIYTDSRYAFATAHVHGAIYKQRGLLTSAGKDIKNKEEILALLEAIHLPKRVAIIHCPGHQRGTDPVATGNRKADEAAKQAAQSTRILTETTKNAGKRTADGSEFEKRTADGSEFESPKKKAKVE

SEQ ID NO: 1606 - protein, 2218 aa, synthetic construct
MPAAKRVKLDGGDKKYSIGLDIGTNSVGWAVITDEYKVPSKKFKVLGNTDRHSIKKNLIGALLFDSGETAEATRLKRTARRRYTRRKNRICYLQEIFSNEMAKVDDSFFHRLEESFLVEEDKKHERHPIFGNIVDEVAYHEKYPTIYHLRKKLVDSTDKADLRLIYLALAHMIKFRGHFLIEGDLNPDNSDVDKLFIQLVQTYNQLFEENPINASGVDAKAILSARLSKSRRLENLIAQLPGEKKNGLFGNLIALSLGLTPNFKSNFDLAEDAKLQLSKDTYDDDLDNLLAQIGDQYADLFLAAKNLSDAILLSDILRVNTEITKAPLSASMIKRYDEHHQDLTLLKALVRQQLPEKYKEIFFDQSKNGYAGYIDGGASQEEFYKFIKPILEKMDGTEELLVKLNREDLLRKQRTFDNGSIPHQIHLGELHAILRRQEDFYPFLKDNREKIEKILTFRIPYYVGPLARGNSRFAWMTRKSEETITPWNFEEVVDKGASAQSFIERMTNFDKNLPNEKVLPKHSLLYEYFTVYNELTKVKYVTEGMRKPAFLSGEQKKAIVDLLFKTNRKVTVKQLKEDYFKKIECFDSVEISGVEDRFNASLGTYHDLLKIIKDKDFLDNEENEDILEDIVLTLTLFEDREMIEERLKTYAHLFDDKVMKQLKRRRYTGWGRLSRKLINGIRDKQSGKTILDFLKSDGFANRNFMQLIHDDSLTFKEDIQKAQVSGQGDSLHEHIANLAGSPAIKKGILQTVKVVDELVKVMGRHKPENIVIEMARENQTTQKGQKNSRERMKRIEEGIKELGSQILKEHPVENTQLQNEKLYLYYLQNGRDMYVDQELDINRLSDYDVDHIVPQSFLKDDSIDNKVLTRSDKARGKSDNVPSEEVVKKMKNYWRQLLNAKLITQRKFDNLTKAERGGLSELDKAGFIKRQLVETRQITKHVAQILDSRMNTKYDENDKLIREVKVITLKSKLVSDFRKDFQFYKVREINNYHHAHDAYLNAVVGTALIKKYPKLESEFVYGDYKVYDVRKMIAKSEQEIGKATAKYFFYSNIMNFFKTEITLANGEIRKRPLIETNGETGEIVWDKGRDFATVRKVLSMPQVNIVKKTEVQTGGFSKESILPKRNSDKLIARKKDWDPKKYGGFDSPTVAYSVLVVAKVEKGKSKKLKSVKELLGITIMERSSFEKNPIDFLEAKGYKEVKKDLIIKLPKYSLFELENGRKRMLASAGELQKGNELALPSKYVNFLYLASHYEKLKGSPEDNEQKQLFVEQHKHYLDEIIEQISEFSKRVILADANLDKVLSAYNKHRDKPIREQAENIIHLFTLTNLGAPAAFKYFDTTIDRKRYTSTKEVLDATLIHQSITGLYETRIDLSQLGGDGGGGGGSSEAAAKGGTLGDQGSRGSDPLPEPRVTLTVEGIPTEFLVNTGAEHSVLTKPMGKMGSKRTVVAGATGSKVYPWTTKRLLKIGQKQVTHSFLVIPECPAPLLGRDLLTKLKAQIQFSTEGPQVTWEDRPAMCLVLNLEEEYRLHEKPVPPSIDPSWLQLFPMVWAEKAGMGLANQVPPVVVELKSDASPVAVRQYPMSKEAREGIRPHIQRFLDLGILVPCQSPWNTPLLPVKKPGTNDYRPVQDLREVNKRVQDIHPTVPNPYNLLSSLPPSHTWYSVLDLKDAFFCLKLHPNSQPLFAFEWRDPEKGNTGQLTWTRLPQGFKNSPTLFDEALHRDLASFRALNPQVVMLQYVDDLLVAAPTYRDCKEGTRRLLQELSKLGYRVSAKKAQLCREEVTYLGYLLKGGKRWLTPARKATVMKIPTPTTPRQVREFLGTAGFCRLWIPGFASLAAPLYPLTREKVPFTWTEAHQEAFGRIKEALLSAPALALPDLTKPFALYVDEKEGVARGVLTQTLGPWRRPVAYLSKKLDPVASGWPTCLKAIAAVALLLKDADKLTLGQNVLVIAPHNLESIVRQPPDRWMTNARMTHYQSLLLNERVSFAPPAILNPATLLPVESDDTPIHICSEILAEETGTRPDLRDQPLPGVPAWYTDGSSFIMDGRRQAGAAIVDNKRTVWASNLPEGTSAQKAELIALTQALRLAEGKSINIYTDSRYAFATAHVHGAIYKQRGLLTSAGKDIKNKEEILALLEAIHLPKRVAIIHCPGHQRGTDPVATGNRKADEAAKQAAQSTRILTETTKNAGKRTADGSEFEKRTADGSEFESPKKKAKVE

SEQ ID NO: 1607 - protein, 2213 aa, synthetic construct
MPAAKRVKLDGGDKKYSIGLDIGTNSVGWAVITDEYKVPSKKFKVLGNTDRHSIKKNLIGALLFDSGETAEATRLKRTARRRYTRRKNRICYLQEIFSNEMAKVDDSFFHRLEESFLVEEDKKHERHPIFGNIVDEVAYHEKYPTIYHLRKKLVDSTDKADLRLIYLALAHMIKFRGHFLIEGDLNPDNSDVDKLFIQLVQTYNQLFEENPINASGVDAKAILSARLSKSRRLENLIAQLPGEKKNGLFGNLIALSLGLTPNFKSNFDLAEDAKLQLSKDTYDDDLDNLLAQIGDQYADLFLAAKNLSDAILLSDILRVNTEITKAPLSASMIKRYDEHHQDLTLLKALVRQQLPEKYKEIFFDQSKNGYAGYIDGGASQEEFYKFIKPILEKMDGTEELLVKLNREDLLRKQRTFDNGSIPHQIHLGELHAILRRQEDFYPFLKDNREKIEKILTFRIPYYVGPLARGNSRFAWMTRKSEETITPWNFEEVVDKGASAQSFIERMTNFDKNLPNEKVLPKHSLLYEYFTVYNELTKVKYVTEGMRKPAFLSGEQKKAIVDLLFKTNRKVTVKQLKEDYFKKIECFDSVEISGVEDRFNASLGTYHDLLKIIKDKDFLDNEENEDILEDIVLTLTLFEDREMIEERLKTYAHLFDDKVMKQLKRRRYTGWGRLSRKLINGIRDKQSGKTILDFLKSDGFANRNFMQLIHDDSLTFKEDIQKAQVSGQGDSLHEHIANLAGSPAIKKGILQTVKVVDELVKVMGRHKPENIVIEMARENQTTQKGQKNSRERMKRIEEGIKELGSQILKEHPVENTQLQNEKLYLYYLQNGRDMYVDQELDINRLSDYDVDHIVPQSFLKDDSIDNKVLTRSDKARGKSDNVPSEEVVKKMKNYWRQLLNAKLITQRKFDNLTKAERGGLSELDKAGFIKRQLVETRQITKHVAQILDSRMNTKYDENDKLIREVKVITLKSKLVSDFRKDFQFYKVREINNYHHAHDAYLNAVVGTALIKKYPKLESEFVYGDYKVYDVRKMIAKSEQEIGKATAKYFFYSNIMNFFKTEITLANGEIRKRPLIETNGETGEIVWDKGRDFATVRKVLSMPQVNIVKKTEVQTGGFSKESILPKRNSDKLIARKKDWDPKKYGGFDSPTVAYSVLVVAKVEKGKSKKLKSVKELLGITIMERSSFEKNPIDFLEAKGYKEVKKDLIIKLPKYSLFELENGRKRMLASAGELQKGNELALPSKYVNFLYLASHYEKLKGSPEDNEQKQLFVEQHKHYLDEIIEQISEFSKRVILADANLDKVLSAYNKHRDKPIREQAENIIHLFTLTNLGAPAAFKYFDTTIDRKRYTSTKEVLDATLIHQSITGLYETRIDLSQLGGDGGGGSPAPGGTLGDQGSRGSDPLPEPRVTLTVEGIPTEFLVNTGAEHSVLTKPMGKMGSKRTVVAGATGSKVYPWTTKRLLKIGQKQVTHSFLVIPECPAPLLGRDLLTKLKAQIQFSTEGPQVTWEDRPAMCLVLNLEEEYRLHEKPVPPSIDPSWLQLFPMVWAEKAGMGLANQVPPVVVELKSDASPVAVRQYPMSKEAREGIRPHIQRFLDLGILVPCQSPWNTPLLPVKKPGTNDYRPVQDLREVNKRVQDIHPTVPNPYNLLSSLPPSHTWYSVLDLKDAFFCLKLHPNSQPLFAFEWRDPEKGNTGQLTWTRLPQGFKNSPTLFDEALHRDLASFRALNPQVVMLQYVDDLLVAAPTYRDCKEGTRRLLQELSKLGYRVSAKKAQLCREEVTYLGYLLKGGKRWLTPARKATVMKIPTPTTPRQVREFLGTAGFCRLWIPGFASLAAPLYPLTREKVPFTWTEAHQEAFGRIKEALLSAPALALPDLTKPFALYVDEKEGVARGVLTQTLGPWRRPVAYLSKKLDPVASGWPTCLKAIAAVALLLKDADKLTLGQNVLVIAPHNLESIVRQPPDRWMTNARMTHYQSLLLNERVSFAPPAILNPATLLPVESDDTPIHICSEILAEETGTRPDLRDQPLPGVPAWYTDGSSFIMDGRRQAGAAIVDNKRTVWASNLPEGTSAQKAELIALTQALRLAEGKSINIYTDSRYAFATAHVHGAIYKQRGLLTSAGKDIKNKEEILALLEAIHLPKRVAIIHCPGHQRGTDPVATGNRKADEAAKQAAQSTRILTETTKNAGKRTADGSEFEKRTADGSEFESPKKKAKVE

SEQ ID NO: 1608 - protein, 2216 aa, synthetic construct
MPAAKRVKLDGGDKKYSIGLDIGTNSVGWAVITDEYKVPSKKFKVLGNTDRHSIKKNLIGALLFDSGETAEATRLKRTARRRYTRRKNRICYLQEIFSNEMAKVDDSFFHRLEESFLVEEDKKHERHPIFGNIVDEVAYHEKYPTIYHLRKKLVDSTDKADLRLIYLALAHMIKFRGHFLIEGDLNPDNSDVDKLFIQLVQTYNQLFEENPINASGVDAKAILSARLSKSRRLENLIAQLPGEKKNGLFGNLIALSLGLTPNFKSNFDLAEDAKLQLSKDTYDDDLDNLLAQIGDQYADLFLAAKNLSDAILLSDILRVNTEITKAPLSASMIKRYDEHHQDLTLLKALVRQQLPEKYKEIFFDQSKNGYAGYIDGGASQEEFYKFIKPILEKMDGTEELLVKLNREDLLRKQRTFDNGSIPHQIHLGELHAILRRQEDFYPFLKDNREKIEKILTFRIPYYVGPLARGNSRFAWMTRKSEETITPWNFEEVVDKGASAQSFIERMTNFDKNLPNEKVLPKHSLLYEYFTVYNELTKVKYVTEGMRKPAFLSGEQKKAIVDLLFKTNRKVTVKQLKEDYFKKIECFDSVEISGVEDRFNASLGTYHDLLKIIKDKDFLDNEENEDILEDIVLTLTLFEDREMIEERLKTYAHLFDDKVMKQLKRRRYTGWGRLSRKLINGIRDKQSGKTILDFLKSDGFANRNFMQLIHDDSLTFKEDIQKAQVSGQGDSLHEHIANLAGSPAIKKGILQTVKVVDELVKVMGRHKPENIVIEMARENQTTQKGQKNSRERMKRIEEGIKELGSQILKEHPVENTQLQNEKLYLYYLQNGRDMYVDQELDINRLSDYDVDHIVPQSFLKDDSIDNKVLTRSDKARGKSDNVPSEEVVKKMKNYWRQLLNAKLITQRKFDNLTKAERGGLSELDKAGFIKRQLVETRQITKHVAQILDSRMNTKYDENDKLIREVKVITLKSKLVSDFRKDFQFYKVREINNYHHAHDAYLNAVVGTALIKKYPKLESEFVYGDYKVYDVRKMIAKSEQEIGKATAKYFFYSNIMNFFKTEITLANGEIRKRPLIETNGETGEIVWDKGRDFATVRKVLSMPQVNIVKKTEVQTGGFSKESILPKRNSDKLIARKKDWDPKKYGGFDSPTVAYSVLVVAKVEKGKSKKLKSVKELLGITIMERSSFEKNPIDFLEAKGYKEVKKDLIIKLPKYSLFELENGRKRMLASAGELQKGNELALPSKYVNFLYLASHYEKLKGSPEDNEQKQLFVEQHKHYLDEIIEQISEFSKRVILADANLDKVLSAYNKHRDKPIREQAENIIHLFTLTNLGAPAAFKYFDTTIDRKRYTSTKEVLDATLIHQSITGLYETRIDLSQLGGDGGGGSGGGGSSGGTLGDQGSRGSDPLPEPRVTLTVEGIPTEFLVNTGAEHSVLTKPMGKMGSKRTVVAGATGSKVYPWTTKRLLKIGQKQVTHSFLVIPECPAPLLGRDLLTKLKAQIQFSTEGPQVTWEDRPAMCLVLNLEEEYRLHEKPVPPSIDPSWLQLFPMVWAEKAGMGLANQVPPVVVELKSDASPVAVRQYPMSKEAREGIRPHIQRFLDLGILVPCQSPWNTPLLPVKKPGTNDYRPVQDLREVNKRVQDIHPTVPNPYNLLSSLPPSHTWYSVLDLKDAFFCLKLHPNSQPLFAFEWRDPEKGNTGQLTWTRLPQGFKNSPTLFDEALHRDLASFRALNPQVVMLQYVDDLLVAAPTYRDCKEGTRRLLQELSKLGYRVSAKKAQLCREEVTYLGYLLKGGKRWLTPARKATVMKIPTPTTPRQVREFLGTAGFCRLWIPGFASLAAPLYPLTREKVPFTWTEAHQEAFGRIKEALLSAPALALPDLTKPFALYVDEKEGVARGVLTQTLGPWRRPVAYLSKKLDPVASGWPTCLKAIAAVALLLKDADKLTLGQNVLVIAPHNLESIVRQPPDRWMTNARMTHYQSLLLNERVSFAPPAILNPATLLPVESDDTPIHICSEILAEETGTRPDLRDQPLPGVPAWYTDGSSFIMDGRRQAGAAIVDNKRTVWASNLPEGTSAQKAELIALTQALRLAEGKSINIYTDSRYAFATAHVHGAIYKQRGLLTSAGKDIKNKEEILALLEAIHLPKRVAIIHCPGHQRGTDPVATGNRKADEAAKQAAQSTRILTETTKNAGKRTADGSEFEKRTADGSEFESPKKKAKVE

SEQ ID NO: 1609 - protein, 2220 aa, synthetic construct
MPAAKRVKLDGGDKKYSIGLDIGTNSVGWAVITDEYKVPSKKFKVLGNTDRHSIKKNLIGALLFDSGETAEATRLKRTARRRYTRRKNRICYLQEIFSNEMAKVDDSFFHRLEESFLVEEDKKHERHPIFGNIVDEVAYHEKYPTIYHLRKKLVDSTDKADLRLIYLALAHMIKFRGHFLIEGDLNPDNSDVDKLFIQLVQTYNQLFEENPINASGVDAKAILSARLSKSRRLENLIAQLPGEKKNGLFGNLIALSLGLTPNFKSNFDLAEDAKLQLSKDTYDDDLDNLLAQIGDQYADLFLAAKNLSDAILLSDILRVNTEITKAPLSASMIKRYDEHHQDLTLLKALVRQQLPEKYKEIFFDQSKNGYAGYIDGGASQEEFYKFIKPILEKMDGTEELLVKLNREDLLRKQRTFDNGSIPHQIHLGELHAILRRQEDFYPFLKDNREKIEKILTFRIPYYVGPLARGNSRFAWMTRKSEETITPWNFEEVVDKGASAQSFIERMTNFDKNLPNEKVLPKHSLLYEYFTVYNELTKVKYVTEGMRKPAFLSGEQKKAIVDLLFKTNRKVTVKQLKEDYFKKIECFDSVEISGVEDRFNASLGTYHDLLKIIKDKDFLDNEENEDILEDIVLTLTLFEDREMIEERLKTYAHLFDDKVMKQLKRRRYTGWGRLSRKLINGIRDKQSGKTILDFLKSDGFANRNFMQLIHDDSLTFKEDIQKAQVSGQGDSLHEHIANLAGSPAIKKGILQTVKVVDELVKVMGRHKPENIVIEMARENQTTQKGQKNSRERMKRIEEGIKELGSQILKEHPVENTQLQNEKLYLYYLQNGRDMYVDQELDINRLSDYDVDHIVPQSFLKDDSIDNKVLTRSDKARGKSDNVPSEEVVKKMKNYWRQLLNAKLITQRKFDNLTKAERGGLSELDKAGFIKRQLVETRQITKHVAQILDSRMNTKYDENDKLIREVKVITLKSKLVSDFRKDFQFYKVREINNYHHAHDAYLNAVVGTALIKKYPKLESEFVYGDYKVYDVRKMIAKSEQEIGKATAKYFFYSNIMNFFKTEITLANGEIRKRPLIETNGETGEIVWDKGRDFATVRKVLSMPQVNIVKKTEVQTGGFSKESILPKRNSDKLIARKKDWDPKKYGGFDSPTVAYSVLVVAKVEKGKSKKLKSVKELLGITIMERSSFEKNPIDFLEAKGYKEVKKDLIIKLPKYSLFELENGRKRMLASAGELQKGNELALPSKYVNFLYLASHYEKLKGSPEDNEQKQLFVEQHKHYLDEIIEQISEFSKRVILADANLDKVLSAYNKHRDKPIREQAENIIHLFTLTNLGAPAAFKYFDTTIDRKRYTSTKEVLDATLIHQSITGLYETRIDLSQLGGDGGPAPAPAPAPAPAPGGTLGDQGSRGSDPLPEPRVTLTVEGIPTEFLVNTGAEHSVLTKPMGKMGSKRTVVAGATGSKVYPWTTKRLLKIGQKQVTHSFLVIPECPAPLLGRDLLTKLKAQIQFSTEGPQVTWEDRPAMCLVLNLEEEYRLHEKPVPPSIDPSWLQLFPMVWAEKAGMGLANQVPPVVVELKSDASPVAVRQYPMSKEAREGIRPHIQRFLDLGILVPCQSPWNTPLLPVKKPGTNDYRPVQDLREVNKRVQDIHPTVPNPYNLLSSLPPSHTWYSVLDLKDAFFCLKLHPNSQPLFAFEWRDPEKGNTGQLTWTRLPQGFKNSPTLFDEALHRDLASFRALNPQVVMLQYVDDLLVAAPTYRDCKEGTRRLLQELSKLGYRVSAKKAQLCREEVTYLGYLLKGGKRWLTPARKATVMKIPTPTTPRQVREFLGTAGFCRLWIPGFASLAAPLYPLTREKVPFTWTEAHQEAFGRIKEALLSAPALALPDLTKPFALYVDEKEGVARGVLTQTLGPWRRPVAYLSKKLDPVASGWPTCLKAIAAVALLLKDADKLTLGQNVLVIAPHNLESIVRQPPDRWMTNARMTHYQSLLLNERVSFAPPAILNPATLLPVESDDTPIHICSEILAEETGTRPDLRDQPLPGVPAWYTDGSSFIMDGRRQAGAAIVDNKRTVWASNLPEGTSAQKAELIALTQALRLAEGKSINIYTDSRYAFATAHVHGAIYKQRGLLTSAGKDIKNKEEILALLEAIHLPKRVAIIHCPGHQRGTDPVATGNRKADEAAKQAAQSTRILTETTKNAGKRTADGSEFEKRTADGSEFESPKKKAKVE

SEQ ID NO: 1610 - protein, 2127 aa, synthetic construct
MPAAKRVKLDGGDKKYSIGLDIGTNSVGWAVITDEYKVPSKKFKVLGNTDRHSIKKNLIGALLFDSGETAEATRLKRTARRRYTRRKNRICYLQEIFSNEMAKVDDSFFHRLEESFLVEEDKKHERHPIFGNIVDEVAYHEKYPTIYHLRKKLVDSTDKADLRLIYLALAHMIKFRGHFLIEGDLNPDNSDVDKLFIQLVQTYNQLFEENPINASGVDAKAILSARLSKSRRLENLIAQLPGEKKNGLFGNLIALSLGLTPNFKSNFDLAEDAKLQLSKDTYDDDLDNLLAQIGDQYADLFLAAKNLSDAILLSDILRVNTEITKAPLSASMIKRYDEHHQDLTLLKALVRQQLPEKYKEIFFDQSKNGYAGYIDGGASQEEFYKFIKPILEKMDGTEELLVKLNREDLLRKQRTFDNGSIPHQIHLGELHAILRRQEDFYPFLKDNREKIEKILTFRIPYYVGPLARGNSRFAWMTRKSEETITPWNFEEVVDKGASAQSFIERMTNFDKNLPNEKVLPKHSLLYEYFTVYNELTKVKYVTEGMRKPAFLSGEQKKAIVDLLFKTNRKVTVKQLKEDYFKKIECFDSVEISGVEDRFNASLGTYHDLLKIIKDKDFLDNEENEDILEDIVLTLTLFEDREMIEERLKTYAHLFDDKVMKQLKRRRYTGWGRLSRKLINGIRDKQSGKTILDFLKSDGFANRNFMQLIHDDSLTFKEDIQKAQVSGQGDSLHEHIANLAGSPAIKKGILQTVKVVDELVKVMGRHKPENIVIEMARENQTTQKGQKNSRERMKRIEEGIKELGSQILKEHPVENTQLQNEKLYLYYLQNGRDMYVDQELDINRLSDYDVDHIVPQSFLKDDSIDNKVLTRSDKARGKSDNVPSEEVVKKMKNYWRQLLNAKLITQRKFDNLTKAERGGLSELDKAGFIKRQLVETRQITKHVAQILDSRMNTKYDENDKLIREVKVITLKSKLVSDFRKDFQFYKVREINNYHHAHDAYLNAVVGTALIKKYPKLESEFVYGDYKVYDVRKMIAKSEQEIGKATAKYFFYSNIMNFFKTEITLANGEIRKRPLIETNGETGEIVWDKGRDFATVRKVLSMPQVNIVKKTEVQTGGFSKESILPKRNSDKLIARKKDWDPKKYGGFDSPTVAYSVLVVAKVEKGKSKKLKSVKELLGITIMERSSFEKNPIDFLEAKGYKEVKKDLIIKLPKYSLFELENGRKRMLASAGELQKGNELALPSKYVNFLYLASHYEKLKGSPEDNEQKQLFVEQHKHYLDEIIEQISEFSKRVILADANLDKVLSAYNKHRDKPIREQAENIIHLFTLTNLGAPAAFKYFDTTIDRKRYTSTKEVLDATLIHQSITGLYETRIDLSQLGGDGGEAAAKGGSPAPGGLLGRDLLTKLKAQIQFSTEGPQVTWEDRPAMCLVLNLEEEYRLHEKPVPPSIDPSWLQLFPMVWAEKAGMGLANQVPPVVVELKSDASPVAVRQYPMSKEAREGIRPHIQRFLDLGILVPCQSPWNTPLLPVKKPGTNDYRPVQDLREVNKRVQDIHPTVPNPYNLLSSLPPSHTWYSVLDLKDAFFCLKLHPNSQPLFAFEWRDPEKGNTGQLTWTRLPQGFKNSPTLFDEALHRDLASFRALNPQVVMLQYVDDLLVAAPTYRDCKEGTRRLLQELSKLGYRVSAKKAQLCREEVTYLGYLLKGGKRWLTPARKATVMKIPTPTTPRQVREFLGTAGFCRLWIPGFASLAAPLYPLTREKVPFTWTEAHQEAFGRIKEALLSAPALALPDLTKPFALYVDEKEGVARGVLTQTLGPWRRPVAYLSKKLDPVASGWPTCLKAIAAVALLLKDADKLTLGQNVLVIAPHNLESIVRQPPDRWMTNARMTHYQSLLLNERVSFAPPAILNPATLLPVESDDTPIHICSEILAEETGTRPDLRDQPLPGVPAWYTDGSSFIMDGRRQAGAAIVDNKRTVWASNLPEGTSAQKAELIALTQALRLAEGKSINIYTDSRYAFATAHVHGAIYKQRGLLTSAGKDIKNKEEILALLEAIHLPKRVAIIHCPGHQRGTDPVATGNRKADEAAKQAAQSTRILTETTKNAGKRTADGSEFEKRTADGSEFESPKKKAKVE

SEQ ID NO: 1611 - protein, 2125 aa, synthetic construct
MPAAKRVKLDGGDKKYSIGLDIGTNSVGWAVITDEYKVPSKKFKVLGNTDRHSIKKNLIGALLFDSGETAEATRLKRTARRRYTRRKNRICYLQEIFSNEMAKVDDSFFHRLEESFLVEEDKKHERHPIFGNIVDEVAYHEKYPTIYHLRKKLVDSTDKADLRLIYLALAHMIKFRGHFLIEGDLNPDNSDVDKLFIQLVQTYNQLFEENPINASGVDAKAILSARLSKSRRLENLIAQLPGEKKNGLFGNLIALSLGLTPNFKSNFDLAEDAKLQLSKDTYDDDLDNLLAQIGDQYADLFLAAKNLSDAILLSDILRVNTEITKAPLSASMIKRYDEHHQDLTLLKALVRQQLPEKYKEIFFDQSKNGYAGYIDGGASQEEFYKFIKPILEKMDGTEELLVKLNREDLLRKQRTFDNGSIPHQIHLGELHAILRRQEDFYPFLKDNREKIEKILTFRIPYYVGPLARGNSRFAWMTRKSEETITPWNFEEVVDKGASAQSFIERMTNFDKNLPNEKVLPKHSLLYEYFTVYNELTKVKYVTEGMRKPAFLSGEQKKAIVDLLFKTNRKVTVKQLKEDYFKKIECFDSVEISGVEDRFNASLGTYHDLLKIIKDKDFLDNEENEDILEDIVLTLTLFEDREMIEERLKTYAHLFDDKVMKQLKRRRYTGWGRLSRKLINGIRDKQSGKTILDFLKSDGFANRNFMQLIHDDSLTFKEDIQKAQVSGQGDSLHEHIANLAGSPAIKKGILQTVKVVDELVKVMGRHKPENIVIEMARENQTTQKGQKNSRERMKRIEEGIKELGSQILKEHPVENTQLQNEKLYLYYLQNGRDMYVDQELDINRLSDYDVDHIVPQSFLKDDSIDNKVLTRSDKARGKSDNVPSEEVVKKMKNYWRQLLNAKLITQRKFDNLTKAERGGLSELDKAGFIKRQLVETRQITKHVAQILDSRMNTKYDENDKLIREVKVITLKSKLVSDFRKDFQFYKVREINNYHHAHDAYLNAVVGTALIKKYPKLESEFVYGDYKVYDVRKMIAKSEQEIGKATAKYFFYSNIMNFFKTEITLANGEIRKRPLIETNGETGEIVWDKGRDFATVRKVLSMPQVNIVKKTEVQTGGFSKESILPKRNSDKLIARKKDWDPKKYGGFDSPTVAYSVLVVAKVEKGKSKKLKSVKELLGITIMERSSFEKNPIDFLEAKGYKEVKKDLIIKLPKYSLFELENGRKRMLASAGELQKGNELALPSKYVNFLYLASHYEKLKGSPEDNEQKQLFVEQHKHYLDEIIEQISEFSKRVILADANLDKVLSAYNKHRDKPIREQAENIIHLFTLTNLGAPAAFKYFDTTIDRKRYTSTKEVLDATLIHQSITGLYETRIDLSQLGGDGGGGGGGSGSSGGLLGRDLLTKLKAQIQFSTEGPQVTWEDRPAMCLVLNLEEEYRLHEKPVPPSIDPSWLQLFPMVWAEKAGMGLANQVPPVVVELKSDASPVAVRQYPMSKEAREGIRPHIQRFLDLGILVPCQSPWNTPLLPVKKPGTNDYRPVQDLREVNKRVQDIHPTVPNPYNLLSSLPPSHTWYSVLDLKDAFFCLKLHPNSQPLFAFEWRDPEKGNTGQLTWTRLPQGFKNSPTLFDEALHRDLASFRALNPQVVMLQYVDDLLVAAPTYRDCKEGTRRLLQELSKLGYRVSAKKAQLCREEVTYLGYLLKGGKRWLTPARKATVMKIPTPTTPRQVREFLGTAGFCRLWIPGFASLAAPLYPLTREKVPFTWTEAHQEAFGRIKEALLSAPALALPDLTKPFALYVDEKEGVARGVLTQTLGPWRRPVAYLSKKLDPVASGWPTCLKAIAAVALLLKDADKLTLGQNVLVIAPHNLESIVRQPPDRWMTNARMTHYQSLLLNERVSFAPPAILNPATLLPVESDDTPIHICSEILAEETGTRPDLRDQPLPGVPAWYTDGSSFIMDGRRQAGAAIVDNKRTVWASNLPEGTSAQKAELIALTQALRLAEGKSINIYTDSRYAFATAHVHGAIYKQRGLLTSAGKDIKNKEEILALLEAIHLPKRVAIIHCPGHQRGTDPVATGNRKADEAAKQAAQSTRILTETTKNAGKRTADGSEFEKRTADGSEFESPKKKAKVE

SEQ ID NO: 1612 - protein, 2127 aa, synthetic construct
MPAAKRVKLDGGDKKYSIGLDIGTNSVGWAVITDEYKVPSKKFKVLGNTDRHSIKKNLIGALLFDSGETAEATRLKRTARRRYTRRKNRICYLQEIFSNEMAKVDDSFFHRLEESFLVEEDKKHERHPIFGNIVDEVAYHEKYPTIYHLRKKLVDSTDKADLRLIYLALAHMIKFRGHFLIEGDLNPDNSDVDKLFIQLVQTYNQLFEENPINASGVDAKAILSARLSKSRRLENLIAQLPGEKKNGLFGNLIALSLGLTPNFKSNFDLAEDAKLQLSKDTYDDDLDNLLAQIGDQYADLFLAAKNLSDAILLSDILRVNTEITKAPLSASMIKRYDEHHQDLTLLKALVRQQLPEKYKEIFFDQSKNGYAGYIDGGASQEEFYKFIKPILEKMDGTEELLVKLNREDLLRKQRTFDNGSIPHQIHLGELHAILRRQEDFYPFLKDNREKIEKILTFRIPYYVGPLARGNSRFAWMTRKSEETITPWNFEEVVDKGASAQSFIERMTNFDKNLPNEKVLPKHSLLYEYFTVYNELTKVKYVTEGMRKPAFLSGEQKKAIVDLLFKTNRKVTVKQLKEDYFKKIECFDSVEISGVEDRFNASLGTYHDLLKIIKDKDFLDNEENEDILEDIVLTLTLFEDREMIEERLKTYAHLFDDKVMKQLKRRRYTGWGRLSRKLINGIRDKQSGKTILDFLKSDGFANRNFMQLIHDDSLTFKEDIQKAQVSGQGDSLHEHIANLAGSPAIKKGILQTVKVVDELVKVMGRHKPENIVIEMARENQTTQKGQKNSRERMKRIEEGIKELGSQILKEHPVENTQLQNEKLYLYYLQNGRDMYVDQELDINRLSDYDVDHIVPQSFLKDDSIDNKVLTRSDKARGKSDNVPSEEVVKKMKNYWRQLLNAKLITQRKFDNLTKAERGGLSELDKAGFIKRQLVETRQITKHVAQILDSRMNTKYDENDKLIREVKVITLKSKLVSDFRKDFQFYKVREINNYHHAHDAYLNAVVGTALIKKYPKLESEFVYGDYKVYDVRKMIAKSEQEIGKATAKYFFYSNIMNFFKTEITLANGEIRKRPLIETNGETGEIVWDKGRDFATVRKVLSMPQVNIVKKTEVQTGGFSKESILPKRNSDKLIARKKDWDPKKYGGFDSPTVAYSVLVVAKVEKGKSKKLKSVKELLGITIMERSSFEKNPIDFLEAKGYKEVKKDLIIKLPKYSLFELENGRKRMLASAGELQKGNELALPSKYVNFLYLASHYEKLKGSPEDNEQKQLFVEQHKHYLDEIIEQISEFSKRVILADANLDKVLSAYNKHRDKPIREQAENIIHLFTLTNLGAPAAFKYFDTTIDRKRYTSTKEVLDATLIHQSITGLYETRIDLSQLGGDGGEAAAKGGGPAPGGLLGRDLLTKLKAQIQFSTEGPQVTWEDRPAMCLVLNLEEEYRLHEKPVPPSIDPSWLQLFPMVWAEKAGMGLANQVPPVVVELKSDASPVAVRQYPMSKEAREGIRPHIQRFLDLGILVPCQSPWNTPLLPVKKPGTNDYRPVQDLREVNKRVQDIHPTVPNPYNLLSSLPPSHTWYSVLDLKDAFFCLKLHPNSQPLFAFEWRDPEKGNTGQLTWTRLPQGFKNSPTLFDEALHRDLASFRALNPQVVMLQYVDDLLVAAPTYRDCKEGTRRLLQELSKLGYRVSAKKAQLCREEVTYLGYLLKGGKRWLTPARKATVMKIPTPTTPRQVREFLGTAGFCRLWIPGFASLAAPLYPLTREKVPFTWTEAHQEAFGRIKEALLSAPALALPDLTKPFALYVDEKEGVARGVLTQTLGPWRRPVAYLSKKLDPVASGWPTCLKAIAAVALLLKDADKLTLGQNVLVIAPHNLESIVRQPPDRWMTNARMTHYQSLLLNERVSFAPPAILNPATLLPVESDDTPIHICSEILAEETGTRPDLRDQPLPGVPAWYTDGSSFIMDGRRQAGAAIVDNKRTVWASNLPEGTSAQKAELIALTQALRLAEGKSINIYTDSRYAFATAHVHGAIYKQRGLLTSAGKDIKNKEEILALLEAIHLPKRVAIIHCPGHQRGTDPVATGNRKADEAAKQAAQSTRILTETTKNAGKRTADGSEFEKRTADGSEFESPKKKAKVE

SEQ ID NO: 1613 - protein, 2127 aa, synthetic construct
MPAAKRVKLDGGDKKYSIGLDIGTNSVGWAVITDEYKVPSKKFKVLGNTDRHSIKKNLIGALLFDSGETAEATRLKRTARRRYTRRKNRICYLQEIFSNEMAKVDDSFFHRLEESFLVEEDKKHERHPIFGNIVDEVAYHEKYPTIYHLRKKLVDSTDKADLRLIYLALAHMIKFRGHFLIEGDLNPDNSDVDKLFIQLVQTYNQLFEENPINASGVDAKAILSARLSKSRRLENLIAQLPGEKKNGLFGNLIALSLGLTPNFKSNFDLAEDAKLQLSKDTYDDDLDNLLAQIGDQYADLFLAAKNLSDAILLSDILRVNTEITKAPLSASMIKRYDEHHQDLTLLKALVRQQLPEKYKEIFFDQSKNGYAGYIDGGASQEEFYKFIKPILEKMDGTEELLVKLNREDLLRKQRTFDNGSIPHQIHLGELHAILRRQEDFYPFLKDNREKIEKILTFRIPYYVGPLARGNSRFAWMTRKSEETITPWNFEEVVDKGASAQSFIERMTNFDKNLPNEKVLPKHSLLYEYFTVYNELTKVKYVTEGMRKPAFLSGEQKKAIVDLLFKTNRKVTVKQLKEDYFKKIECFDSVEISGVEDRFNASLGTYHDLLKIIKDKDFLDNEENEDILEDIVLTLTLFEDREMIEERLKTYAHLFDDKVMKQLKRRRYTGWGRLSRKLINGIRDKQSGKTILDFLKSDGFANRNFMQLIHDDSLTFKEDIQKAQVSGQGDSLHEHIANLAGSPAIKKGILQTVKVVDELVKVMGRHKPENIVIEMARENQTTQKGQKNSRERMKRIEEGIKELGSQILKEHPVENTQLQNEKLYLYYLQNGRDMYVDQELDINRLSDYDVDHIVPQSFLKDDSIDNKVLTRSDKARGKSDNVPSEEVVKKMKNYWRQLLNAKLITQRKFDNLTKAERGGLSELDKAGFIKRQLVETRQITKHVAQILDSRMNTKYDENDKLIREVKVITLKSKLVSDFRKDFQFYKVREINNYHHAHDAYLNAVVGTALIKKYPKLESEFVYGDYKVYDVRKMIAKSEQEIGKATAKYFFYSNIMNFFKTEITLANGEIRKRPLIETNGETGEIVWDKGRDFATVRKVLSMPQVNIVKKTEVQTGGFSKESILPKRNSDKLIARKKDWDPKKYGGFDSPTVAYSVLVVAKVEKGKSKKLKSVKELLGITIMERSSFEKNPIDFLEAKGYKEVKKDLIIKLPKYSLFELENGRKRMLASAGELQKGNELALPSKYVNFLYLASHYEKLKGSPEDNEQKQLFVEQHKHYLDEIIEQISEFSKRVILADANLDKVLSAYNKHRDKPIREQAENIIHLFTLTNLGAPAAFKYFDTTIDRKRYTSTKEVLDATLIHQSITGLYETRIDLSQLGGDGGEAAAKPAPGSSGGLLGRDLLTKLKAQIQFSTEGPQVTWEDRPAMCLVLNLEEEYRLHEKPVPPSIDPSWLQLFPMVWAEKAGMGLANQVPPVVVELKSDASPVAVRQYPMSKEAREGIRPHIQRFLDLGILVPCQSPWNTPLLPVKKPGTNDYRPVQDLREVNKRVQDIHPTVPNPYNLLSSLPPSHTWYSVLDLKDAFFCLKLHPNSQPLFAFEWRDPEKGNTGQLTWTRLPQGFKNSPTLFDEALHRDLASFRALNPQVVMLQYVDDLLVAAPTYRDCKEGTRRLLQELSKLGYRVSAKKAQLCREEVTYLGYLLKGGKRWLTPARKATVMKIPTPTTPRQVREFLGTAGFCRLWIPGFASLAAPLYPLTREKVPFTWTEAHQEAFGRIKEALLSAPALALPDLTKPFALYVDEKEGVARGVLTQTLGPWRRPVAYLSKKLDPVASGWPTCLKAIAAVALLLKDADKLTLGQNVLVIAPHNLESIVRQPPDRWMTNARMTHYQSLLLNERVSFAPPAILNPATLLPVESDDTPIHICSEILAEETGTRPDLRDQPLPGVPAWYTDGSSFIMDGRRQAGAAIVDNKRTVWASNLPEGTSAQKAELIALTQALRLAEGKSINIYTDSRYAFATAHVHGAIYKQRGLLTSAGKDIKNKEEILALLEAIHLPKRVAIIHCPGHQRGTDPVATGNRKADEAAKQAAQSTRILTETTKNAGKRTADGSEFEKRTADGSEFESPKKKAKVE

SEQ ID NO: 1614 - protein, 2127 aa, synthetic construct
MPAAKRVKLDGGDKKYSIGLDIGTNSVGWAVITDEYKVPSKKFKVLGNTDRHSIKKNLIGALLFDSGETAEATRLKRTARRRYTRRKNRICYLQEIFSNEMAKVDDSFFHRLEESFLVEEDKKHERHPIFGNIVDEVAYHEKYPTIYHLRKKLVDSTDKADLRLIYLALAHMIKFRGHFLIEGDLNPDNSDVDKLFIQLVQTYNQLFEENPINASGVDAKAILSARLSKSRRLENLIAQLPGEKKNGLFGNLIALSLGLTPNFKSNFDLAEDAKLQLSKDTYDDDLDNLLAQIGDQYADLFLAAKNLSDAILLSDILRVNTEITKAPLSASMIKRYDEHHQDLTLLKALVRQQLPEKYKEIFFDQSKNGYAGYIDGGASQEEFYKFIKPILEKMDGTEELLVKLNREDLLRKQRTFDNGSIPHQIHLGELHAILRRQEDFYPFLKDNREKIEKILTFRIPYYVGPLARGNSRFAWMTRKSEETITPWNFEEVVDKGASAQSFIERMTNFDKNLPNEKVLPKHSLLYEYFTVYNELTKVKYVTEGMRKPAFLSGEQKKAIVDLLFKTNRKVTVKQLKEDYFKKIECFDSVEISGVEDRFNASLGTYHDLLKIIKDKDFLDNEENEDILEDIVLTLTLFEDREMIEERLKTYAHLFDDKVMKQLKRRRYTGWGRLSRKLINGIRDKQSGKTILDFLKSDGFANRNFMQLIHDDSLTFKEDIQKAQVSGQGDSLHEHIANLAGSPAIKKGILQTVKVVDELVKVMGRHKPENIVIEMARENQTTQKGQKNSRERMKRIEEGIKELGSQILKEHPVENTQLQNEKLYLYYLQNGRDMYVDQELDINRLSDYDVDHIVPQSFLKDDSIDNKVLTRSDKARGKSDNVPSEEVVKKMKNYWRQLLNAKLITQRKFDNLTKAERGGLSELDKAGFIKRQLVETRQITKHVAQILDSRMNTKYDENDKLIREVKVITLKSKLVSDFRKDFQFYKVREINNYHHAHDAYLNAVVGTALIKKYPKLESEFVYGDYKVYDVRKMIAKSEQEIGKATAKYFFYSNIMNFFKTEITLANGEIRKRPLIETNGETGEIVWDKGRDFATVRKVLSMPQVNIVKKTEVQTGGFSKESILPKRNSDKLIARKKDWDPKKYGGFDSPTVAYSVLVVAKVEKGKSKKLKSVKELLGITIMERSSFEKNPIDFLEAKGYKEVKKDLIIKLPKYSLFELENGRKRMLASAGELQKGNELALPSKYVNFLYLASHYEKLKGSPEDNEQKQLFVEQHKHYLDEIIEQISEFSKRVILADANLDKVLSAYNKHRDKPIREQAENIIHLFTLTNLGAPAAFKYFDTTIDRKRYTSTKEVLDATLIHQSITGLYETRIDLSQLGGDGGPAPGGSEAAAKGGLLGRDLLTKLKAQIQFSTEGPQVTWEDRPAMCLVLNLEEEYRLHEKPVPPSIDPSWLQLFPMVWAEKAGMGLANQVPPVVVELKSDASPVAVRQYPMSKEAREGIRPHIQRFLDLGILVPCQSPWNTPLLPVKKPGTNDYRPVQDLREVNKRVQDIHPTVPNPYNLLSSLPPSHTWYSVLDLKDAFFCLKLHPNSQPLFAFEWRDPEKGNTGQLTWTRLPQGFKNSPTLFDEALHRDLASFRALNPQVVMLQYVDDLLVAAPTYRDCKEGTRRLLQELSKLGYRVSAKKAQLCREEVTYLGYLLKGGKRWLTPARKATVMKIPTPTTPRQVREFLGTAGFCRLWIPGFASLAAPLYPLTREKVPFTWTEAHQEAFGRIKEALLSAPALALPDLTKPFALYVDEKEGVARGVLTQTLGPWRRPVAYLSKKLDPVASGWPTCLKAIAAVALLLKDADKLTLGQNVLVIAPHNLESIVRQPPDRWMTNARMTHYQSLLLNERVSFAPPAILNPATLLPVESDDTPIHICSEILAEETGTRPDLRDQPLPGVPAWYTDGSSFIMDGRRQAGAAIVDNKRTVWASNLPEGTSAQKAELIALTQALRLAEGKSINIYTDSRYAFATAHVHGAIYKQRGLLTSAGKDIKNKEEILALLEAIHLPKRVAIIHCPGHQRGTDPVATGNRKADEAAKQAAQSTRILTETTKNAGKRTADGSEFEKRTADGSEFESPKKKAKVE

SEQ ID NO: 1615 - protein, 2134 aa, synthetic construct
MPAAKRVKLDGGDKKYSIGLDIGTNSVGWAVITDEYKVPSKKFKVLGNTDRHSIKKNLIGALLFDSGETAEATRLKRTARRRYTRRKNRICYLQEIFSNEMAKVDDSFFHRLEESFLVEEDKKHERHPIFGNIVDEVAYHEKYPTIYHLRKKLVDSTDKADLRLIYLALAHMIKFRGHFLIEGDLNPDNSDVDKLFIQLVQTYNQLFEENPINASGVDAKAILSARLSKSRRLENLIAQLPGEKKNGLFGNLIALSLGLTPNFKSNFDLAEDAKLQLSKDTYDDDLDNLLAQIGDQYADLFLAAKNLSDAILLSDILRVNTEITKAPLSASMIKRYDEHHQDLTLLKALVRQQLPEKYKEIFFDQSKNGYAGYIDGGASQEEFYKFIKPILEKMDGTEELLVKLNREDLLRKQRTFDNGSIPHQIHLGELHAILRRQEDFYPFLKDNREKIEKILTFRIPYYVGPLARGNSRFAWMTRKSEETITPWNFEEVVDKGASAQSFIERMTNFDKNLPNEKVLPKHSLLYEYFTVYNELTKVKYVTEGMRKPAFLSGEQKKAIVDLLFKTNRKVTVKQLKEDYFKKIECFDSVEISGVEDRFNASLGTYHDLLKIIKDKDFLDNEENEDILEDIVLTLTLFEDREMIEERLKTYAHLFDDKVMKQLKRRRYTGWGRLSRKLINGIRDKQSGKTILDFLKSDGFANRNFMQLIHDDSLTFKEDIQKAQVSGQGDSLHEHIANLAGSPAIKKGILQTVKVVDELVKVMGRHKPENIVIEMARENQTTQKGQKNSRERMKRIEEGIKELGSQILKEHPVENTQLQNEKLYLYYLQNGRDMYVDQELDINRLSDYDVDHIVPQSFLKDDSIDNKVLTRSDKARGKSDNVPSEEVVKKMKNYWRQLLNAKLITQRKFDNLTKAERGGLSELDKAGFIKRQLVETRQITKHVAQILDSRMNTKYDENDKLIREVKVITLKSKLVSDFRKDFQFYKVREINNYHHAHDAYLNAVVGTALIKKYPKLESEFVYGDYKVYDVRKMIAKSEQEIGKATAKYFFYSNIMNFFKTEITLANGEIRKRPLIETNGETGEIVWDKGRDFATVRKVLSMPQVNIVKKTEVQTGGFSKESILPKRNSDKLIARKKDWDPKKYGGFDSPTVAYSVLVVAKVEKGKSKKLKSVKELLGITIMERSSFEKNPIDFLEAKGYKEVKKDLIIKLPKYSLFELENGRKRMLASAGELQKGNELALPSKYVNFLYLASHYEKLKGSPEDNEQKQLFVEQHKHYLDEIIEQISEFSKRVILADANLDKVLSAYNKHRDKPIREQAENIIHLFTLTNLGAPAAFKYFDTTIDRKRYTSTKEVLDATLIHQSITGLYETRIDLSQLGGDGGGSSGSSGSSGSSGSSGSSGGLLGRDLLTKLKAQIQFSTEGPQVTWEDRPAMCLVLNLEEEYRLHEKPVPPSIDPSWLQLFPMVWAEKAGMGLANQVPPVVVELKSDASPVAVRQYPMSKEAREGIRPHIQRFLDLGILVPCQSPWNTPLLPVKKPGTNDYRPVQDLREVNKRVQDIHPTVPNPYNLLSSLPPSHTWYSVLDLKDAFFCLKLHPNSQPLFAFEWRDPEKGNTGQLTWTRLPQGFKNSPTLFDEALHRDLASFRALNPQVVMLQYVDDLLVAAPTYRDCKEGTRRLLQELSKLGYRVSAKKAQLCREEVTYLGYLLKGGKRWLTPARKATVMKIPTPTTPRQVREFLGTAGFCRLWIPGFASLAAPLYPLTREKVPFTWTEAHQEAFGRIKEALLSAPALALPDLTKPFALYVDEKEGVARGVLTQTLGPWRRPVAYLSKKLDPVASGWPTCLKAIAAVALLLKDADKLTLGQNVLVIAPHNLESIVRQPPDRWMTNARMTHYQSLLLNERVSFAPPAILNPATLLPVESDDTPIHICSEILAEETGTRPDLRDQPLPGVPAWYTDGSSFIMDGRRQAGAAIVDNKRTVWASNLPEGTSAQKAELIALTQALRLAEGKSINIYTDSRYAFATAHVHGAIYKQRGLLTSAGKDIKNKEEILALLEAIHLPKRVAIIHCPGHQRGTDPVATGNRKADEAAKQAAQSTRILTETTKNAGKRTADGSEFEKRTADGSEFESPKKKAKVE

SEQ ID NO: 1616 - protein, 2123 aa, synthetic construct
MPAAKRVKLDGGDKKYSIGLDIGTNSVGWAVITDEYKVPSKKFKVLGNTDRHSIKKNLIGALLFDSGETAEATRLKRTARRRYTRRKNRICYLQEIFSNEMAKVDDSFFHRLEESFLVEEDKKHERHPIFGNIVDEVAYHEKYPTIYHLRKKLVDSTDKADLRLIYLALAHMIKFRGHFLIEGDLNPDNSDVDKLFIQLVQTYNQLFEENPINASGVDAKAILSARLSKSRRLENLIAQLPGEKKNGLFGNLIALSLGLTPNFKSNFDLAEDAKLQLSKDTYDDDLDNLLAQIGDQYADLFLAAKNLSDAILLSDILRVNTEITKAPLSASMIKRYDEHHQDLTLLKALVRQQLPEKYKEIFFDQSKNGYAGYIDGGASQEEFYKFIKPILEKMDGTEELLVKLNREDLLRKQRTFDNGSIPHQIHLGELHAILRRQEDFYPFLKDNREKIEKILTFRIPYYVGPLARGNSRFAWMTRKSEETITPWNFEEVVDKGASAQSFIERMTNFDKNLPNEKVLPKHSLLYEYFTVYNELTKVKYVTEGMRKPAFLSGEQKKAIVDLLFKTNRKVTVKQLKEDYFKKIECFDSVEISGVEDRFNASLGTYHDLLKIIKDKDFLDNEENEDILEDIVLTLTLFEDREMIEERLKTYAHLFDDKVMKQLKRRRYTGWGRLSRKLINGIRDKQSGKTILDFLKSDGFANRNFMQLIHDDSLTFKEDIQKAQVSGQGDSLHEHIANLAGSPAIKKGILQTVKVVDELVKVMGRHKPENIVIEMARENQTTQKGQKNSRERMKRIEEGIKELGSQILKEHPVENTQLQNEKLYLYYLQNGRDMYVDQELDINRLSDYDVDHIVPQSFLKDDSIDNKVLTRSDKARGKSDNVPSEEVVKKMKNYWRQLLNAKLITQRKFDNLTKAERGGLSELDKAGFIKRQLVETRQITKHVAQILDSRMNTKYDENDKLIREVKVITLKSKLVSDFRKDFQFYKVREINNYHHAHDAYLNAVVGTALIKKYPKLESEFVYGDYKVYDVRKMIAKSEQEIGKATAKYFFYSNIMNFFKTEITLANGEIRKRPLIETNGETGEIVWDKGRDFATVRKVLSMPQVNIVKKTEVQTGGFSKESILPKRNSDKLIARKKDWDPKKYGGFDSPTVAYSVLVVAKVEKGKSKKLKSVKELLGITIMERSSFEKNPIDFLEAKGYKEVKKDLIIKLPKYSLFELENGRKRMLASAGELQKGNELALPSKYVNFLYLASHYEKLKGSPEDNEQKQLFVEQHKHYLDEIIEQISEFSKRVILADANLDKVLSAYNKHRDKPIREQAENIIHLFTLTNLGAPAAFKYFDTTIDRKRYTSTKEVLDATLIHQSITGLYETRIDLSQLGGDGGPAPAPAPGGLLGRDLLTKLKAQIQFSTEGPQVTWEDRPAMCLVLNLEEEYRLHEKPVPPSIDPSWLQLFPMVWAEKAGMGLANQVPPVVVELKSDASPVAVRQYPMSKEAREGIRPHIQRFLDLGILVPCQSPWNTPLLPVKKPGTNDYRPVQDLREVNKRVQDIHPTVPNPYNLLSSLPPSHTWYSVLDLKDAFFCLKLHPNSQPLFAFEWRDPEKGNTGQLTWTRLPQGFKNSPTLFNEALHRDLASFRALNPQVVMLQYVDDLLVAAPTYRDCKEGTRRLLQELSKLGYRVSAKKAQLCREEVTYLGYLLKGGKRWLTPARKATVMKIPTPTTPRQVREFLGTAGFCRLWIPGFASLAAPLYPLTRPKVPFTWTEAHQEAFGRIKEALLSAPALALPDLTKPFALYVDEKEGVARGVLTQTLGPWRRPVAYLSKKLDPVASGWPTCLKAIAAVALLLKDADKLTLGQNVLVIAPHNLESIVRQPPDRWMTNARMTHYQSLLLNERVSFAPPAILNPATLLPVESDDTPIHICSEILAEETGTRPDLRDQPLPGVPAWYTDGSSFIMDGRRQAGAAIVDNKRTVWASNLPEGTSAQKAELIALTQALRLAEGKSINIYTDSRYAFATAHVHGAIYKQRGWLTSAGKDIKNKEEILALLEAIHLPKRVAIIHCPGHQRGTDPVATGNRKADEAAKQAAQSTRILTETTKNAGKRTADGSEFEKRTADGSEFESPKKKAKVE

SEQ ID NO: 1617 - protein, 2131 aa, synthetic construct
MPAAKRVKLDGGDKKYSIGLDIGTNSVGWAVITDEYKVPSKKFKVLGNTDRHSIKKNLIGALLFDSGETAEATRLKRTARRRYTRRKNRICYLQEIFSNEMAKVDDSFFHRLEESFLVEEDKKHERHPIFGNIVDEVAYHEKYPTIYHLRKKLVDSTDKADLRLIYLALAHMIKFRGHFLIEGDLNPDNSDVDKLFIQLVQTYNQLFEENPINASGVDAKAILSARLSKSRRLENLIAQLPGEKKNGLFGNLIALSLGLTPNFKSNFDLAEDAKLQLSKDTYDDDLDNLLAQIGDQYADLFLAAKNLSDAILLSDILRVNTEITKAPLSASMIKRYDEHHQDLTLLKALVRQQLPEKYKEIFFDQSKNGYAGYIDGGASQEEFYKFIKPILEKMDGTEELLVKLNREDLLRKQRTFDNGSIPHQIHLGELHAILRRQEDFYPFLKDNREKIEKILTFRIPYYVGPLARGNSRFAWMTRKSEETITPWNFEEVVDKGASAQSFIERMTNFDKNLPNEKVLPKHSLLYEYFTVYNELTKVKYVTEGMRKPAFLSGEQKKAIVDLLFKTNRKVTVKQLKEDYFKKIECFDSVEISGVEDRFNASLGTYHDLLKIIKDKDFLDNEENEDILEDIVLTLTLFEDREMIEERLKTYAHLFDDKVMKQLKRRRYTGWGRLSRKLINGIRDKQSGKTILDFLKSDGFANRNFMQLIHDDSLTFKEDIQKAQVSGQGDSLHEHIANLAGSPAIKKGILQTVKVVDELVKVMGRHKPENIVIEMARENQTTQKGQKNSRERMKRIEEGIKELGSQILKEHPVENTQLQNEKLYLYYLQNGRDMYVDQELDINRLSDYDVDHIVPQSFLKDDSIDNKVLTRSDKARGKSDNVPSEEVVKKMKNYWRQLLNAKLITQRKFDNLTKAERGGLSELDKAGFIKRQLVETRQITKHVAQILDSRMNTKYDENDKLIREVKVITLKSKLVSDFRKDFQFYKVREINNYHHAHDAYLNAVVGTALIKKYPKLESEFVYGDYKVYDVRKMIAKSEQEIGKATAKYFFYSNIMNFFKTEITLANGEIRKRPLIETNGETGEIVWDKGRDFATVRKVLSMPQVNIVKKTEVQTGGFSKESILPKRNSDKLIARKKDWDPKKYGGFDSPTVAYSVLVVAKVEKGKSKKLKSVKELLGITIMERSSFEKNPIDFLEAKGYKEVKKDLIIKLPKYSLFELENGRKRMLASAGELQKGNELALPSKYVNFLYLASHYEKLKGSPEDNEQKQLFVEQHKHYLDEIIEQISEFSKRVILADANLDKVLSAYNKHRDKPIREQAENIIHLFTLTNLGAPAAFKYFDTTIDRKRYTSTKEVLDATLIHQSITGLYETRIDLSQLGGDGGGSSGSSGSSGSSGSSGGLLGRDLLTKLKAQIQFSTEGPQVTWEDRPAMCLVLNLEEEYRLHEKPVPPSIDPSWLQLFPMVWAEKAGMGLANQVPPVVVELKSDASPVAVRQYPMSKEAREGIRPHIQRFLDLGILVPCQSPWNTPLLPVKKPGTNDYRPVQDLREVNKRVQDIHPTVPNPYNLLSSLPPSHTWYSVLDLKDAFFCLKLHPNSQPLFAFEWRDPEKGNTGQLTWTRLPQGFKNSPTLFNEALHRDLASFRALNPQVVMLQYVDDLLVAAPTYRDCKEGTRRLLQELSKLGYRVSAKKAQLCREEVTYLGYLLKGGKRWLTPARKATVMKIPTPTTPRQVREFLGTAGFCRLWIPGFASLAAPLYPLTRPKVPFTWTEAHQEAFGRIKEALLSAPALALPDLTKPFALYVDEKEGVARGVLTQTLGPWRRPVAYLSKKLDPVASGWPTCLKAIAAVALLLKDADKLTLGQNVLVIAPHNLESIVRQPPDRWMTNARMTHYQSLLLNERVSFAPPAILNPATLLPVESDDTPIHICSEILAEETGTRPDLRDQPLPGVPAWYTDGSSFIMDGRRQAGAAIVDNKRTVWASNLPEGTSAQKAELIALTQALRLAEGKSINIYTDSRYAFATAHVHGAIYKQRGWLTSAGKDIKNKEEILALLEAIHLPKRVAIIHCPGHQRGTDPVATGNRKADEAAKQAAQSTRILTETTKNAGKRTADGSEFEKRTADGSEFESPKKKAKVE

SEQ ID NO: 1618 - protein, 2127 aa, synthetic construct
MPAAKRVKLDGGDKKYSIGLDIGTNSVGWAVITDEYKVPSKKFKVLGNTDRHSIKKNLIGALLFDSGETAEATRLKRTARRRYTRRKNRICYLQEIFSNEMAKVDDSFFHRLEESFLVEEDKKHERHPIFGNIVDEVAYHEKYPTIYHLRKKLVDSTDKADLRLIYLALAHMIKFRGHFLIEGDLNPDNSDVDKLFIQLVQTYNQLFEENPINASGVDAKAILSARLSKSRRLENLIAQLPGEKKNGLFGNLIALSLGLTPNFKSNFDLAEDAKLQLSKDTYDDDLDNLLAQIGDQYADLFLAAKNLSDAILLSDILRVNTEITKAPLSASMIKRYDEHHQDLTLLKALVRQQLPEKYKEIFFDQSKNGYAGYIDGGASQEEFYKFIKPILEKMDGTEELLVKLNREDLLRKQRTFDNGSIPHQIHLGELHAILRRQEDFYPFLKDNREKIEKILTFRIPYYVGPLARGNSRFAWMTRKSEETITPWNFEEVVDKGASAQSFIERMTNFDKNLPNEKVLPKHSLLYEYFTVYNELTKVKYVTEGMRKPAFLSGEQKKAIVDLLFKTNRKVTVKQLKEDYFKKIECFDSVEISGVEDRFNASLGTYHDLLKIIKDKDFLDNEENEDILEDIVLTLTLFEDREMIEERLKTYAHLFDDKVMKQLKRRRYTGWGRLSRKLINGIRDKQSGKTILDFLKSDGFANRNFMQLIHDDSLTFKEDIQKAQVSGQGDSLHEHIANLAGSPAIKKGILQTVKVVDELVKVMGRHKPENIVIEMARENQTTQKGQKNSRERMKRIEEGIKELGSQILKEHPVENTQLQNEKLYLYYLQNGRDMYVDQELDINRLSDYDVDHIVPQSFLKDDSIDNKVLTRSDKARGKSDNVPSEEVVKKMKNYWRQLLNAKLITQRKFDNLTKAERGGLSELDKAGFIKRQLVETRQITKHVAQILDSRMNTKYDENDKLIREVKVITLKSKLVSDFRKDFQFYKVREINNYHHAHDAYLNAVVGTALIKKYPKLESEFVYGDYKVYDVRKMIAKSEQEIGKATAKYFFYSNIMNFFKTEITLANGEIRKRPLIETNGETGEIVWDKGRDFATVRKVLSMPQVNIVKKTEVQTGGFSKESILPKRNSDKLIARKKDWDPKKYGGFDSPTVAYSVLVVAKVEKGKSKKLKSVKELLGITIMERSSFEKNPIDFLEAKGYKEVKKDLIIKLPKYSLFELENGRKRMLASAGELQKGNELALPSKYVNFLYLASHYEKLKGSPEDNEQKQLFVEQHKHYLDEIIEQISEFSKRVILADANLDKVLSAYNKHRDKPIREQAENIIHLFTLTNLGAPAAFKYFDTTIDRKRYTSTKEVLDATLIHQSITGLYETRIDLSQLGGDGGEAAAKPAPGSSGGLLGRDLLTKLKAQIQFSTEGPQVTWEDRPAMCLVLNLEEEYRLHEKPVPPSIDPSWLQLFPMVWAEKAGMGLANQVPPVVVELKSDASPVAVRQYPMSKEAREGIRPHIQRFLDLGILVPCQSPWNTPLLPVKKPGTNDYRPVQDLREVNKRVQDIHPTVPNPYNLLSSLPPSHTWYSVLDLKDAFFCLKLHPNSQPLFAFEWRDPEKGNTGQLTWTRLPQGFKNSPTLFNEALHRDLASFRALNPQVVMLQYVDDLLVAAPTYRDCKEGTRRLLQELSKLGYRVSAKKAQLCREEVTYLGYLLKGGKRWLTPARKATVMKIPTPTTPRQVREFLGTAGFCRLWIPGFASLAAPLYPLTRPKVPFTWTEAHQEAFGRIKEALLSAPALALPDLTKPFALYVDEKEGVARGVLTQTLGPWRRPVAYLSKKLDPVASGWPTCLKAIAAVALLLKDADKLTLGQNVLVIAPHNLESIVRQPPDRWMTNARMTHYQSLLLNERVSFAPPAILNPATLLPVESDDTPIHICSEILAEETGTRPDLRDQPLPGVPAWYTDGSSFIMDGRRQAGAAIVDNKRTVWASNLPEGTSAQKAELIALTQALRLAEGKSINIYTDSRYAFATAHVHGAIYKQRGWLTSAGKDIKNKEEILALLEAIHLPKRVAIIHCPGHQRGTDPVATGNRKADEAAKQAAQSTRILTETTKNAGKRTADGSEFEKRTADGSEFESPKKKAKVE

SEQ ID NO: 1619 - protein, 2127 aa, synthetic construct
MPAAKRVKLDGGDKKYSIGLDIGTNSVGWAVITDEYKVPSKKFKVLGNTDRHSIKKNLIGALLFDSGETAEATRLKRTARRRYTRRKNRICYLQEIFSNEMAKVDDSFFHRLEESFLVEEDKKHERHPIFGNIVDEVAYHEKYPTIYHLRKKLVDSTDKADLRLIYLALAHMIKFRGHFLIEGDLNPDNSDVDKLFIQLVQTYNQLFEENPINASGVDAKAILSARLSKSRRLENLIAQLPGEKKNGLFGNLIALSLGLTPNFKSNFDLAEDAKLQLSKDTYDDDLDNLLAQIGDQYADLFLAAKNLSDAILLSDILRVNTEITKAPLSASMIKRYDEHHQDLTLLKALVRQQLPEKYKEIFFDQSKNGYAGYIDGGASQEEFYKFIKPILEKMDGTEELLVKLNREDLLRKQRTFDNGSIPHQIHLGELHAILRRQEDFYPFLKDNREKIEKILTFRIPYYVGPLARGNSRFAWMTRKSEETITPWNFEEVVDKGASAQSFIERMTNFDKNLPNEKVLPKHSLLYEYFTVYNELTKVKYVTEGMRKPAFLSGEQKKAIVDLLFKTNRKVTVKQLKEDYFKKIECFDSVEISGVEDRFNASLGTYHDLLKIIKDKDFLDNEENEDILEDIVLTLTLFEDREMIEERLKTYAHLFDDKVMKQLKRRRYTGWGRLSRKLINGIRDKQSGKTILDFLKSDGFANRNFMQLIHDDSLTFKEDIQKAQVSGQGDSLHEHIANLAGSPAIKKGILQTVKVVDELVKVMGRHKPENIVIEMARENQTTQKGQKNSRERMKRIEEGIKELGSQILKEHPVENTQLQNEKLYLYYLQNGRDMYVDQELDINRLSDYDVDHIVPQSFLKDDSIDNKVLTRSDKARGKSDNVPSEEVVKKMKNYWRQLLNAKLITQRKFDNLTKAERGGLSELDKAGFIKRQLVETRQITKHVAQILDSRMNTKYDENDKLIREVKVITLKSKLVSDFRKDFQFYKVREINNYHHAHDAYLNAVVGTALIKKYPKLESEFVYGDYKVYDVRKMIAKSEQEIGKATAKYFFYSNIMNFFKTEITLANGEIRKRPLIETNGETGEIVWDKGRDFATVRKVLSMPQVNIVKKTEVQTGGFSKESILPKRNSDKLIARKKDWDPKKYGGFDSPTVAYSVLVVAKVEKGKSKKLKSVKELLGITIMERSSFEKNPIDFLEAKGYKEVKKDLIIKLPKYSLFELENGRKRMLASAGELQKGNELALPSKYVNFLYLASHYEKLKGSPEDNEQKQLFVEQHKHYLDEIIEQISEFSKRVILADANLDKVLSAYNKHRDKPIREQAENIIHLFTLTNLGAPAAFKYFDTTIDRKRYTSTKEVLDATLIHQSITGLYETRIDLSQLGGDGGPAPAPAPAPAPGGLLGRDLLTKLKAQIQFSTEGPQVTWEDRPAMCLVLNLEEEYRLHEKPVPPSIDPSWLQLFPMVWAEKAGMGLANQVPPVVVELKSDASPVAVRQYPMSKEAREGIRPHIQRFLDLGILVPCQSPWNTPLLPVKKPGTNDYRPVQDLREVNKRVQDIHPTVPNPYNLLSSLPPSHTWYSVLDLKDAFFCLKLHPNSQPLFAFEWRDPEKGNTGQLTWTRLPQGFKNSPTLFNEALHRDLASFRALNPQVVMLQYVDDLLVAAPTYRDCKEGTRRLLQELSKLGYRVSAKKAQLCREEVTYLGYLLKGGKRWLTPARKATVMKIPTPTTPRQVREFLGTAGFCRLWIPGFASLAAPLYPLTRPKVPFTWTEAHQEAFGRIKEALLSAPALALPDLTKPFALYVDEKEGVARGVLTQTLGPWRRPVAYLSKKLDPVASGWPTCLKAIAAVALLLKDADKLTLGQNVLVIAPHNLESIVRQPPDRWMTNARMTHYQSLLLNERVSFAPPAILNPATLLPVESDDTPIHICSEILAEETGTRPDLRDQPLPGVPAWYTDGSSFIMDGRRQAGAAIVDNKRTVWASNLPEGTSAQKAELIALTQALRLAEGKSINIYTDSRYAFATAHVHGAIYKQRGWLTSAGKDIKNKEEILALLEAIHLPKRVAIIHCPGHQRGTDPVATGNRKADEAAKQAAQSTRILTETTKNAGKRTADGSEFEKRTADGSEFESPKKKAKVE

SEQ ID NO: 1620 - protein, 2127 aa, synthetic construct
MPAAKRVKLDGGDKKYSIGLDIGTNSVGWAVITDEYKVPSKKFKVLGNTDRHSIKKNLIGALLFDSGETAEATRLKRTARRRYTRRKNRICYLQEIFSNEMAKVDDSFFHRLEESFLVEEDKKHERHPIFGNIVDEVAYHEKYPTIYHLRKKLVDSTDKADLRLIYLALAHMIKFRGHFLIEGDLNPDNSDVDKLFIQLVQTYNQLFEENPINASGVDAKAILSARLSKSRRLENLIAQLPGEKKNGLFGNLIALSLGLTPNFKSNFDLAEDAKLQLSKDTYDDDLDNLLAQIGDQYADLFLAAKNLSDAILLSDILRVNTEITKAPLSASMIKRYDEHHQDLTLLKALVRQQLPEKYKEIFFDQSKNGYAGYIDGGASQEEFYKFIKPILEKMDGTEELLVKLNREDLLRKQRTFDNGSIPHQIHLGELHAILRRQEDFYPFLKDNREKIEKILTFRIPYYVGPLARGNSRFAWMTRKSEETITPWNFEEVVDKGASAQSFIERMTNFDKNLPNEKVLPKHSLLYEYFTVYNELTKVKYVTEGMRKPAFLSGEQKKAIVDLLFKTNRKVTVKQLKEDYFKKIECFDSVEISGVEDRFNASLGTYHDLLKIIKDKDFLDNEENEDILEDIVLTLTLFEDREMIEERLKTYAHLFDDKVMKQLKRRRYTGWGRLSRKLINGIRDKQSGKTILDFLKSDGFANRNFMQLIHDDSLTFKEDIQKAQVSGQGDSLHEHIANLAGSPAIKKGILQTVKVVDELVKVMGRHKPENIVIEMARENQTTQKGQKNSRERMKRIEEGIKELGSQILKEHPVENTQLQNEKLYLYYLQNGRDMYVDQELDINRLSDYDVDHIVPQSFLKDDSIDNKVLTRSDKARGKSDNVPSEEVVKKMKNYWRQLLNAKLITQRKFDNLTKAERGGLSELDKAGFIKRQLVETRQITKHVAQILDSRMNTKYDENDKLIREVKVITLKSKLVSDFRKDFQFYKVREINNYHHAHDAYLNAVVGTALIKKYPKLESEFVYGDYKVYDVRKMIAKSEQEIGKATAKYFFYSNIMNFFKTEITLANGEIRKRPLIETNGETGEIVWDKGRDFATVRKVLSMPQVNIVKKTEVQTGGFSKESILPKRNSDKLIARKKDWDPKKYGGFDSPTVAYSVLVVAKVEKGKSKKLKSVKELLGITIMERSSFEKNPIDFLEAKGYKEVKKDLIIKLPKYSLFELENGRKRMLASAGELQKGNELALPSKYVNFLYLASHYEKLKGSPEDNEQKQLFVEQHKHYLDEIIEQISEFSKRVILADANLDKVLSAYNKHRDKPIREQAENIIHLFTLTNLGAPAAFKYFDTTIDRKRYTSTKEVLDATLIHQSITGLYETRIDLSQLGGDGGGGSPAPEAAAKGGLLGRDLLTKLKAQIQFSTEGPQVTWEDRPAMCLVLNLEEEYRLHEKPVPPSIDPSWLQLFPMVWAEKAGMGLANQVPPVVVELKSDASPVAVRQYPMSKEAREGIRPHIQRFLDLGILVPCQSPWNTPLLPVKKPGTNDYRPVQDLREVNKRVQDIHPTVPNPYNLLSSLPPSHTWYSVLDLKDAFFCLKLHPNSQPLFAFEWRDPEKGNTGQLTWTRLPQGFKNSPTLFNEALHRDLASFRALNPQVVMLQYVDDLLVAAPTYRDCKEGTRRLLQELSKLGYRVSAKKAQLCREEVTYLGYLLKGGKRWLTPARKATVMKIPTPTTPRQVREFLGTAGFCRLWIPGFASLAAPLYPLTRPKVPFTWTEAHQEAFGRIKEALLSAPALALPDLTKPFALYVDEKEGVARGVLTQTLGPWRRPVAYLSKKLDPVASGWPTCLKAIAAVALLLKDADKLTLGQNVLVIAPHNLESIVRQPPDRWMTNARMTHYQSLLLNERVSFAPPAILNPATLLPVESDDTPIHICSEILAEETGTRPDLRDQPLPGVPAWYTDGSSFIMDGRRQAGAAIVDNKRTVWASNLPEGTSAQKAELIALTQALRLAEGKSINIYTDSRYAFATAHVHGAIYKQRGWLTSAGKDIKNKEEILALLEAIHLPKRVAIIHCPGHQRGTDPVATGNRKADEAAKQAAQSTRILTETTKNAGKRTADGSEFEKRTADGSEFESPKKKAKVE

SEQ ID NO: 1621 - protein, 2146 aa, synthetic construct
MPAAKRVKLDGGDKKYSIGLDIGTNSVGWAVITDEYKVPSKKFKVLGNTDRHSIKKNLIGALLFDSGETAEATRLKRTARRRYTRRKNRICYLQEIFSNEMAKVDDSFFHRLEESFLVEEDKKHERHPIFGNIVDEVAYHEKYPTIYHLRKKLVDSTDKADLRLIYLALAHMIKFRGHFLIEGDLNPDNSDVDKLFIQLVQTYNQLFEENPINASGVDAKAILSARLSKSRRLENLIAQLPGEKKNGLFGNLIALSLGLTPNFKSNFDLAEDAKLQLSKDTYDDDLDNLLAQIGDQYADLFLAAKNLSDAILLSDILRVNTEITKAPLSASMIKRYDEHHQDLTLLKALVRQQLPEKYKEIFFDQSKNGYAGYIDGGASQEEFYKFIKPILEKMDGTEELLVKLNREDLLRKQRTFDNGSIPHQIHLGELHAILRRQEDFYPFLKDNREKIEKILTFRIPYYVGPLARGNSRFAWMTRKSEETITPWNFEEVVDKGASAQSFIERMTNFDKNLPNEKVLPKHSLLYEYFTVYNELTKVKYVTEGMRKPAFLSGEQKKAIVDLLFKTNRKVTVKQLKEDYFKKIECFDSVEISGVEDRFNASLGTYHDLLKIIKDKDFLDNEENEDILEDIVLTLTLFEDREMIEERLKTYAHLFDDKVMKQLKRRRYTGWGRLSRKLINGIRDKQSGKTILDFLKSDGFANRNFMQLIHDDSLTFKEDIQKAQVSGQGDSLHEHIANLAGSPAIKKGILQTVKVVDELVKVMGRHKPENIVIEMARENQTTQKGQKNSRERMKRIEEGIKELGSQILKEHPVENTQLQNEKLYLYYLQNGRDMYVDQELDINRLSDYDVDHIVPQSFLKDDSIDNKVLTRSDKARGKSDNVPSEEVVKKMKNYWRQLLNAKLITQRKFDNLTKAERGGLSELDKAGFIKRQLVETRQITKHVAQILDSRMNTKYDENDKLIREVKVITLKSKLVSDFRKDFQFYKVREINNYHHAHDAYLNAVVGTALIKKYPKLESEFVYGDYKVYDVRKMIAKSEQEIGKATAKYFFYSNIMNFFKTEITLANGEIRKRPLIETNGETGEIVWDKGRDFATVRKVLSMPQVNIVKKTEVQTGGFSKESILPKRNSDKLIARKKDWDPKKYGGFDSPTVAYSVLVVAKVEKGKSKKLKSVKELLGITIMERSSFEKNPIDFLEAKGYKEVKKDLIIKLPKYSLFELENGRKRMLASAGELQKGNELALPSKYVNFLYLASHYEKLKGSPEDNEQKQLFVEQHKHYLDEIIEQISEFSKRVILADANLDKVLSAYNKHRDKPIREQAENIIHLFTLTNLGAPAAFKYFDTTIDRKRYTSTKEVLDATLIHQSITGLYETRIDLSQLGGDGGEAAAKEAAAKEAAAKEAAAKEAAAKEAAAKGGLLGRDLLTKLKAQIQFSTEGPQVTWEDRPAMCLVLNLEEEYRLHEKPVPPSIDPSWLQLFPMVWAEKAGMGLANQVPPVVVELKSDASPVAVRQYPMSKEAREGIRPHIQRFLDLGILVPCQSPWNTPLLPVKKPGTNDYRPVQDLREVNKRVQDIHPTVPNPYNLLSSLPPSHTWYSVLDLKDAFFCLKLHPNSQPLFAFEWRDPEKGNTGQLTWTRLPQGFKNSPTLFNEALHRDLASFRALNPQVVMLQYVDDLLVAAPTYRDCKEGTRRLLQELSKLGYRVSAKKAQLCREEVTYLGYLLKGGKRWLTPARKATVMKIPTPTTPRQVREFLGTAGFCRLWIPGFASLAAPLYPLTRPKVPFTWTEAHQEAFGRIKEALLSAPALALPDLTKPFALYVDEKEGVARGVLTQTLGPWRRPVAYLSKKLDPVASGWPTCLKAIAAVALLLKDADKLTLGQNVLVIAPHNLESIVRQPPDRWMTNARMTHYQSLLLNERVSFAPPAILNPATLLPVESDDTPIHICSEILAEETGTRPDLRDQPLPGVPAWYTDGSSFIMDGRRQAGAAIVDNKRTVWASNLPEGTSAQKAELIALTQALRLAEGKSINIYTDSRYAFATAHVHGAIYKQRGWLTSAGKDIKNKEEILALLEAIHLPKRVAIIHCPGHQRGTDPVATGNRKADEAAKQAAQSTRILTETTKNAGKRTADGSEFEKRTADGSEFESPKKKAKVE

SEQ ID NO: 1622 - protein, 2162 aa, synthetic construct
MPAAKRVKLDGGDKKYSIGLDIGTNSVGWAVITDEYKVPSKKFKVLGNTDRHSIKKNLIGALLFDSGETAEATRLKRTARRRYTRRKNRICYLQEIFSNEMAKVDDSFFHRLEESFLVEEDKKHERHPIFGNIVDEVAYHEKYPTIYHLRKKLVDSTDKADLRLIYLALAHMIKFRGHFLIEGDLNPDNSDVDKLFIQLVQTYNQLFEENPINASGVDAKAILSARLSKSRRLENLIAQLPGEKKNGLFGNLIALSLGLTPNFKSNFDLAEDAKLQLSKDTYDDDLDNLLAQIGDQYADLFLAAKNLSDAILLSDILRVNTEITKAPLSASMIKRYDEHHQDLTLLKALVRQQLPEKYKEIFFDQSKNGYAGYIDGGASQEEFYKFIKPILEKMDGTEELLVKLNREDLLRKQRTFDNGSIPHQIHLGELHAILRRQEDFYPFLKDNREKIEKILTFRIPYYVGPLARGNSRFAWMTRKSEETITPWNFEEVVDKGASAQSFIERMTNFDKNLPNEKVLPKHSLLYEYFTVYNELTKVKYVTEGMRKPAFLSGEQKKAIVDLLFKTNRKVTVKQLKEDYFKKIECFDSVEISGVEDRFNASLGTYHDLLKIIKDKDFLDNEENEDILEDIVLTLTLFEDREMIEERLKTYAHLFDDKVMKQLKRRRYTGWGRLSRKLINGIRDKQSGKTILDFLKSDGFANRNFMQLIHDDSLTFKEDIQKAQVSGQGDSLHEHIANLAGSPAIKKGILQTVKVVDELVKVMGRHKPENIVIEMARENQTTQKGQKNSRERMKRIEEGIKELGSQILKEHPVENTQLQNEKLYLYYLQNGRDMYVDQELDINRLSDYDVDHIVPQSFLKDDSIDNKVLTRSDKARGKSDNVPSEEVVKKMKNYWRQLLNAKLITQRKFDNLTKAERGGLSELDKAGFIKRQLVETRQITKHVAQILDSRMNTKYDENDKLIREVKVITLKSKLVSDFRKDFQFYKVREINNYHHAHDAYLNAVVGTALIKKYPKLESEFVYGDYKVYDVRKMIAKSEQEIGKATAKYFFYSNIMNFFKTEITLANGEIRKRPLIETNGETGEIVWDKGRDFATVRKVLSMPQVNIVKKTEVQTGGFSKESILPKRNSDKLIARKKDWDPKKYGGFDSPTVAYSVLVVAKVEKGKSKKLKSVKELLGITIMERSSFEKNPIDFLEAKGYKEVKKDLIIKLPKYSLFELENGRKRMLASAGELQKGNELALPSKYVNFLYLASHYEKLKGSPEDNEQKQLFVEQHKHYLDEIIEQISEFSKRVILADANLDKVLSAYNKHRDKPIREQAENIIHLFTLTNLGAPAAFKYFDTTIDRKRYTSTKEVLDATLIHQSITGLYETRIDLSQLGGDGGAEAAAKEAAAKEAAAKEAAAKALEAEAAAKEAAAKEAAAKEAAAKAGGLLGRDLLTKLKAQIQFSTEGPQVTWEDRPAMCLVLNLEEEYRLHEKPVPPSIDPSWLQLFPMVWAEKAGMGLANQVPPVVVELKSDASPVAVRQYPMSKEAREGIRPHIQRFLDLGILVPCQSPWNTPLLPVKKPGTNDYRPVQDLREVNKRVQDIHPTVPNPYNLLSSLPPSHTWYSVLDLKDAFFCLKLHPNSQPLFAFEWRDPEKGNTGQLTWTRLPQGFKNSPTLFNEALHRDLASFRALNPQVVMLQYVDDLLVAAPTYRDCKEGTRRLLQELSKLGYRVSAKKAQLCREEVTYLGYLLKGGKRWLTPARKATVMKIPTPTTPRQVREFLGTAGFCRLWIPGFASLAAPLYPLTRPKVPFTWTEAHQEAFGRIKEALLSAPALALPDLTKPFALYVDEKEGVARGVLTQTLGPWRRPVAYLSKKLDPVASGWPTCLKAIAAVALLLKDADKLTLGQNVLVIAPHNLESIVRQPPDRWMTNARMTHYQSLLLNERVSFAPPAILNPATLLPVESDDTPIHICSEILAEETGTRPDLRDQPLPGVPAWYTDGSSFIMDGRRQAGAAIVDNKRTVWASNLPEGTSAQKAELIALTQALRLAEGKSINIYTDSRYAFATAHVHGAIYKQRGWLTSAGKDIKNKEEILALLEAIHLPKRVAIIHCPGHQRGTDPVATGNRKADEAAKQAAQSTRILTETTKNAGKRTADGSEFEKRTADGSEFESPKKKAKVE

SEQ ID NO: 1623 - protein, 2127 aa, synthetic construct
MPAAKRVKLDGGDKKYSIGLDIGTNSVGWAVITDEYKVPSKKFKVLGNTDRHSIKKNLIGALLFDSGETAEATRLKRTARRRYTRRKNRICYLQEIFSNEMAKVDDSFFHRLEESFLVEEDKKHERHPIFGNIVDEVAYHEKYPTIYHLRKKLVDSTDKADLRLIYLALAHMIKFRGHFLIEGDLNPDNSDVDKLFIQLVQTYNQLFEENPINASGVDAKAILSARLSKSRRLENLIAQLPGEKKNGLFGNLIALSLGLTPNFKSNFDLAEDAKLQLSKDTYDDDLDNLLAQIGDQYADLFLAAKNLSDAILLSDILRVNTEITKAPLSASMIKRYDEHHQDLTLLKALVRQQLPEKYKEIFFDQSKNGYAGYIDGGASQEEFYKFIKPILEKMDGTEELLVKLNREDLLRKQRTFDNGSIPHQIHLGELHAILRRQEDFYPFLKDNREKIEKILTFRIPYYVGPLARGNSRFAWMTRKSEETITPWNFEEVVDKGASAQSFIERMTNFDKNLPNEKVLPKHSLLYEYFTVYNELTKVKYVTEGMRKPAFLSGEQKKAIVDLLFKTNRKVTVKQLKEDYFKKIECFDSVEISGVEDRFNASLGTYHDLLKIIKDKDFLDNEENEDILEDIVLTLTLFEDREMIEERLKTYAHLFDDKVMKQLKRRRYTGWGRLSRKLINGIRDKQSGKTILDFLKSDGFANRNFMQLIHDDSLTFKEDIQKAQVSGQGDSLHEHIANLAGSPAIKKGILQTVKVVDELVKVMGRHKPENIVIEMARENQTTQKGQKNSRERMKRIEEGIKELGSQILKEHPVENTQLQNEKLYLYYLQNGRDMYVDQELDINRLSDYDVDHIVPQSFLKDDSIDNKVLTRSDKARGKSDNVPSEEVVKKMKNYWRQLLNAKLITQRKFDNLTKAERGGLSELDKAGFIKRQLVETRQITKHVAQILDSRMNTKYDENDKLIREVKVITLKSKLVSDFRKDFQFYKVREINNYHHAHDAYLNAVVGTALIKKYPKLESEFVYGDYKVYDVRKMIAKSEQEIGKATAKYFFYSNIMNFFKTEITLANGEIRKRPLIETNGETGEIVWDKGRDFATVRKVLSMPQVNIVKKTEVQTGGFSKESILPKRNSDKLIARKKDWDPKKYGGFDSPTVAYSVLVVAKVEKGKSKKLKSVKELLGITIMERSSFEKNPIDFLEAKGYKEVKKDLIIKLPKYSLFELENGRKRMLASAGELQKGNELALPSKYVNFLYLASHYEKLKGSPEDNEQKQLFVEQHKHYLDEIIEQISEFSKRVILADANLDKVLSAYNKHRDKPIREQAENIIHLFTLTNLGAPAAFKYFDTTIDRKRYTSTKEVLDATLIHQSITGLYETRIDLSQLGGDGGGSSEAAAKGGSGGLLGRDLLTKLKAQIQFSTEGPQVTWEDRPAMCLVLNLEEEYRLHEKPVPPSIDPSWLQLFPMVWAEKAGMGLANQVPPVVVELKSDASPVAVRQYPMSKEAREGIRPHIQRFLDLGILVPCQSPWNTPLLPVKKPGTNDYRPVQDLREVNKRVQDIHPTVPNPYNLLSSLPPSHTWYSVLDLKDAFFCLKLHPNSQPLFAFEWRDPEKGNTGQLTWTRLPQGFKNSPTLFNEALHRDLASFRALNPQVVMLQYVDDLLVAAPTYRDCKEGTRRLLQELSKLGYRVSAKKAQLCREEVTYLGYLLKGGKRWLTPARKATVMKIPTPTTPRQVREFLGTAGFCRLWIPGFASLAAPLYPLTRPKVPFTWTEAHQEAFGRIKEALLSAPALALPDLTKPFALYVDEKEGVARGVLTQTLGPWRRPVAYLSKKLDPVASGWPTCLKAIAAVALLLKDADKLTLGQNVLVIAPHNLESIVRQPPDRWMTNARMTHYQSLLLNERVSFAPPAILNPATLLPVESDDTPIHICSEILAEETGTRPDLRDQPLPGVPAWYTDGSSFIMDGRRQAGAAIVDNKRTVWASNLPEGTSAQKAELIALTQALRLAEGKSINIYTDSRYAFATAHVHGAIYKQRGWLTSAGKDIKNKEEILALLEAIHLPKRVAIIHCPGHQRGTDPVATGNRKADEAAKQAAQSTRILTETTKNAGKRTADGSEFEKRTADGSEFESPKKKAKVE

SEQ ID NO: 1624 - protein, 2127 aa, synthetic construct
MPAAKRVKLDGGDKKYSIGLDIGTNSVGWAVITDEYKVPSKKFKVLGNTDRHSIKKNLIGALLFDSGETAEATRLKRTARRRYTRRKNRICYLQEIFSNEMAKVDDSFFHRLEESFLVEEDKKHERHPIFGNIVDEVAYHEKYPTIYHLRKKLVDSTDKADLRLIYLALAHMIKFRGHFLIEGDLNPDNSDVDKLFIQLVQTYNQLFEENPINASGVDAKAILSARLSKSRRLENLIAQLPGEKKNGLFGNLIALSLGLTPNFKSNFDLAEDAKLQLSKDTYDDDLDNLLAQIGDQYADLFLAAKNLSDAILLSDILRVNTEITKAPLSASMIKRYDEHHQDLTLLKALVRQQLPEKYKEIFFDQSKNGYAGYIDGGASQEEFYKFIKPILEKMDGTEELLVKLNREDLLRKQRTFDNGSIPHQIHLGELHAILRRQEDFYPFLKDNREKIEKILTFRIPYYVGPLARGNSRFAWMTRKSEETITPWNFEEVVDKGASAQSFIERMTNFDKNLPNEKVLPKHSLLYEYFTVYNELTKVKYVTEGMRKPAFLSGEQKKAIVDLLFKTNRKVTVKQLKEDYFKKIECFDSVEISGVEDRFNASLGTYHDLLKIIKDKDFLDNEENEDILEDIVLTLTLFEDREMIEERLKTYAHLFDDKVMKQLKRRRYTGWGRLSRKLINGIRDKQSGKTILDFLKSDGFANRNFMQLIHDDSLTFKEDIQKAQVSGQGDSLHEHIANLAGSPAIKKGILQTVKVVDELVKVMGRHKPENIVIEMARENQTTQKGQKNSRERMKRIEEGIKELGSQILKEHPVENTQLQNEKLYLYYLQNGRDMYVDQELDINRLSDYDVDHIVPQSFLKDDSIDNKVLTRSDKARGKSDNVPSEEVVKKMKNYWRQLLNAKLITQRKFDNLTKAERGGLSELDKAGFIKRQLVETRQITKHVAQILDSRMNTKYDENDKLIREVKVITLKSKLVSDFRKDFQFYKVREINNYHHAHDAYLNAVVGTALIKKYPKLESEFVYGDYKVYDVRKMIAKSEQEIGKATAKYFFYSNIMNFFKTEITLANGEIRKRPLIETNGETGEIVWDKGRDFATVRKVLSMPQVNIVKKTEVQTGGFSKESILPKRNSDKLIARKKDWDPKKYGGFDSPTVAYSVLVVAKVEKGKSKKLKSVKELLGITIMERSSFEKNPIDFLEAKGYKEVKKDLIIKLPKYSLFELENGRKRMLASAGELQKGNELALPSKYVNFLYLASHYEKLKGSPEDNEQKQLFVEQHKHYLDEIIEQISEFSKRVILADANLDKVLSAYNKHRDKPIREQAENIIHLFTLTNLGAPAAFKYFDTTIDRKRYTSTKEVLDATLIHQSITGLYETRIDLSQLGGDGGEAAAKGSSPAPGGLLGRDLLTKLKAQIQFSTEGPQVTWEDRPAMCLVLNLEEEYRLHEKPVPPSIDPSWLQLFPMVWAEKAGMGLANQVPPVVVELKSDASPVAVRQYPMSKEAREGIRPHIQRFLDLGILVPCQSPWNTPLLPVKKPGTNDYRPVQDLREVNKRVQDIHPTVPNPYNLLSSLPPSHTWYSVLDLKDAFFCLKLHPNSQPLFAFEWRDPEKGNTGQLTWTRLPQGFKNSPTLFNEALHRDLASFRALNPQVVMLQYVDDLLVAAPTYRDCKEGTRRLLQELSKLGYRVSAKKAQLCREEVTYLGYLLKGGKRWLTPARKATVMKIPTPTTPRQVREFLGTAGFCRLWIPGFASLAAPLYPLTRPKVPFTWTEAHQEAFGRIKEALLSAPALALPDLTKPFALYVDEKEGVARGVLTQTLGPWRRPVAYLSKKLDPVASGWPTCLKAIAAVALLLKDADKLTLGQNVLVIAPHNLESIVRQPPDRWMTNARMTHYQSLLLNERVSFAPPAILNPATLLPVESDDTPIHICSEILAEETGTRPDLRDQPLPGVPAWYTDGSSFIMDGRRQAGAAIVDNKRTVWASNLPEGTSAQKAELIALTQALRLAEGKSINIYTDSRYAFATAHVHGAIYKQRGWLTSAGKDIKNKEEILALLEAIHLPKRVAIIHCPGHQRGTDPVATGNRKADEAAKQAAQSTRILTETTKNAGKRTADGSEFEKRTADGSEFESPKKKAKVE

SEQ ID NO: 1625 - protein, 2122 aa, synthetic construct
MPAAKRVKLDGGDKKYSIGLDIGTNSVGWAVITDEYKVPSKKFKVLGNTDRHSIKKNLIGALLFDSGETAEATRLKRTARRRYTRRKNRICYLQEIFSNEMAKVDDSFFHRLEESFLVEEDKKHERHPIFGNIVDEVAYHEKYPTIYHLRKKLVDSTDKADLRLIYLALAHMIKFRGHFLIEGDLNPDNSDVDKLFIQLVQTYNQLFEENPINASGVDAKAILSARLSKSRRLENLIAQLPGEKKNGLFGNLIALSLGLTPNFKSNFDLAEDAKLQLSKDTYDDDLDNLLAQIGDQYADLFLAAKNLSDAILLSDILRVNTEITKAPLSASMIKRYDEHHQDLTLLKALVRQQLPEKYKEIFFDQSKNGYAGYIDGGASQEEFYKFIKPILEKMDGTEELLVKLNREDLLRKQRTFDNGSIPHQIHLGELHAILRRQEDFYPFLKDNREKIEKILTFRIPYYVGPLARGNSRFAWMTRKSEETITPWNFEEVVDKGASAQSFIERMTNFDKNLPNEKVLPKHSLLYEYFTVYNELTKVKYVTEGMRKPAFLSGEQKKAIVDLLFKTNRKVTVKQLKEDYFKKIECFDSVEISGVEDRFNASLGTYHDLLKIIKDKDFLDNEENEDILEDIVLTLTLFEDREMIEERLKTYAHLFDDKVMKQLKRRRYTGWGRLSRKLINGIRDKQSGKTILDFLKSDGFANRNFMQLIHDDSLTFKEDIQKAQVSGQGDSLHEHIANLAGSPAIKKGILQTVKVVDELVKVMGRHKPENIVIEMARENQTTQKGQKNSRERMKRIEEGIKELGSQILKEHPVENTQLQNEKLYLYYLQNGRDMYVDQELDINRLSDYDVDHIVPQSFLKDDSIDNKVLTRSDKARGKSDNVPSEEVVKKMKNYWRQLLNAKLITQRKFDNLTKAERGGLSELDKAGFIKRQLVETRQITKHVAQILDSRMNTKYDENDKLIREVKVITLKSKLVSDFRKDFQFYKVREINNYHHAHDAYLNAVVGTALIKKYPKLESEFVYGDYKVYDVRKMIAKSEQEIGKATAKYFFYSNIMNFFKTEITLANGEIRKRPLIETNGETGEIVWDKGRDFATVRKVLSMPQVNIVKKTEVQTGGFSKESILPKRNSDKLIARKKDWDPKKYGGFDSPTVAYSVLVVAKVEKGKSKKLKSVKELLGITIMERSSFEKNPIDFLEAKGYKEVKKDLIIKLPKYSLFELENGRKRMLASAGELQKGNELALPSKYVNFLYLASHYEKLKGSPEDNEQKQLFVEQHKHYLDEIIEQISEFSKRVILADANLDKVLSAYNKHRDKPIREQAENIIHLFTLTNLGAPAAFKYFDTTIDRKRYTSTKEVLDATLIHQSITGLYETRIDLSQLGGDGGGSSGSSGGLLGRDLLTKLKAQIQFSTEGPQVTWEDRPAMCLVLNLEEEYRLHEKPVPPSIDPSWLQLFPMVWAEKAGMGLANQVPPVVVELKSDASPVAVRQYPMSKEAREGIRPHIQRFLDLGILVPCQSPWNTPLLPVKKPGTNDYRPVQDLREVNKRVQDIHPTVPNPYNLLSSLPPSHTWYSVLDLKDAFFCLKLHPNSQPLFAFEWRDPEKGNTGQLTWTRLPQGFKNSPTLFNEALHRDLASFRALNPQVVMLQYVDDLLVAAPTYRDCKEGTRRLLQELSKLGYRVSAKKAQLCREEVTYLGYLLKGGKRWLTPARKATVMKIPTPTTPRQVREFLGTAGFCRLWIPGFASLAAPLYPLTRPKVPFTWTEAHQEAFGRIKEALLSAPALALPDLTKPFALYVDEKEGVARGVLTQTLGPWRRPVAYLSKKLDPVASGWPTCLKAIAAVALLLKDADKLTLGQNVLVIAPHNLESIVRQPPDRWMTNARMTHYQSLLLNERVSFAPPAILNPATLLPVESDDTPIHICSEILAEETGTRPDLRDQPLPGVPAWYTDGSSFIMDGRRQAGAAIVDNKRTVWASNLPEGTSAQKAELIALTQALRLAEGKSINIYTDSRYAFATAHVHGAIYKQRGWLTSAGKDIKNKEEILALLEAIHLPKRVAIIHCPGHQRGTDPVATGNRKADEAAKQAAQSTRILTETTKNAGKRTADGSEFEKRTADGSEFESPKKKAKVE

SEQ ID NO: 1626 - protein, 2122 aa, synthetic construct
MPAAKRVKLDGGDKKYSIGLDIGTNSVGWAVITDEYKVPSKKFKVLGNTDRHSIKKNLIGALLFDSGETAEATRLKRTARRRYTRRKNRICYLQEIFSNEMAKVDDSFFHRLEESFLVEEDKKHERHPIFGNIVDEVAYHEKYPTIYHLRKKLVDSTDKADLRLIYLALAHMIKFRGHFLIEGDLNPDNSDVDKLFIQLVQTYNQLFEENPINASGVDAKAILSARLSKSRRLENLIAQLPGEKKNGLFGNLIALSLGLTPNFKSNFDLAEDAKLQLSKDTYDDDLDNLLAQIGDQYADLFLAAKNLSDAILLSDILRVNTEITKAPLSASMIKRYDEHHQDLTLLKALVRQQLPEKYKEIFFDQSKNGYAGYIDGGASQEEFYKFIKPILEKMDGTEELLVKLNREDLLRKQRTFDNGSIPHQIHLGELHAILRRQEDFYPFLKDNREKIEKILTFRIPYYVGPLARGNSRFAWMTRKSEETITPWNFEEVVDKGASAQSFIERMTNFDKNLPNEKVLPKHSLLYEYFTVYNELTKVKYVTEGMRKPAFLSGEQKKAIVDLLFKTNRKVTVKQLKEDYFKKIECFDSVEISGVEDRFNASLGTYHDLLKIIKDKDFLDNEENEDILEDIVLTLTLFEDREMIEERLKTYAHLFDDKVMKQLKRRRYTGWGRLSRKLINGIRDKQSGKTILDFLKSDGFANRNFMQLIHDDSLTFKEDIQKAQVSGQGDSLHEHIANLAGSPAIKKGILQTVKVVDELVKVMGRHKPENIVIEMARENQTTQKGQKNSRERMKRIEEGIKELGSQILKEHPVENTQLQNEKLYLYYLQNGRDMYVDQELDINRLSDYDVDHIVPQSFLKDDSIDNKVLTRSDKARGKSDNVPSEEVVKKMKNYWRQLLNAKLITQRKFDNLTKAERGGLSELDKAGFIKRQLVETRQITKHVAQILDSRMNTKYDENDKLIREVKVITLKSKLVSDFRKDFQFYKVREINNYHHAHDAYLNAVVGTALIKKYPKLESEFVYGDYKVYDVRKMIAKSEQEIGKATAKYFFYSNIMNFFKTEITLANGEIRKRPLIETNGETGEIVWDKGRDFATVRKVLSMPQVNIVKKTEVQTGGFSKESILPKRNSDKLIARKKDWDPKKYGGFDSPTVAYSVLVVAKVEKGKSKKLKSVKELLGITIMERSSFEKNPIDFLEAKGYKEVKKDLIIKLPKYSLFELENGRKRMLASAGELQKGNELALPSKYVNFLYLASHYEKLKGSPEDNEQKQLFVEQHKHYLDEIIEQISEFSKRVILADANLDKVLSAYNKHRDKPIREQAENIIHLFTLTNLGAPAAFKYFDTTIDRKRYTSTKEVLDATLIHQSITGLYETRIDLSQLGGDGGGGSGGGGGLLGRDLLTKLKAQIQFSTEGPQVTWEDRPAMCLVLNLEEEYRLHEKPVPPSIDPSWLQLFPMVWAEKAGMGLANQVPPVVVELKSDASPVAVRQYPMSKEAREGIRPHIQRFLDLGILVPCQSPWNTPLLPVKKPGTNDYRPVQDLREVNKRVQDIHPTVPNPYNLLSSLPPSHTWYSVLDLKDAFFCLKLHPNSQPLFAFEWRDPEKGNTGQLTWTRLPQGFKNSPTLFNEALHRDLASFRALNPQVVMLQYVDDLLVAAPTYRDCKEGTRRLLQELSKLGYRVSAKKAQLCREEVTYLGYLLKGGKRWLTPARKATVMKIPTPTTPRQVREFLGTAGFCRLWIPGFASLAAPLYPLTRPKVPFTWTEAHQEAFGRIKEALLSAPALALPDLTKPFALYVDEKEGVARGVLTQTLGPWRRPVAYLSKKLDPVASGWPTCLKAIAAVALLLKDADKLTLGQNVLVIAPHNLESIVRQPPDRWMTNARMTHYQSLLLNERVSFAPPAILNPATLLPVESDDTPIHICSEILAEETGTRPDLRDQPLPGVPAWYTDGSSFIMDGRRQAGAAIVDNKRTVWASNLPEGTSAQKAELIALTQALRLAEGKSINIYTDSRYAFATAHVHGAIYKQRGWLTSAGKDIKNKEEILALLEAIHLPKRVAIIHCPGHQRGTDPVATGNRKADEAAKQAAQSTRILTETTKNAGKRTADGSEFEKRTADGSEFESPKKKAKVE

SEQ ID NO: 1627 - protein, 2122 aa, synthetic construct
MPAAKRVKLDGGDKKYSIGLDIGTNSVGWAVITDEYKVPSKKFKVLGNTDRHSIKKNLIGALLFDSGETAEATRLKRTARRRYTRRKNRICYLQEIFSNEMAKVDDSFFHRLEESFLVEEDKKHERHPIFGNIVDEVAYHEKYPTIYHLRKKLVDSTDKADLRLIYLALAHMIKFRGHFLIEGDLNPDNSDVDKLFIQLVQTYNQLFEENPINASGVDAKAILSARLSKSRRLENLIAQLPGEKKNGLFGNLIALSLGLTPNFKSNFDLAEDAKLQLSKDTYDDDLDNLLAQIGDQYADLFLAAKNLSDAILLSDILRVNTEITKAPLSASMIKRYDEHHQDLTLLKALVRQQLPEKYKEIFFDQSKNGYAGYIDGGASQEEFYKFIKPILEKMDGTEELLVKLNREDLLRKQRTFDNGSIPHQIHLGELHAILRRQEDFYPFLKDNREKIEKILTFRIPYYVGPLARGNSRFAWMTRKSEETITPWNFEEVVDKGASAQSFIERMTNFDKNLPNEKVLPKHSLLYEYFTVYNELTKVKYVTEGMRKPAFLSGEQKKAIVDLLFKTNRKVTVKQLKEDYFKKIECFDSVEISGVEDRFNASLGTYHDLLKIIKDKDFLDNEENEDILEDIVLTLTLFEDREMIEERLKTYAHLFDDKVMKQLKRRRYTGWGRLSRKLINGIRDKQSGKTILDFLKSDGFANRNFMQLIHDDSLTFKEDIQKAQVSGQGDSLHEHIANLAGSPAIKKGILQTVKVVDELVKVMGRHKPENIVIEMARENQTTQKGQKNSRERMKRIEEGIKELGSQILKEHPVENTQLQNEKLYLYYLQNGRDMYVDQELDINRLSDYDVDHIVPQSFLKDDSIDNKVLTRSDKARGKSDNVPSEEVVKKMKNYWRQLLNAKLITQRKFDNLTKAERGGLSELDKAGFIKRQLVETRQITKHVAQILDSRMNTKYDENDKLIREVKVITLKSKLVSDFRKDFQFYKVREINNYHHAHDAYLNAVVGTALIKKYPKLESEFVYGDYKVYDVRKMIAKSEQEIGKATAKYFFYSNIMNFFKTEITLANGEIRKRPLIETNGETGEIVWDKGRDFATVRKVLSMPQVNIVKKTEVQTGGFSKESILPKRNSDKLIARKKDWDPKKYGGFDSPTVAYSVLVVAKVEKGKSKKLKSVKELLGITIMERSSFEKNPIDFLEAKGYKEVKKDLIIKLPKYSLFELENGRKRMLASAGELQKGNELALPSKYVNFLYLASHYEKLKGSPEDNEQKQLFVEQHKHYLDEIIEQISEFSKRVILADANLDKVLSAYNKHRDKPIREQAENIIHLFTLTNLGAPAAFKYFDTTIDRKRYTSTKEVLDATLIHQSITGLYETRIDLSQLGGDGGPAPGSSGGLLGRDLLTKLKAQIQFSTEGPQVTWEDRPAMCLVLNLEEEYRLHEKPVPPSIDPSWLQLFPMVWAEKAGMGLANQVPPVVVELKSDASPVAVRQYPMSKEAREGIRPHIQRFLDLGILVPCQSPWNTPLLPVKKPGTNDYRPVQDLREVNKRVQDIHPTVPNPYNLLSSLPPSHTWYSVLDLKDAFFCLKLHPNSQPLFAFEWRDPEKGNTGQLTWTRLPQGFKNSPTLFNEALHRDLASFRALNPQVVMLQYVDDLLVAAPTYRDCKEGTRRLLQELSKLGYRVSAKKAQLCREEVTYLGYLLKGGKRWLTPARKATVMKIPTPTTPRQVREFLGTAGFCRLWIPGFASLAAPLYPLTRPKVPFTWTEAHQEAFGRIKEALLSAPALALPDLTKPFALYVDEKEGVARGVLTQTLGPWRRPVAYLSKKLDPVASGWPTCLKAIAAVALLLKDADKLTLGQNVLVIAPHNLESIVRQPPDRWMTNARMTHYQSLLLNERVSFAPPAILNPATLLPVESDDTPIHICSEILAEETGTRPDLRDQPLPGVPAWYTDGSSFIMDGRRQAGAAIVDNKRTVWASNLPEGTSAQKAELIALTQALRLAEGKSINIYTDSRYAFATAHVHGAIYKQRGWLTSAGKDIKNKEEILALLEAIHLPKRVAIIHCPGHQRGTDPVATGNRKADEAAKQAAQSTRILTETTKNAGKRTADGSEFEKRTADGSEFESPKKKAKVE

SEQ ID NO: 1628 - protein, 2122 aa, synthetic construct
MPAAKRVKLDGGDKKYSIGLDIGTNSVGWAVITDEYKVPSKKFKVLGNTDRHSIKKNLIGALLFDSGETAEATRLKRTARRRYTRRKNRICYLQEIFSNEMAKVDDSFFHRLEESFLVEEDKKHERHPIFGNIVDEVAYHEKYPTIYHLRKKLVDSTDKADLRLIYLALAHMIKFRGHFLIEGDLNPDNSDVDKLFIQLVQTYNQLFEENPINASGVDAKAILSARLSKSRRLENLIAQLPGEKKNGLFGNLIALSLGLTPNFKSNFDLAEDAKLQLSKDTYDDDLDNLLAQIGDQYADLFLAAKNLSDAILLSDILRVNTEITKAPLSASMIKRYDEHHQDLTLLKALVRQQLPEKYKEIFFDQSKNGYAGYIDGGASQEEFYKFIKPILEKMDGTEELLVKLNREDLLRKQRTFDNGSIPHQIHLGELHAILRRQEDFYPFLKDNREKIEKILTFRIPYYVGPLARGNSRFAWMTRKSEETITPWNFEEVVDKGASAQSFIERMTNFDKNLPNEKVLPKHSLLYEYFTVYNELTKVKYVTEGMRKPAFLSGEQKKAIVDLLFKTNRKVTVKQLKEDYFKKIECFDSVEISGVEDRFNASLGTYHDLLKIIKDKDFLDNEENEDILEDIVLTLTLFEDREMIEERLKTYAHLFDDKVMKQLKRRRYTGWGRLSRKLINGIRDKQSGKTILDFLKSDGFANRNFMQLIHDDSLTFKEDIQKAQVSGQGDSLHEHIANLAGSPAIKKGILQTVKVVDELVKVMGRHKPENIVIEMARENQTTQKGQKNSRERMKRIEEGIKELGSQILKEHPVENTQLQNEKLYLYYLQNGRDMYVDQELDINRLSDYDVDHIVPQSFLKDDSIDNKVLTRSDKARGKSDNVPSEEVVKKMKNYWRQLLNAKLITQRKFDNLTKAERGGLSELDKAGFIKRQLVETRQITKHVAQILDSRMNTKYDENDKLIREVKVITLKSKLVSDFRKDFQFYKVREINNYHHAHDAYLNAVVGTALIKKYPKLESEFVYGDYKVYDVRKMIAKSEQEIGKATAKYFFYSNIMNFFKTEITLANGEIRKRPLIETNGETGEIVWDKGRDFATVRKVLSMPQVNIVKKTEVQTGGFSKESILPKRNSDKLIARKKDWDPKKYGGFDSPTVAYSVLVVAKVEKGKSKKLKSVKELLGITIMERSSFEKNPIDFLEAKGYKEVKKDLIIKLPKYSLFELENGRKRMLASAGELQKGNELALPSKYVNFLYLASHYEKLKGSPEDNEQKQLFVEQHKHYLDEIIEQISEFSKRVILADANLDKVLSAYNKHRDKPIREQAENIIHLFTLTNLGAPAAFKYFDTTIDRKRYTSTKEVLDATLIHQSITGLYETRIDLSQLGGDGGGGGGGGGGLLGRDLLTKLKAQIQFSTEGPQVTWEDRPAMCLVLNLEEEYRLHEKPVPPSIDPSWLQLFPMVWAEKAGMGLANQVPPVVVELKSDASPVAVRQYPMSKEAREGIRPHIQRFLDLGILVPCQSPWNTPLLPVKKPGTNDYRPVQDLREVNKRVQDIHPTVPNPYNLLSSLPPSHTWYSVLDLKDAFFCLKLHPNSQPLFAFEWRDPEKGNTGQLTWTRLPQGFKNSPTLFNEALHRDLASFRALNPQVVMLQYVDDLLVAAPTYRDCKEGTRRLLQELSKLGYRVSAKKAQLCREEVTYLGYLLKGGKRWLTPARKATVMKIPTPTTPRQVREFLGTAGFCRLWIPGFASLAAPLYPLTRPKVPFTWTEAHQEAFGRIKEALLSAPALALPDLTKPFALYVDEKEGVARGVLTQTLGPWRRPVAYLSKKLDPVASGWPTCLKAIAAVALLLKDADKLTLGQNVLVIAPHNLESIVRQPPDRWMTNARMTHYQSLLLNERVSFAPPAILNPATLLPVESDDTPIHICSEILAEETGTRPDLRDQPLPGVPAWYTDGSSFIMDGRRQAGAAIVDNKRTVWASNLPEGTSAQKAELIALTQALRLAEGKSINIYTDSRYAFATAHVHGAIYKQRGWLTSAGKDIKNKEEILALLEAIHLPKRVAIIHCPGHQRGTDPVATGNRKADEAAKQAAQSTRILTETTKNAGKRTADGSEFEKRTADGSEFESPKKKAKVE

SEQ ID NO: 1629 - protein, 2124 aa, synthetic construct
MPAAKRVKLDGGDKKYSIGLDIGTNSVGWAVITDEYKVPSKKFKVLGNTDRHSIKKNLIGALLFDSGETAEATRLKRTARRRYTRRKNRICYLQEIFSNEMAKVDDSFFHRLEESFLVEEDKKHERHPIFGNIVDEVAYHEKYPTIYHLRKKLVDSTDKADLRLIYLALAHMIKFRGHFLIEGDLNPDNSDVDKLFIQLVQTYNQLFEENPINASGVDAKAILSARLSKSRRLENLIAQLPGEKKNGLFGNLIALSLGLTPNFKSNFDLAEDAKLQLSKDTYDDDLDNLLAQIGDQYADLFLAAKNLSDAILLSDILRVNTEITKAPLSASMIKRYDEHHQDLTLLKALVRQQLPEKYKEIFFDQSKNGYAGYIDGGASQEEFYKFIKPILEKMDGTEELLVKLNREDLLRKQRTFDNGSIPHQIHLGELHAILRRQEDFYPFLKDNREKIEKILTFRIPYYVGPLARGNSRFAWMTRKSEETITPWNFEEVVDKGASAQSFIERMTNFDKNLPNEKVLPKHSLLYEYFTVYNELTKVKYVTEGMRKPAFLSGEQKKAIVDLLFKTNRKVTVKQLKEDYFKKIECFDSVEISGVEDRFNASLGTYHDLLKIIKDKDFLDNEENEDILEDIVLTLTLFEDREMIEERLKTYAHLFDDKVMKQLKRRRYTGWGRLSRKLINGIRDKQSGKTILDFLKSDGFANRNFMQLIHDDSLTFKEDIQKAQVSGQGDSLHEHIANLAGSPAIKKGILQTVKVVDELVKVMGRHKPENIVIEMARENQTTQKGQKNSRERMKRIEEGIKELGSQILKEHPVENTQLQNEKLYLYYLQNGRDMYVDQELDINRLSDYDVDHIVPQSFLKDDSIDNKVLTRSDKARGKSDNVPSEEVVKKMKNYWRQLLNAKLITQRKFDNLTKAERGGLSELDKAGFIKRQLVETRQITKHVAQILDSRMNTKYDENDKLIREVKVITLKSKLVSDFRKDFQFYKVREINNYHHAHDAYLNAVVGTALIKKYPKLESEFVYGDYKVYDVRKMIAKSEQEIGKATAKYFFYSNIMNFFKTEITLANGEIRKRPLIETNGETGEIVWDKGRDFATVRKVLSMPQVNIVKKTEVQTGGFSKESILPKRNSDKLIARKKDWDPKKYGGFDSPTVAYSVLVVAKVEKGKSKKLKSVKELLGITIMERSSFEKNPIDFLEAKGYKEVKKDLIIKLPKYSLFELENGRKRMLASAGELQKGNELALPSKYVNFLYLASHYEKLKGSPEDNEQKQLFVEQHKHYLDEIIEQISEFSKRVILADANLDKVLSAYNKHRDKPIREQAENIIHLFTLTNLGAPAAFKYFDTTIDRKRYTSTKEVLDATLIHQSITGLYETRIDLSQLGGDGGGGGEAAAKGGLLGRDLLTKLKAQIQFSTEGPQVTWEDRPAMCLVLNLEEEYRLHEKPVPPSIDPSWLQLFPMVWAEKAGMGLANQVPPVVVELKSDASPVAVRQYPMSKEAREGIRPHIQRFLDLGILVPCQSPWNTPLLPVKKPGTNDYRPVQDLREVNKRVQDIHPTVPNPYNLLSSLPPSHTWYSVLDLKDAFFCLKLHPNSQPLFAFEWRDPEKGNTGQLTWTRLPQGFKNSPTLFNEALHRDLASFRALNPQVVMLQYVDDLLVAAPTYRDCKEGTRRLLQELSKLGYRVSAKKAQLCREEVTYLGYLLKGGKRWLTPARKATVMKIPTPTTPRQVREFLGTAGFCRLWIPGFASLAAPLYPLTRPKVPFTWTEAHQEAFGRIKEALLSAPALALPDLTKPFALYVDEKEGVARGVLTQTLGPWRRPVAYLSKKLDPVASGWPTCLKAIAAVALLLKDADKLTLGQNVLVIAPHNLESIVRQPPDRWMTNARMTHYQSLLLNERVSFAPPAILNPATLLPVESDDTPIHICSEILAEETGTRPDLRDQPLPGVPAWYTDGSSFIMDGRRQAGAAIVDNKRTVWASNLPEGTSAQKAELIALTQALRLAEGKSINIYTDSRYAFATAHVHGAIYKQRGWLTSAGKDIKNKEEILALLEAIHLPKRVAIIHCPGHQRGTDPVATGNRKADEAAKQAAQSTRILTETTKNAGKRTADGSEFEKRTADGSEFESPKKKAKVE

SEQ ID NO: 1630 - protein, 2124 aa, synthetic construct
MPAAKRVKLDGGDKKYSIGLDIGTNSVGWAVITDEYKVPSKKFKVLGNTDRHSIKKNLIGALLFDSGETAEATRLKRTARRRYTRRKNRICYLQEIFSNEMAKVDDSFFHRLEESFLVEEDKKHERHPIFGNIVDEVAYHEKYPTIYHLRKKLVDSTDKADLRLIYLALAHMIKFRGHFLIEGDLNPDNSDVDKLFIQLVQTYNQLFEENPINASGVDAKAILSARLSKSRRLENLIAQLPGEKKNGLFGNLIALSLGLTPNFKSNFDLAEDAKLQLSKDTYDDDLDNLLAQIGDQYADLFLAAKNLSDAILLSDILRVNTEITKAPLSASMIKRYDEHHQDLTLLKALVRQQLPEKYKEIFFDQSKNGYAGYIDGGASQEEFYKFIKPILEKMDGTEELLVKLNREDLLRKQRTFDNGSIPHQIHLGELHAILRRQEDFYPFLKDNREKIEKILTFRIPYYVGPLARGNSRFAWMTRKSEETITPWNFEEVVDKGASAQSFIERMTNFDKNLPNEKVLPKHSLLYEYFTVYNELTKVKYVTEGMRKPAFLSGEQKKAIVDLLFKTNRKVTVKQLKEDYFKKIECFDSVEISGVEDRFNASLGTYHDLLKIIKDKDFLDNEENEDILEDIVLTLTLFEDREMIEERLKTYAHLFDDKVMKQLKRRRYTGWGRLSRKLINGIRDKQSGKTILDFLKSDGFANRNFMQLIHDDSLTFKEDIQKAQVSGQGDSLHEHIANLAGSPAIKKGILQTVKVVDELVKVMGRHKPENIVIEMARENQTTQKGQKNSRERMKRIEEGIKELGSQILKEHPVENTQLQNEKLYLYYLQNGRDMYVDQELDINRLSDYDVDHIVPQSFLKDDSIDNKVLTRSDKARGKSDNVPSEEVVKKMKNYWRQLLNAKLITQRKFDNLTKAERGGLSELDKAGFIKRQLVETRQITKHVAQILDSRMNTKYDENDKLIREVKVITLKSKLVSDFRKDFQFYKVREINNYHHAHDAYLNAVVGTALIKKYPKLESEFVYGDYKVYDVRKMIAKSEQEIGKATAKYFFYSNIMNFFKTEITLANGEIRKRPLIETNGETGEIVWDKGRDFATVRKVLSMPQVNIVKKTEVQTGGFSKESILPKRNSDKLIARKKDWDPKKYGGFDSPTVAYSVLVVAKVEKGKSKKLKSVKELLGITIMERSSFEKNPIDFLEAKGYKEVKKDLIIKLPKYSLFELENGRKRMLASAGELQKGNELALPSKYVNFLYLASHYEKLKGSPEDNEQKQLFVEQHKHYLDEIIEQISEFSKRVILADANLDKVLSAYNKHRDKPIREQAENIIHLFTLTNLGAPAAFKYFDTTIDRKRYTSTKEVLDATLIHQSITGLYETRIDLSQLGGDGGEAAAKGSSGGLLGRDLLTKLKAQIQFSTEGPQVTWEDRPAMCLVLNLEEEYRLHEKPVPPSIDPSWLQLFPMVWAEKAGMGLANQVPPVVVELKSDASPVAVRQYPMSKEAREGIRPHIQRFLDLGILVPCQSPWNTPLLPVKKPGTNDYRPVQDLREVNKRVQDIHPTVPNPYNLLSSLPPSHTWYSVLDLKDAFFCLKLHPNSQPLFAFEWRDPEKGNTGQLTWTRLPQGFKNSPTLFNEALHRDLASFRALNPQVVMLQYVDDLLVAAPTYRDCKEGTRRLLQELSKLGYRVSAKKAQLCREEVTYLGYLLKGGKRWLTPARKATVMKIPTPTTPRQVREFLGTAGFCRLWIPGFASLAAPLYPLTRPKVPFTWTEAHQEAFGRIKEALLSAPALALPDLTKPFALYVDEKEGVARGVLTQTLGPWRRPVAYLSKKLDPVASGWPTCLKAIAAVALLLKDADKLTLGQNVLVIAPHNLESIVRQPPDRWMTNARMTHYQSLLLNERVSFAPPAILNPATLLPVESDDTPIHICSEILAEETGTRPDLRDQPLPGVPAWYTDGSSFIMDGRRQAGAAIVDNKRTVWASNLPEGTSAQKAELIALTQALRLAEGKSINIYTDSRYAFATAHVHGAIYKQRGWLTSAGKDIKNKEEILALLEAIHLPKRVAIIHCPGHQRGTDPVATGNRKADEAAKQAAQSTRILTETTKNAGKRTADGSEFEKRTADGSEFESPKKKAKVE

SEQ ID NO: 1631 - protein, 2119 aa, synthetic construct
MPAAKRVKLDGGDKKYSIGLDIGTNSVGWAVITDEYKVPSKKFKVLGNTDRHSIKKNLIGALLFDSGETAEATRLKRTARRRYTRRKNRICYLQEIFSNEMAKVDDSFFHRLEESFLVEEDKKHERHPIFGNIVDEVAYHEKYPTIYHLRKKLVDSTDKADLRLIYLALAHMIKFRGHFLIEGDLNPDNSDVDKLFIQLVQTYNQLFEENPINASGVDAKAILSARLSKSRRLENLIAQLPGEKKNGLFGNLIALSLGLTPNFKSNFDLAEDAKLQLSKDTYDDDLDNLLAQIGDQYADLFLAAKNLSDAILLSDILRVNTEITKAPLSASMIKRYDEHHQDLTLLKALVRQQLPEKYKEIFFDQSKNGYAGYIDGGASQEEFYKFIKPILEKMDGTEELLVKLNREDLLRKQRTFDNGSIPHQIHLGELHAILRRQEDFYPFLKDNREKIEKILTFRIPYYVGPLARGNSRFAWMTRKSEETITPWNFEEVVDKGASAQSFIERMTNFDKNLPNEKVLPKHSLLYEYFTVYNELTKVKYVTEGMRKPAFLSGEQKKAIVDLLFKTNRKVTVKQLKEDYFKKIECFDSVEISGVEDRFNASLGTYHDLLKIIKDKDFLDNEENEDILEDIVLTLTLFEDREMIEERLKTYAHLFDDKVMKQLKRRRYTGWGRLSRKLINGIRDKQSGKTILDFLKSDGFANRNFMQLIHDDSLTFKEDIQKAQVSGQGDSLHEHIANLAGSPAIKKGILQTVKVVDELVKVMGRHKPENIVIEMARENQTTQKGQKNSRERMKRIEEGIKELGSQILKEHPVENTQLQNEKLYLYYLQNGRDMYVDQELDINRLSDYDVDHIVPQSFLKDDSIDNKVLTRSDKARGKSDNVPSEEVVKKMKNYWRQLLNAKLITQRKFDNLTKAERGGLSELDKAGFIKRQLVETRQITKHVAQILDSRMNTKYDENDKLIREVKVITLKSKLVSDFRKDFQFYKVREINNYHHAHDAYLNAVVGTALIKKYPKLESEFVYGDYKVYDVRKMIAKSEQEIGKATAKYFFYSNIMNFFKTEITLANGEIRKRPLIETNGETGEIVWDKGRDFATVRKVLSMPQVNIVKKTEVQTGGFSKESILPKRNSDKLIARKKDWDPKKYGGFDSPTVAYSVLVVAKVEKGKSKKLKSVKELLGITIMERSSFEKNPIDFLEAKGYKEVKKDLIIKLPKYSLFELENGRKRMLASAGELQKGNELALPSKYVNFLYLASHYEKLKGSPEDNEQKQLFVEQHKHYLDEIIEQISEFSKRVILADANLDKVLSAYNKHRDKPIREQAENIIHLFTLTNLGAPAAFKYFDTTIDRKRYTSTKEVLDATLIHQSITGLYETRIDLSQLGGDGGPAPGGLLGRDLLTKLKAQIQFSTEGPQVTWEDRPAMCLVLNLEEEYRLHEKPVPPSIDPSWLQLFPMVWAEKAGMGLANQVPPVVVELKSDASPVAVRQYPMSKEAREGIRPHIQRFLDLGILVPCQSPWNTPLLPVKKPGTNDYRPVQDLREVNKRVQDIHPTVPNPYNLLSSLPPSHTWYSVLDLKDAFFCLKLHPNSQPLFAFEWRDPEKGNTGQLTWTRLPQGFKNSPTLFNEALHRDLASFRALNPQVVMLQYVDDLLVAAPTYRDCKEGTRRLLQELSKLGYRVSAKKAQLCREEVTYLGYLLKGGKRWLTPARKATVMKIPTPTTPRQVREFLGTAGFCRLWIPGFASLAAPLYPLTRPKVPFTWTEAHQEAFGRIKEALLSAPALALPDLTKPFALYVDEKEGVARGVLTQTLGPWRRPVAYLSKKLDPVASGWPTCLKAIAAVALLLKDADKLTLGQNVLVIAPHNLESIVRQPPDRWMTNARMTHYQSLLLNERVSFAPPAILNPATLLPVESDDTPIHICSEILAEETGTRPDLRDQPLPGVPAWYTDGSSFIMDGRRQAGAAIVDNKRTVWASNLPEGTSAQKAELIALTQALRLAEGKSINIYTDSRYAFATAHVHGAIYKQRGWLTSAGKDIKNKEEILALLEAIHLPKRVAIIHCPGHQRGTDPVATGNRKADEAAKQAAQSTRILTETTKNAGKRTADGSEFEKRTADGSEFESPKKKAKVE

SEQ ID NO: 1632 - protein, 2141 aa, synthetic construct
MPAAKRVKLDGGDKKYSIGLDIGTNSVGWAVITDEYKVPSKKFKVLGNTDRHSIKKNLIGALLFDSGETAEATRLKRTARRRYTRRKNRICYLQEIFSNEMAKVDDSFFHRLEESFLVEEDKKHERHPIFGNIVDEVAYHEKYPTIYHLRKKLVDSTDKADLRLIYLALAHMIKFRGHFLIEGDLNPDNSDVDKLFIQLVQTYNQLFEENPINASGVDAKAILSARLSKSRRLENLIAQLPGEKKNGLFGNLIALSLGLTPNFKSNFDLAEDAKLQLSKDTYDDDLDNLLAQIGDQYADLFLAAKNLSDAILLSDILRVNTEITKAPLSASMIKRYDEHHQDLTLLKALVRQQLPEKYKEIFFDQSKNGYAGYIDGGASQEEFYKFIKPILEKMDGTEELLVKLNREDLLRKQRTFDNGSIPHQIHLGELHAILRRQEDFYPFLKDNREKIEKILTFRIPYYVGPLARGNSRFAWMTRKSEETITPWNFEEVVDKGASAQSFIERMTNFDKNLPNEKVLPKHSLLYEYFTVYNELTKVKYVTEGMRKPAFLSGEQKKAIVDLLFKTNRKVTVKQLKEDYFKKIECFDSVEISGVEDRFNASLGTYHDLLKIIKDKDFLDNEENEDILEDIVLTLTLFEDREMIEERLKTYAHLFDDKVMKQLKRRRYTGWGRLSRKLINGIRDKQSGKTILDFLKSDGFANRNFMQLIHDDSLTFKEDIQKAQVSGQGDSLHEHIANLAGSPAIKKGILQTVKVVDELVKVMGRHKPENIVIEMARENQTTQKGQKNSRERMKRIEEGIKELGSQILKEHPVENTQLQNEKLYLYYLQNGRDMYVDQELDINRLSDYDVDHIVPQSFLKDDSIDNKVLTRSDKARGKSDNVPSEEVVKKMKNYWRQLLNAKLITQRKFDNLTKAERGGLSELDKAGFIKRQLVETRQITKHVAQILDSRMNTKYDENDKLIREVKVITLKSKLVSDFRKDFQFYKVREINNYHHAHDAYLNAVVGTALIKKYPKLESEFVYGDYKVYDVRKMIAKSEQEIGKATAKYFFYSNIMNFFKTEITLANGEIRKRPLIETNGETGEIVWDKGRDFATVRKVLSMPQVNIVKKTEVQTGGFSKESILPKRNSDKLIARKKDWDPKKYGGFDSPTVAYSVLVVAKVEKGKSKKLKSVKELLGITIMERSSFEKNPIDFLEAKGYKEVKKDLIIKLPKYSLFELENGRKRMLASAGELQKGNELALPSKYVNFLYLASHYEKLKGSPEDNEQKQLFVEQHKHYLDEIIEQISEFSKRVILADANLDKVLSAYNKHRDKPIREQAENIIHLFTLTNLGAPAAFKYFDTTIDRKRYTSTKEVLDATLIHQSITGLYETRIDLSQLGGDGGEAAAKEAAAKEAAAKEAAAKEAAAKGGLLGRDLLTKLKAQIQFSTEGPQVTWEDRPAMCLVLNLEEEYRLHEKPVPPSIDPSWLQLFPMVWAEKAGMGLANQVPPVVVELKSDASPVAVRQYPMSKEAREGIRPHIQRFLDLGILVPCQSPWNTPLLPVKKPGTNDYRPVQDLREVNKRVQDIHPTVPNPYNLLSSLPPSHTWYSVLDLKDAFFCLKLHPNSQPLFAFEWRDPEKGNTGQLTWTRLPQGFKNSPTLFNEALHRDLASFRALNPQVVMLQYVDDLLVAAPTYRDCKEGTRRLLQELSKLGYRVSAKKAQLCREEVTYLGYLLKGGKRWLTPARKATVMKIPTPTTPRQVREFLGTAGFCRLWIPGFASLAAPLYPLTRPKVPFTWTEAHQEAFGRIKEALLSAPALALPDLTKPFALYVDEKEGVARGVLTQTLGPWRRPVAYLSKKLDPVASGWPTCLKAIAAVALLLKDADKLTLGQNVLVIAPHNLESIVRQPPDRWMTNARMTHYQSLLLNERVSFAPPAILNPATLLPVESDDTPIHICSEILAEETGTRPDLRDQPLPGVPAWYTDGSSFIMDGRRQAGAAIVDNKRTVWASNLPEGTSAQKAELIALTQALRLAEGKSINIYTDSRYAFATAHVHGAIYKQRGWLTSAGKDIKNKEEILALLEAIHLPKRVAIIHCPGHQRGTDPVATGNRKADEAAKQAAQSTRILTETTKNAGKRTADGSEFEKRTADGSEFESPKKKAKVE

SEQ ID NO: 1633 - protein, 2122 aa, synthetic construct
MPAAKRVKLDGGDKKYSIGLDIGTNSVGWAVITDEYKVPSKKFKVLGNTDRHSIKKNLIGALLFDSGETAEATRLKRTARRRYTRRKNRICYLQEIFSNEMAKVDDSFFHRLEESFLVEEDKKHERHPIFGNIVDEVAYHEKYPTIYHLRKKLVDSTDKADLRLIYLALAHMIKFRGHFLIEGDLNPDNSDVDKLFIQLVQTYNQLFEENPINASGVDAKAILSARLSKSRRLENLIAQLPGEKKNGLFGNLIALSLGLTPNFKSNFDLAEDAKLQLSKDTYDDDLDNLLAQIGDQYADLFLAAKNLSDAILLSDILRVNTEITKAPLSASMIKRYDEHHQDLTLLKALVRQQLPEKYKEIFFDQSKNGYAGYIDGGASQEEFYKFIKPILEKMDGTEELLVKLNREDLLRKQRTFDNGSIPHQIHLGELHAILRRQEDFYPFLKDNREKIEKILTFRIPYYVGPLARGNSRFAWMTRKSEETITPWNFEEVVDKGASAQSFIERMTNFDKNLPNEKVLPKHSLLYEYFTVYNELTKVKYVTEGMRKPAFLSGEQKKAIVDLLFKTNRKVTVKQLKEDYFKKIECFDSVEISGVEDRFNASLGTYHDLLKIIKDKDFLDNEENEDILEDIVLTLTLFEDREMIEERLKTYAHLFDDKVMKQLKRRRYTGWGRLSRKLINGIRDKQSGKTILDFLKSDGFANRNFMQLIHDDSLTFKEDIQKAQVSGQGDSLHEHIANLAGSPAIKKGILQTVKVVDELVKVMGRHKPENIVIEMARENQTTQKGQKNSRERMKRIEEGIKELGSQILKEHPVENTQLQNEKLYLYYLQNGRDMYVDQELDINRLSDYDVDHIVPQSFLKDDSIDNKVLTRSDKARGKSDNVPSEEVVKKMKNYWRQLLNAKLITQRKFDNLTKAERGGLSELDKAGFIKRQLVETRQITKHVAQILDSRMNTKYDENDKLIREVKVITLKSKLVSDFRKDFQFYKVREINNYHHAHDAYLNAVVGTALIKKYPKLESEFVYGDYKVYDVRKMIAKSEQEIGKATAKYFFYSNIMNFFKTEITLANGEIRKRPLIETNGETGEIVWDKGRDFATVRKVLSMPQVNIVKKTEVQTGGFSKESILPKRNSDKLIARKKDWDPKKYGGFDSPTVAYSVLVVAKVEKGKSKKLKSVKELLGITIMERSSFEKNPIDFLEAKGYKEVKKDLIIKLPKYSLFELENGRKRMLASAGELQKGNELALPSKYVNFLYLASHYEKLKGSPEDNEQKQLFVEQHKHYLDEIIEQISEFSKRVILADANLDKVLSAYNKHRDKPIREQAENIIHLFTLTNLGAPAAFKYFDTTIDRKRYTSTKEVLDATLIHQSITGLYETRIDLSQLGGDGGGGGPAPGGLLGRDLLTKLKAQIQFSTEGPQVTWEDRPAMCLVLNLEEEYRLHEKPVPPSIDPSWLQLFPMVWAEKAGMGLANQVPPVVVELKSDASPVAVRQYPMSKEAREGIRPHIQRFLDLGILVPCQSPWNTPLLPVKKPGTNDYRPVQDLREVNKRVQDIHPTVPNPYNLLSSLPPSHTWYSVLDLKDAFFCLKLHPNSQPLFAFEWRDPEKGNTGQLTWTRLPQGFKNSPTLFNEALHRDLASFRALNPQVVMLQYVDDLLVAAPTYRDCKEGTRRLLQELSKLGYRVSAKKAQLCREEVTYLGYLLKGGKRWLTPARKATVMKIPTPTTPRQVREFLGTAGFCRLWIPGFASLAAPLYPLTRPKVPFTWTEAHQEAFGRIKEALLSAPALALPDLTKPFALYVDEKEGVARGVLTQTLGPWRRPVAYLSKKLDPVASGWPTCLKAIAAVALLLKDADKLTLGQNVLVIAPHNLESIVRQPPDRWMTNARMTHYQSLLLNERVSFAPPAILNPATLLPVESDDTPIHICSEILAEETGTRPDLRDQPLPGVPAWYTDGSSFIMDGRRQAGAAIVDNKRTVWASNLPEGTSAQKAELIALTQALRLAEGKSINIYTDSRYAFATAHVHGAIYKQRGWLTSAGKDIKNKEEILALLEAIHLPKRVAIIHCPGHQRGTDPVATGNRKADEAAKQAAQSTRILTETTKNAGKRTADGSEFEKRTADGSEFESPKKKAKVE

SEQ ID NO: 1634 - protein, 2127 aa, synthetic construct
MPAAKRVKLDGGDKKYSIGLDIGTNSVGWAVITDEYKVPSKKFKVLGNTDRHSIKKNLIGALLFDSGETAEATRLKRTARRRYTRRKNRICYLQEIFSNEMAKVDDSFFHRLEESFLVEEDKKHERHPIFGNIVDEVAYHEKYPTIYHLRKKLVDSTDKADLRLIYLALAHMIKFRGHFLIEGDLNPDNSDVDKLFIQLVQTYNQLFEENPINASGVDAKAILSARLSKSRRLENLIAQLPGEKKNGLFGNLIALSLGLTPNFKSNFDLAEDAKLQLSKDTYDDDLDNLLAQIGDQYADLFLAAKNLSDAILLSDILRVNTEITKAPLSASMIKRYDEHHQDLTLLKALVRQQLPEKYKEIFFDQSKNGYAGYIDGGASQEEFYKFIKPILEKMDGTEELLVKLNREDLLRKQRTFDNGSIPHQIHLGELHAILRRQEDFYPFLKDNREKIEKILTFRIPYYVGPLARGNSRFAWMTRKSEETITPWNFEEVVDKGASAQSFIERMTNFDKNLPNEKVLPKHSLLYEYFTVYNELTKVKYVTEGMRKPAFLSGEQKKAIVDLLFKTNRKVTVKQLKEDYFKKIECFDSVEISGVEDRFNASLGTYHDLLKIIKDKDFLDNEENEDILEDIVLTLTLFEDREMIEERLKTYAHLFDDKVMKQLKRRRYTGWGRLSRKLINGIRDKQSGKTILDFLKSDGFANRNFMQLIHDDSLTFKEDIQKAQVSGQGDSLHEHIANLAGSPAIKKGILQTVKVVDELVKVMGRHKPENIVIEMARENQTTQKGQKNSRERMKRIEEGIKELGSQILKEHPVENTQLQNEKLYLYYLQNGRDMYVDQELDINRLSDYDVDHIVPQSFLKDDSIDNKVLTRSDKARGKSDNVPSEEVVKKMKNYWRQLLNAKLITQRKFDNLTKAERGGLSELDKAGFIKRQLVETRQITKHVAQILDSRMNTKYDENDKLIREVKVITLKSKLVSDFRKDFQFYKVREINNYHHAHDAYLNAVVGTALIKKYPKLESEFVYGDYKVYDVRKMIAKSEQEIGKATAKYFFYSNIMNFFKTEITLANGEIRKRPLIETNGETGEIVWDKGRDFATVRKVLSMPQVNIVKKTEVQTGGFSKESILPKRNSDKLIARKKDWDPKKYGGFDSPTVAYSVLVVAKVEKGKSKKLKSVKELLGITIMERSSFEKNPIDFLEAKGYKEVKKDLIIKLPKYSLFELENGRKRMLASAGELQKGNELALPSKYVNFLYLASHYEKLKGSPEDNEQKQLFVEQHKHYLDEIIEQISEFSKRVILADANLDKVLSAYNKHRDKPIREQAENIIHLFTLTNLGAPAAFKYFDTTIDRKRYTSTKEVLDATLIHQSITGLYETRIDLSQLGGDGGGSSEAAAKGGGGGLLGRDLLTKLKAQIQFSTEGPQVTWEDRPAMCLVLNLEEEYRLHEKPVPPSIDPSWLQLFPMVWAEKAGMGLANQVPPVVVELKSDASPVAVRQYPMSKEAREGIRPHIQRFLDLGILVPCQSPWNTPLLPVKKPGTNDYRPVQDLREVNKRVQDIHPTVPNPYNLLSSLPPSHTWYSVLDLKDAFFCLKLHPNSQPLFAFEWRDPEKGNTGQLTWTRLPQGFKNSPTLFNEALHRDLASFRALNPQVVMLQYVDDLLVAAPTYRDCKEGTRRLLQELSKLGYRVSAKKAQLCREEVTYLGYLLKGGKRWLTPARKATVMKIPTPTTPRQVREFLGTAGFCRLWIPGFASLAAPLYPLTRPKVPFTWTEAHQEAFGRIKEALLSAPALALPDLTKPFALYVDEKEGVARGVLTQTLGPWRRPVAYLSKKLDPVASGWPTCLKAIAAVALLLKDADKLTLGQNVLVIAPHNLESIVRQPPDRWMTNARMTHYQSLLLNERVSFAPPAILNPATLLPVESDDTPIHICSEILAEETGTRPDLRDQPLPGVPAWYTDGSSFIMDGRRQAGAAIVDNKRTVWASNLPEGTSAQKAELIALTQALRLAEGKSINIYTDSRYAFATAHVHGAIYKQRGWLTSAGKDIKNKEEILALLEAIHLPKRVAIIHCPGHQRGTDPVATGNRKADEAAKQAAQSTRILTETTKNAGKRTADGSEFEKRTADGSEFESPKKKAKVE

SEQ ID NO: 1635 - protein, 2131 aa, synthetic construct
MPAAKRVKLDGGDKKYSIGLDIGTNSVGWAVITDEYKVPSKKFKVLGNTDRHSIKKNLIGALLFDSGETAEATRLKRTARRRYTRRKNRICYLQEIFSNEMAKVDDSFFHRLEESFLVEEDKKHERHPIFGNIVDEVAYHEKYPTIYHLRKKLVDSTDKADLRLIYLALAHMIKFRGHFLIEGDLNPDNSDVDKLFIQLVQTYNQLFEENPINASGVDAKAILSARLSKSRRLENLIAQLPGEKKNGLFGNLIALSLGLTPNFKSNFDLAEDAKLQLSKDTYDDDLDNLLAQIGDQYADLFLAAKNLSDAILLSDILRVNTEITKAPLSASMIKRYDEHHQDLTLLKALVRQQLPEKYKEIFFDQSKNGYAGYIDGGASQEEFYKFIKPILEKMDGTEELLVKLNREDLLRKQRTFDNGSIPHQIHLGELHAILRRQEDFYPFLKDNREKIEKILTFRIPYYVGPLARGNSRFAWMTRKSEETITPWNFEEVVDKGASAQSFIERMTNFDKNLPNEKVLPKHSLLYEYFTVYNELTKVKYVTEGMRKPAFLSGEQKKAIVDLLFKTNRKVTVKQLKEDYFKKIECFDSVEISGVEDRFNASLGTYHDLLKIIKDKDFLDNEENEDILEDIVLTLTLFEDREMIEERLKTYAHLFDDKVMKQLKRRRYTGWGRLSRKLINGIRDKQSGKTILDFLKSDGFANRNFMQLIHDDSLTFKEDIQKAQVSGQGDSLHEHIANLAGSPAIKKGILQTVKVVDELVKVMGRHKPENIVIEMARENQTTQKGQKNSRERMKRIEEGIKELGSQILKEHPVENTQLQNEKLYLYYLQNGRDMYVDQELDINRLSDYDVDHIVPQSFLKDDSIDNKVLTRSDKARGKSDNVPSEEVVKKMKNYWRQLLNAKLITQRKFDNLTKAERGGLSELDKAGFIKRQLVETRQITKHVAQILDSRMNTKYDENDKLIREVKVITLKSKLVSDFRKDFQFYKVREINNYHHAHDAYLNAVVGTALIKKYPKLESEFVYGDYKVYDVRKMIAKSEQEIGKATAKYFFYSNIMNFFKTEITLANGEIRKRPLIETNGETGEIVWDKGRDFATVRKVLSMPQVNIVKKTEVQTGGFSKESILPKRNSDKLIARKKDWDPKKYGGFDSPTVAYSVLVVAKVEKGKSKKLKSVKELLGITIMERSSFEKNPIDFLEAKGYKEVKKDLIIKLPKYSLFELENGRKRMLASAGELQKGNELALPSKYVNFLYLASHYEKLKGSPEDNEQKQLFVEQHKHYLDEIIEQISEFSKRVILADANLDKVLSAYNKHRDKPIREQAENIIHLFTLTNLGAPAAFKYFDTTIDRKRYTSTKEVLDATLIHQSITGLYETRIDLSQLGGDGGGGGGSEAAAKGGGGSGGLLGRDLLTKLKAQIQFSTEGPQVTWEDRPAMCLVLNLEEEYRLHEKPVPPSIDPSWLQLFPMVWAEKAGMGLANQVPPVVVELKSDASPVAVRQYPMSKEAREGIRPHIQRFLDLGILVPCQSPWNTPLLPVKKPGTNDYRPVQDLREVNKRVQDIHPTVPNPYNLLSSLPPSHTWYSVLDLKDAFFCLKLHPNSQPLFAFEWRDPEKGNTGQLTWTRLPQGFKNSPTLFNEALHRDLASFRALNPQVVMLQYVDDLLVAAPTYRDCKEGTRRLLQELSKLGYRVSAKKAQLCREEVTYLGYLLKGGKRWLTPARKATVMKIPTPTTPRQVREFLGTAGFCRLWIPGFASLAAPLYPLTRPKVPFTWTEAHQEAFGRIKEALLSAPALALPDLTKPFALYVDEKEGVARGVLTQTLGPWRRPVAYLSKKLDPVASGWPTCLKAIAAVALLLKDADKLTLGQNVLVIAPHNLESIVRQPPDRWMTNARMTHYQSLLLNERVSFAPPAILNPATLLPVESDDTPIHICSEILAEETGTRPDLRDQPLPGVPAWYTDGSSFIMDGRRQAGAAIVDNKRTVWASNLPEGTSAQKAELIALTQALRLAEGKSINIYTDSRYAFATAHVHGAIYKQRGWLTSAGKDIKNKEEILALLEAIHLPKRVAIIHCPGHQRGTDPVATGNRKADEAAKQAAQSTRILTETTKNAGKRTADGSEFEKRTADGSEFESPKKKAKVE

SEQ ID NO: 1636 - protein, 2122 aa, synthetic construct
MPAAKRVKLDGGDKKYSIGLDIGTNSVGWAVITDEYKVPSKKFKVLGNTDRHSIKKNLIGALLFDSGETAEATRLKRTARRRYTRRKNRICYLQEIFSNEMAKVDDSFFHRLEESFLVEEDKKHERHPIFGNIVDEVAYHEKYPTIYHLRKKLVDSTDKADLRLIYLALAHMIKFRGHFLIEGDLNPDNSDVDKLFIQLVQTYNQLFEENPINASGVDAKAILSARLSKSRRLENLIAQLPGEKKNGLFGNLIALSLGLTPNFKSNFDLAEDAKLQLSKDTYDDDLDNLLAQIGDQYADLFLAAKNLSDAILLSDILRVNTEITKAPLSASMIKRYDEHHQDLTLLKALVRQQLPEKYKEIFFDQSKNGYAGYIDGGASQEEFYKFIKPILEKMDGTEELLVKLNREDLLRKQRTFDNGSIPHQIHLGELHAILRRQEDFYPFLKDNREKIEKILTFRIPYYVGPLARGNSRFAWMTRKSEETITPWNFEEVVDKGASAQSFIERMTNFDKNLPNEKVLPKHSLLYEYFTVYNELTKVKYVTEGMRKPAFLSGEQKKAIVDLLFKTNRKVTVKQLKEDYFKKIECFDSVEISGVEDRFNASLGTYHDLLKIIKDKDFLDNEENEDILEDIVLTLTLFEDREMIEERLKTYAHLFDDKVMKQLKRRRYTGWGRLSRKLINGIRDKQSGKTILDFLKSDGFANRNFMQLIHDDSLTFKEDIQKAQVSGQGDSLHEHIANLAGSPAIKKGILQTVKVVDELVKVMGRHKPENIVIEMARENQTTQKGQKNSRERMKRIEEGIKELGSQILKEHPVENTQLQNEKLYLYYLQNGRDMYVDQELDINRLSDYDVDHIVPQSFLKDDSIDNKVLTRSDKARGKSDNVPSEEVVKKMKNYWRQLLNAKLITQRKFDNLTKAERGGLSELDKAGFIKRQLVETRQITKHVAQILDSRMNTKYDENDKLIREVKVITLKSKLVSDFRKDFQFYKVREINNYHHAHDAYLNAVVGTALIKKYPKLESEFVYGDYKVYDVRKMIAKSEQEIGKATAKYFFYSNIMNFFKTEITLANGEIRKRPLIETNGETGEIVWDKGRDFATVRKVLSMPQVNIVKKTEVQTGGFSKESILPKRNSDKLIARKKDWDPKKYGGFDSPTVAYSVLVVAKVEKGKSKKLKSVKELLGITIMERSSFEKNPIDFLEAKGYKEVKKDLIIKLPKYSLFELENGRKRMLASAGELQKGNELALPSKYVNFLYLASHYEKLKGSPEDNEQKQLFVEQHKHYLDEIIEQISEFSKRVILADANLDKVLSAYNKHRDKPIREQAENIIHLFTLTNLGAPAAFKYFDTTIDRKRYTSTKEVLDATLIHQSITGLYETRIDLSQLGGDGGPAPGGSGGLLGRDLLTKLKAQIQFSTEGPQVTWEDRPAMCLVLNLEEEYRLHEKPVPPSIDPSWLQLFPMVWAEKAGMGLANQVPPVVVELKSDASPVAVRQYPMSKEAREGIRPHIQRFLDLGILVPCQSPWNTPLLPVKKPGTNDYRPVQDLREVNKRVQDIHPTVPNPYNLLSSLPPSHTWYSVLDLKDAFFCLKLHPNSQPLFAFEWRDPEKGNTGQLTWTRLPQGFKNSPTLFNEALHRDLASFRALNPQVVMLQYVDDLLVAAPTYRDCKEGTRRLLQELSKLGYRVSAKKAQLCREEVTYLGYLLKGGKRWLTPARKATVMKIPTPTTPRQVREFLGTAGFCRLWIPGFASLAAPLYPLTRPKVPFTWTEAHQEAFGRIKEALLSAPALALPDLTKPFALYVDEKEGVARGVLTQTLGPWRRPVAYLSKKLDPVASGWPTCLKAIAAVALLLKDADKLTLGQNVLVIAPHNLESIVRQPPDRWMTNARMTHYQSLLLNERVSFAPPAILNPATLLPVESDDTPIHICSEILAEETGTRPDLRDQPLPGVPAWYTDGSSFIMDGRRQAGAAIVDNKRTVWASNLPEGTSAQKAELIALTQALRLAEGKSINIYTDSRYAFATAHVHGAIYKQRGWLTSAGKDIKNKEEILALLEAIHLPKRVAIIHCPGHQRGTDPVATGNRKADEAAKQAAQSTRILTETTKNAGKRTADGSEFEKRTADGSEFESPKKKAKVE

SEQ ID NO: 1637 - protein, 2122 aa, synthetic construct
MPAAKRVKLDGGDKKYSIGLDIGTNSVGWAVITDEYKVPSKKFKVLGNTDRHSIKKNLIGALLFDSGETAEATRLKRTARRRYTRRKNRICYLQEIFSNEMAKVDDSFFHRLEESFLVEEDKKHERHPIFGNIVDEVAYHEKYPTIYHLRKKLVDSTDKADLRLIYLALAHMIKFRGHFLIEGDLNPDNSDVDKLFIQLVQTYNQLFEENPINASGVDAKAILSARLSKSRRLENLIAQLPGEKKNGLFGNLIALSLGLTPNFKSNFDLAEDAKLQLSKDTYDDDLDNLLAQIGDQYADLFLAAKNLSDAILLSDILRVNTEITKAPLSASMIKRYDEHHQDLTLLKALVRQQLPEKYKEIFFDQSKNGYAGYIDGGASQEEFYKFIKPILEKMDGTEELLVKLNREDLLRKQRTFDNGSIPHQIHLGELHAILRRQEDFYPFLKDNREKIEKILTFRIPYYVGPLARGNSRFAWMTRKSEETITPWNFEEVVDKGASAQSFIERMTNFDKNLPNEKVLPKHSLLYEYFTVYNELTKVKYVTEGMRKPAFLSGEQKKAIVDLLFKTNRKVTVKQLKEDYFKKIECFDSVEISGVEDRFNASLGTYHDLLKIIKDKDFLDNEENEDILEDIVLTLTLFEDREMIEERLKTYAHLFDDKVMKQLKRRRYTGWGRLSRKLINGIRDKQSGKTILDFLKSDGFANRNFMQLIHDDSLTFKEDIQKAQVSGQGDSLHEHIANLAGSPAIKKGILQTVKVVDELVKVMGRHKPENIVIEMARENQTTQKGQKNSRERMKRIEEGIKELGSQILKEHPVENTQLQNEKLYLYYLQNGRDMYVDQELDINRLSDYDVDHIVPQSFLKDDSIDNKVLTRSDKARGKSDNVPSEEVVKKMKNYWRQLLNAKLITQRKFDNLTKAERGGLSELDKAGFIKRQLVETRQITKHVAQILDSRMNTKYDENDKLIREVKVITLKSKLVSDFRKDFQFYKVREINNYHHAHDAYLNAVVGTALIKKYPKLESEFVYGDYKVYDVRKMIAKSEQEIGKATAKYFFYSNIMNFFKTEITLANGEIRKRPLIETNGETGEIVWDKGRDFATVRKVLSMPQVNIVKKTEVQTGGFSKESILPKRNSDKLIARKKDWDPKKYGGFDSPTVAYSVLVVAKVEKGKSKKLKSVKELLGITIMERSSFEKNPIDFLEAKGYKEVKKDLIIKLPKYSLFELENGRKRMLASAGELQKGNELALPSKYVNFLYLASHYEKLKGSPEDNEQKQLFVEQHKHYLDEIIEQISEFSKRVILADANLDKVLSAYNKHRDKPIREQAENIIHLFTLTNLGAPAAFKYFDTTIDRKRYTSTKEVLDATLIHQSITGLYETRIDLSQLGGDGGGGSGSSGGLLGRDLLTKLKAQIQFSTEGPQVTWEDRPAMCLVLNLEEEYRLHEKPVPPSIDPSWLQLFPMVWAEKAGMGLANQVPPVVVELKSDASPVAVRQYPMSKEAREGIRPHIQRFLDLGILVPCQSPWNTPLLPVKKPGTNDYRPVQDLREVNKRVQDIHPTVPNPYNLLSSLPPSHTWYSVLDLKDAFFCLKLHPNSQPLFAFEWRDPEKGNTGQLTWTRLPQGFKNSPTLFNEALHRDLASFRALNPQVVMLQYVDDLLVAAPTYRDCKEGTRRLLQELSKLGYRVSAKKAQLCREEVTYLGYLLKGGKRWLTPARKATVMKIPTPTTPRQVREFLGTAGFCRLWIPGFASLAAPLYPLTRPKVPFTWTEAHQEAFGRIKEALLSAPALALPDLTKPFALYVDEKEGVARGVLTQTLGPWRRPVAYLSKKLDPVASGWPTCLKAIAAVALLLKDADKLTLGQNVLVIAPHNLESIVRQPPDRWMTNARMTHYQSLLLNERVSFAPPAILNPATLLPVESDDTPIHICSEILAEETGTRPDLRDQPLPGVPAWYTDGSSFIMDGRRQAGAAIVDNKRTVWASNLPEGTSAQKAELIALTQALRLAEGKSINIYTDSRYAFATAHVHGAIYKQRGWLTSAGKDIKNKEEILALLEAIHLPKRVAIIHCPGHQRGTDPVATGNRKADEAAKQAAQSTRILTETTKNAGKRTADGSEFEKRTADGSEFESPKKKAKVE

SEQ ID NO: 1638 - protein, 2131 aa, synthetic construct
MPAAKRVKLDGGDKKYSIGLDIGTNSVGWAVITDEYKVPSKKFKVLGNTDRHSIKKNLIGALLFDSGETAEATRLKRTARRRYTRRKNRICYLQEIFSNEMAKVDDSFFHRLEESFLVEEDKKHERHPIFGNIVDEVAYHEKYPTIYHLRKKLVDSTDKADLRLIYLALAHMIKFRGHFLIEGDLNPDNSDVDKLFIQLVQTYNQLFEENPINASGVDAKAILSARLSKSRRLENLIAQLPGEKKNGLFGNLIALSLGLTPNFKSNFDLAEDAKLQLSKDTYDDDLDNLLAQIGDQYADLFLAAKNLSDAILLSDILRVNTEITKAPLSASMIKRYDEHHQDLTLLKALVRQQLPEKYKEIFFDQSKNGYAGYIDGGASQEEFYKFIKPILEKMDGTEELLVKLNREDLLRKQRTFDNGSIPHQIHLGELHAILRRQEDFYPFLKDNREKIEKILTFRIPYYVGPLARGNSRFAWMTRKSEETITPWNFEEVVDKGASAQSFIERMTNFDKNLPNEKVLPKHSLLYEYFTVYNELTKVKYVTEGMRKPAFLSGEQKKAIVDLLFKTNRKVTVKQLKEDYFKKIECFDSVEISGVEDRFNASLGTYHDLLKIIKDKDFLDNEENEDILEDIVLTLTLFEDREMIEERLKTYAHLFDDKVMKQLKRRRYTGWGRLSRKLINGIRDKQSGKTILDFLKSDGFANRNFMQLIHDDSLTFKEDIQKAQVSGQGDSLHEHIANLAGSPAIKKGILQTVKVVDELVKVMGRHKPENIVIEMARENQTTQKGQKNSRERMKRIEEGIKELGSQILKEHPVENTQLQNEKLYLYYLQNGRDMYVDQELDINRLSDYDVDHIVPQSFLKDDSIDNKVLTRSDKARGKSDNVPSEEVVKKMKNYWRQLLNAKLITQRKFDNLTKAERGGLSELDKAGFIKRQLVETRQITKHVAQILDSRMNTKYDENDKLIREVKVITLKSKLVSDFRKDFQFYKVREINNYHHAHDAYLNAVVGTALIKKYPKLESEFVYGDYKVYDVRKMIAKSEQEIGKATAKYFFYSNIMNFFKTEITLANGEIRKRPLIETNGETGEIVWDKGRDFATVRKVLSMPQVNIVKKTEVQTGGFSKESILPKRNSDKLIARKKDWDPKKYGGFDSPTVAYSVLVVAKVEKGKSKKLKSVKELLGITIMERSSFEKNPIDFLEAKGYKEVKKDLIIKLPKYSLFELENGRKRMLASAGELQKGNELALPSKYVNFLYLASHYEKLKGSPEDNEQKQLFVEQHKHYLDEIIEQISEFSKRVILADANLDKVLSAYNKHRDKPIREQAENIIHLFTLTNLGAPAAFKYFDTTIDRKRYTSTKEVLDATLIHQSITGLYETRIDLSQLGGDGGEAAAKGGGGSEAAAKGGLLGRDLLTKLKAQIQFSTEGPQVTWEDRPAMCLVLNLEEEYRLHEKPVPPSIDPSWLQLFPMVWAEKAGMGLANQVPPVVVELKSDASPVAVRQYPMSKEAREGIRPHIQRFLDLGILVPCQSPWNTPLLPVKKPGTNDYRPVQDLREVNKRVQDIHPTVPNPYNLLSSLPPSHTWYSVLDLKDAFFCLKLHPNSQPLFAFEWRDPEKGNTGQLTWTRLPQGFKNSPTLFNEALHRDLASFRALNPQVVMLQYVDDLLVAAPTYRDCKEGTRRLLQELSKLGYRVSAKKAQLCREEVTYLGYLLKGGKRWLTPARKATVMKIPTPTTPRQVREFLGTAGFCRLWIPGFASLAAPLYPLTRPKVPFTWTEAHQEAFGRIKEALLSAPALALPDLTKPFALYVDEKEGVARGVLTQTLGPWRRPVAYLSKKLDPVASGWPTCLKAIAAVALLLKDADKLTLGQNVLVIAPHNLESIVRQPPDRWMTNARMTHYQSLLLNERVSFAPPAILNPATLLPVESDDTPIHICSEILAEETGTRPDLRDQPLPGVPAWYTDGSSFIMDGRRQAGAAIVDNKRTVWASNLPEGTSAQKAELIALTQALRLAEGKSINIYTDSRYAFATAHVHGAIYKQRGWLTSAGKDIKNKEEILALLEAIHLPKRVAIIHCPGHQRGTDPVATGNRKADEAAKQAAQSTRILTETTKNAGKRTADGSEFEKRTADGSEFESPKKKAKVE

SEQ ID NO: 1639 - protein, 2127 aa, synthetic construct
MPAAKRVKLDGGDKKYSIGLDIGTNSVGWAVITDEYKVPSKKFKVLGNTDRHSIKKNLIGALLFDSGETAEATRLKRTARRRYTRRKNRICYLQEIFSNEMAKVDDSFFHRLEESFLVEEDKKHERHPIFGNIVDEVAYHEKYPTIYHLRKKLVDSTDKADLRLIYLALAHMIKFRGHFLIEGDLNPDNSDVDKLFIQLVQTYNQLFEENPINASGVDAKAILSARLSKSRRLENLIAQLPGEKKNGLFGNLIALSLGLTPNFKSNFDLAEDAKLQLSKDTYDDDLDNLLAQIGDQYADLFLAAKNLSDAILLSDILRVNTEITKAPLSASMIKRYDEHHQDLTLLKALVRQQLPEKYKEIFFDQSKNGYAGYIDGGASQEEFYKFIKPILEKMDGTEELLVKLNREDLLRKQRTFDNGSIPHQIHLGELHAILRRQEDFYPFLKDNREKIEKILTFRIPYYVGPLARGNSRFAWMTRKSEETITPWNFEEVVDKGASAQSFIERMTNFDKNLPNEKVLPKHSLLYEYFTVYNELTKVKYVTEGMRKPAFLSGEQKKAIVDLLFKTNRKVTVKQLKEDYFKKIECFDSVEISGVEDRFNASLGTYHDLLKIIKDKDFLDNEENEDILEDIVLTLTLFEDREMIEERLKTYAHLFDDKVMKQLKRRRYTGWGRLSRKLINGIRDKQSGKTILDFLKSDGFANRNFMQLIHDDSLTFKEDIQKAQVSGQGDSLHEHIANLAGSPAIKKGILQTVKVVDELVKVMGRHKPENIVIEMARENQTTQKGQKNSRERMKRIEEGIKELGSQILKEHPVENTQLQNEKLYLYYLQNGRDMYVDQELDINRLSDYDVDHIVPQSFLKDDSIDNKVLTRSDKARGKSDNVPSEEVVKKMKNYWRQLLNAKLITQRKFDNLTKAERGGLSELDKAGFIKRQLVETRQITKHVAQILDSRMNTKYDENDKLIREVKVITLKSKLVSDFRKDFQFYKVREINNYHHAHDAYLNAVVGTALIKKYPKLESEFVYGDYKVYDVRKMIAKSEQEIGKATAKYFFYSNIMNFFKTEITLANGEIRKRPLIETNGETGEIVWDKGRDFATVRKVLSMPQVNIVKKTEVQTGGFSKESILPKRNSDKLIARKKDWDPKKYGGFDSPTVAYSVLVVAKVEKGKSKKLKSVKELLGITIMERSSFEKNPIDFLEAKGYKEVKKDLIIKLPKYSLFELENGRKRMLASAGELQKGNELALPSKYVNFLYLASHYEKLKGSPEDNEQKQLFVEQHKHYLDEIIEQISEFSKRVILADANLDKVLSAYNKHRDKPIREQAENIIHLFTLTNLGAPAAFKYFDTTIDRKRYTSTKEVLDATLIHQSITGLYETRIDLSQLGGDGGGGGGSSEAAAKGGLLGRDLLTKLKAQIQFSTEGPQVTWEDRPAMCLVLNLEEEYRLHEKPVPPSIDPSWLQLFPMVWAEKAGMGLANQVPPVVVELKSDASPVAVRQYPMSKEAREGIRPHIQRFLDLGILVPCQSPWNTPLLPVKKPGTNDYRPVQDLREVNKRVQDIHPTVPNPYNLLSSLPPSHTWYSVLDLKDAFFCLKLHPNSQPLFAFEWRDPEKGNTGQLTWTRLPQGFKNSPTLFNEALHRDLASFRALNPQVVMLQYVDDLLVAAPTYRDCKEGTRRLLQELSKLGYRVSAKKAQLCREEVTYLGYLLKGGKRWLTPARKATVMKIPTPTTPRQVREFLGTAGFCRLWIPGFASLAAPLYPLTRPKVPFTWTEAHQEAFGRIKEALLSAPALALPDLTKPFALYVDEKEGVARGVLTQTLGPWRRPVAYLSKKLDPVASGWPTCLKAIAAVALLLKDADKLTLGQNVLVIAPHNLESIVRQPPDRWMTNARMTHYQSLLLNERVSFAPPAILNPATLLPVESDDTPIHICSEILAEETGTRPDLRDQPLPGVPAWYTDGSSFIMDGRRQAGAAIVDNKRTVWASNLPEGTSAQKAELIALTQALRLAEGKSINIYTDSRYAFATAHVHGAIYKQRGWLTSAGKDIKNKEEILALLEAIHLPKRVAIIHCPGHQRGTDPVATGNRKADEAAKQAAQSTRILTETTKNAGKRTADGSEFEKRTADGSEFESPKKKAKVE

SEQ ID NO: 1640 - protein, 2127 aa, synthetic construct
MPAAKRVKLDGGDKKYSIGLDIGTNSVGWAVITDEYKVPSKKFKVLGNTDRHSIKKNLIGALLFDSGETAEATRLKRTARRRYTRRKNRICYLQEIFSNEMAKVDDSFFHRLEESFLVEEDKKHERHPIFGNIVDEVAYHEKYPTIYHLRKKLVDSTDKADLRLIYLALAHMIKFRGHFLIEGDLNPDNSDVDKLFIQLVQTYNQLFEENPINASGVDAKAILSARLSKSRRLENLIAQLPGEKKNGLFGNLIALSLGLTPNFKSNFDLAEDAKLQLSKDTYDDDLDNLLAQIGDQYADLFLAAKNLSDAILLSDILRVNTEITKAPLSASMIKRYDEHHQDLTLLKALVRQQLPEKYKEIFFDQSKNGYAGYIDGGASQEEFYKFIKPILEKMDGTEELLVKLNREDLLRKQRTFDNGSIPHQIHLGELHAILRRQEDFYPFLKDNREKIEKILTFRIPYYVGPLARGNSRFAWMTRKSEETITPWNFEEVVDKGASAQSFIERMTNFDKNLPNEKVLPKHSLLYEYFTVYNELTKVKYVTEGMRKPAFLSGEQKKAIVDLLFKTNRKVTVKQLKEDYFKKIECFDSVEISGVEDRFNASLGTYHDLLKIIKDKDFLDNEENEDILEDIVLTLTLFEDREMIEERLKTYAHLFDDKVMKQLKRRRYTGWGRLSRKLINGIRDKQSGKTILDFLKSDGFANRNFMQLIHDDSLTFKEDIQKAQVSGQGDSLHEHIANLAGSPAIKKGILQTVKVVDELVKVMGRHKPENIVIEMARENQTTQKGQKNSRERMKRIEEGIKELGSQILKEHPVENTQLQNEKLYLYYLQNGRDMYVDQELDINRLSDYDVDHIVPQSFLKDDSIDNKVLTRSDKARGKSDNVPSEEVVKKMKNYWRQLLNAKLITQRKFDNLTKAERGGLSELDKAGFIKRQLVETRQITKHVAQILDSRMNTKYDENDKLIREVKVITLKSKLVSDFRKDFQFYKVREINNYHHAHDAYLNAVVGTALIKKYPKLESEFVYGDYKVYDVRKMIAKSEQEIGKATAKYFFYSNIMNFFKTEITLANGEIRKRPLIETNGETGEIVWDKGRDFATVRKVLSMPQVNIVKKTEVQTGGFSKESILPKRNSDKLIARKKDWDPKKYGGFDSPTVAYSVLVVAKVEKGKSKKLKSVKELLGITIMERSSFEKNPIDFLEAKGYKEVKKDLIIKLPKYSLFELENGRKRMLASAGELQKGNELALPSKYVNFLYLASHYEKLKGSPEDNEQKQLFVEQHKHYLDEIIEQISEFSKRVILADANLDKVLSAYNKHRDKPIREQAENIIHLFTLTNLGAPAAFKYFDTTIDRKRYTSTKEVLDATLIHQSITGLYETRIDLSQLGGDGGPAPGGSEAAAKGGLLGRDLLTKLKAQIQFSTEGPQVTWEDRPAMCLVLNLEEEYRLHEKPVPPSIDPSWLQLFPMVWAEKAGMGLANQVPPVVVELKSDASPVAVRQYPMSKEAREGIRPHIQRFLDLGILVPCQSPWNTPLLPVKKPGTNDYRPVQDLREVNKRVQDIHPTVPNPYNLLSSLPPSHTWYSVLDLKDAFFCLKLHPNSQPLFAFEWRDPEKGNTGQLTWTRLPQGFKNSPTLFNEALHRDLASFRALNPQVVMLQYVDDLLVAAPTYRDCKEGTRRLLQELSKLGYRVSAKKAQLCREEVTYLGYLLKGGKRWLTPARKATVMKIPTPTTPRQVREFLGTAGFCRLWIPGFASLAAPLYPLTRPKVPFTWTEAHQEAFGRIKEALLSAPALALPDLTKPFALYVDEKEGVARGVLTQTLGPWRRPVAYLSKKLDPVASGWPTCLKAIAAVALLLKDADKLTLGQNVLVIAPHNLESIVRQPPDRWMTNARMTHYQSLLLNERVSFAPPAILNPATLLPVESDDTPIHICSEILAEETGTRPDLRDQPLPGVPAWYTDGSSFIMDGRRQAGAAIVDNKRTVWASNLPEGTSAQKAELIALTQALRLAEGKSINIYTDSRYAFATAHVHGAIYKQRGWLTSAGKDIKNKEEILALLEAIHLPKRVAIIHCPGHQRGTDPVATGNRKADEAAKQAAQSTRILTETTKNAGKRTADGSEFEKRTADGSEFESPKKKAKVE

SEQ ID NO: 1641 - protein, 2127 aa, synthetic construct
MPAAKRVKLDGGDKKYSIGLDIGTNSVGWAVITDEYKVPSKKFKVLGNTDRHSIKKNLIGALLFDSGETAEATRLKRTARRRYTRRKNRICYLQEIFSNEMAKVDDSFFHRLEESFLVEEDKKHERHPIFGNIVDEVAYHEKYPTIYHLRKKLVDSTDKADLRLIYLALAHMIKFRGHFLIEGDLNPDNSDVDKLFIQLVQTYNQLFEENPINASGVDAKAILSARLSKSRRLENLIAQLPGEKKNGLFGNLIALSLGLTPNFKSNFDLAEDAKLQLSKDTYDDDLDNLLAQIGDQYADLFLAAKNLSDAILLSDILRVNTEITKAPLSASMIKRYDEHHQDLTLLKALVRQQLPEKYKEIFFDQSKNGYAGYIDGGASQEEFYKFIKPILEKMDGTEELLVKLNREDLLRKQRTFDNGSIPHQIHLGELHAILRRQEDFYPFLKDNREKIEKILTFRIPYYVGPLARGNSRFAWMTRKSEETITPWNFEEVVDKGASAQSFIERMTNFDKNLPNEKVLPKHSLLYEYFTVYNELTKVKYVTEGMRKPAFLSGEQKKAIVDLLFKTNRKVTVKQLKEDYFKKIECFDSVEISGVEDRFNASLGTYHDLLKIIKDKDFLDNEENEDILEDIVLTLTLFEDREMIEERLKTYAHLFDDKVMKQLKRRRYTGWGRLSRKLINGIRDKQSGKTILDFLKSDGFANRNFMQLIHDDSLTFKEDIQKAQVSGQGDSLHEHIANLAGSPAIKKGILQTVKVVDELVKVMGRHKPENIVIEMARENQTTQKGQKNSRERMKRIEEGIKELGSQILKEHPVENTQLQNEKLYLYYLQNGRDMYVDQELDINRLSDYDVDHIVPQSFLKDDSIDNKVLTRSDKARGKSDNVPSEEVVKKMKNYWRQLLNAKLITQRKFDNLTKAERGGLSELDKAGFIKRQLVETRQITKHVAQILDSRMNTKYDENDKLIREVKVITLKSKLVSDFRKDFQFYKVREINNYHHAHDAYLNAVVGTALIKKYPKLESEFVYGDYKVYDVRKMIAKSEQEIGKATAKYFFYSNIMNFFKTEITLANGEIRKRPLIETNGETGEIVWDKGRDFATVRKVLSMPQVNIVKKTEVQTGGFSKESILPKRNSDKLIARKKDWDPKKYGGFDSPTVAYSVLVVAKVEKGKSKKLKSVKELLGITIMERSSFEKNPIDFLEAKGYKEVKKDLIIKLPKYSLFELENGRKRMLASAGELQKGNELALPSKYVNFLYLASHYEKLKGSPEDNEQKQLFVEQHKHYLDEIIEQISEFSKRVILADANLDKVLSAYNKHRDKPIREQAENIIHLFTLTNLGAPAAFKYFDTTIDRKRYTSTKEVLDATLIHQSITGLYETRIDLSQLGGDGGPAPEAAAKGGSGGLLGRDLLTKLKAQIQFSTEGPQVTWEDRPAMCLVLNLEEEYRLHEKPVPPSIDPSWLQLFPMVWAEKAGMGLANQVPPVVVELKSDASPVAVRQYPMSKEAREGIRPHIQRFLDLGILVPCQSPWNTPLLPVKKPGTNDYRPVQDLREVNKRVQDIHPTVPNPYNLLSSLPPSHTWYSVLDLKDAFFCLKLHPNSQPLFAFEWRDPEKGNTGQLTWTRLPQGFKNSPTLFNEALHRDLASFRALNPQVVMLQYVDDLLVAAPTYRDCKEGTRRLLQELSKLGYRVSAKKAQLCREEVTYLGYLLKGGKRWLTPARKATVMKIPTPTTPRQVREFLGTAGFCRLWIPGFASLAAPLYPLTRPKVPFTWTEAHQEAFGRIKEALLSAPALALPDLTKPFALYVDEKEGVARGVLTQTLGPWRRPVAYLSKKLDPVASGWPTCLKAIAAVALLLKDADKLTLGQNVLVIAPHNLESIVRQPPDRWMTNARMTHYQSLLLNERVSFAPPAILNPATLLPVESDDTPIHICSEILAEETGTRPDLRDQPLPGVPAWYTDGSSFIMDGRRQAGAAIVDNKRTVWASNLPEGTSAQKAELIALTQALRLAEGKSINIYTDSRYAFATAHVHGAIYKQRGWLTSAGKDIKNKEEILALLEAIHLPKRVAIIHCPGHQRGTDPVATGNRKADEAAKQAAQSTRILTETTKNAGKRTADGSEFEKRTADGSEFESPKKKAKVE

SEQ ID NO: 1642 - protein, 2122 aa, synthetic construct
MPAAKRVKLDGGDKKYSIGLDIGTNSVGWAVITDEYKVPSKKFKVLGNTDRHSIKKNLIGALLFDSGETAEATRLKRTARRRYTRRKNRICYLQEIFSNEMAKVDDSFFHRLEESFLVEEDKKHERHPIFGNIVDEVAYHEKYPTIYHLRKKLVDSTDKADLRLIYLALAHMIKFRGHFLIEGDLNPDNSDVDKLFIQLVQTYNQLFEENPINASGVDAKAILSARLSKSRRLENLIAQLPGEKKNGLFGNLIALSLGLTPNFKSNFDLAEDAKLQLSKDTYDDDLDNLLAQIGDQYADLFLAAKNLSDAILLSDILRVNTEITKAPLSASMIKRYDEHHQDLTLLKALVRQQLPEKYKEIFFDQSKNGYAGYIDGGASQEEFYKFIKPILEKMDGTEELLVKLNREDLLRKQRTFDNGSIPHQIHLGELHAILRRQEDFYPFLKDNREKIEKILTFRIPYYVGPLARGNSRFAWMTRKSEETITPWNFEEVVDKGASAQSFIERMTNFDKNLPNEKVLPKHSLLYEYFTVYNELTKVKYVTEGMRKPAFLSGEQKKAIVDLLFKTNRKVTVKQLKEDYFKKIECFDSVEISGVEDRFNASLGTYHDLLKIIKDKDFLDNEENEDILEDIVLTLTLFEDREMIEERLKTYAHLFDDKVMKQLKRRRYTGWGRLSRKLINGIRDKQSGKTILDFLKSDGFANRNFMQLIHDDSLTFKEDIQKAQVSGQGDSLHEHIANLAGSPAIKKGILQTVKVVDELVKVMGRHKPENIVIEMARENQTTQKGQKNSRERMKRIEEGIKELGSQILKEHPVENTQLQNEKLYLYYLQNGRDMYVDQELDINRLSDYDVDHIVPQSFLKDDSIDNKVLTRSDKARGKSDNVPSEEVVKKMKNYWRQLLNAKLITQRKFDNLTKAERGGLSELDKAGFIKRQLVETRQITKHVAQILDSRMNTKYDENDKLIREVKVITLKSKLVSDFRKDFQFYKVREINNYHHAHDAYLNAVVGTALIKKYPKLESEFVYGDYKVYDVRKMIAKSEQEIGKATAKYFFYSNIMNFFKTEITLANGEIRKRPLIETNGETGEIVWDKGRDFATVRKVLSMPQVNIVKKTEVQTGGFSKESILPKRNSDKLIARKKDWDPKKYGGFDSPTVAYSVLVVAKVEKGKSKKLKSVKELLGITIMERSSFEKNPIDFLEAKGYKEVKKDLIIKLPKYSLFELENGRKRMLASAGELQKGNELALPSKYVNFLYLASHYEKLKGSPEDNEQKQLFVEQHKHYLDEIIEQISEFSKRVILADANLDKVLSAYNKHRDKPIREQAENIIHLFTLTNLGAPAAFKYFDTTIDRKRYTSTKEVLDATLIHQSITGLYETRIDLSQLGGDGGGGGGGSGGLLGRDLLTKLKAQIQFSTEGPQVTWEDRPAMCLVLNLEEEYRLHEKPVPPSIDPSWLQLFPMVWAEKAGMGLANQVPPVVVELKSDASPVAVRQYPMSKEAREGIRPHIQRFLDLGILVPCQSPWNTPLLPVKKPGTNDYRPVQDLREVNKRVQDIHPTVPNPYNLLSSLPPSHTWYSVLDLKDAFFCLKLHPNSQPLFAFEWRDPEKGNTGQLTWTRLPQGFKNSPTLFNEALHRDLASFRALNPQVVMLQYVDDLLVAAPTYRDCKEGTRRLLQELSKLGYRVSAKKAQLCREEVTYLGYLLKGGKRWLTPARKATVMKIPTPTTPRQVREFLGTAGFCRLWIPGFASLAAPLYPLTRPKVPFTWTEAHQEAFGRIKEALLSAPALALPDLTKPFALYVDEKEGVARGVLTQTLGPWRRPVAYLSKKLDPVASGWPTCLKAIAAVALLLKDADKLTLGQNVLVIAPHNLESIVRQPPDRWMTNARMTHYQSLLLNERVSFAPPAILNPATLLPVESDDTPIHICSEILAEETGTRPDLRDQPLPGVPAWYTDGSSFIMDGRRQAGAAIVDNKRTVWASNLPEGTSAQKAELIALTQALRLAEGKSINIYTDSRYAFATAHVHGAIYKQRGWLTSAGKDIKNKEEILALLEAIHLPKRVAIIHCPGHQRGTDPVATGNRKADEAAKQAAQSTRILTETTKNAGKRTADGSEFEKRTADGSEFESPKKKAKVE

SEQ ID NO: 1643 - protein, 2121 aa, synthetic construct
MPAAKRVKLDGGDKKYSIGLDIGTNSVGWAVITDEYKVPSKKFKVLGNTDRHSIKKNLIGALLFDSGETAEATRLKRTARRRYTRRKNRICYLQEIFSNEMAKVDDSFFHRLEESFLVEEDKKHERHPIFGNIVDEVAYHEKYPTIYHLRKKLVDSTDKADLRLIYLALAHMIKFRGHFLIEGDLNPDNSDVDKLFIQLVQTYNQLFEENPINASGVDAKAILSARLSKSRRLENLIAQLPGEKKNGLFGNLIALSLGLTPNFKSNFDLAEDAKLQLSKDTYDDDLDNLLAQIGDQYADLFLAAKNLSDAILLSDILRVNTEITKAPLSASMIKRYDEHHQDLTLLKALVRQQLPEKYKEIFFDQSKNGYAGYIDGGASQEEFYKFIKPILEKMDGTEELLVKLNREDLLRKQRTFDNGSIPHQIHLGELHAILRRQEDFYPFLKDNREKIEKILTFRIPYYVGPLARGNSRFAWMTRKSEETITPWNFEEVVDKGASAQSFIERMTNFDKNLPNEKVLPKHSLLYEYFTVYNELTKVKYVTEGMRKPAFLSGEQKKAIVDLLFKTNRKVTVKQLKEDYFKKIECFDSVEISGVEDRFNASLGTYHDLLKIIKDKDFLDNEENEDILEDIVLTLTLFEDREMIEERLKTYAHLFDDKVMKQLKRRRYTGWGRLSRKLINGIRDKQSGKTILDFLKSDGFANRNFMQLIHDDSLTFKEDIQKAQVSGQGDSLHEHIANLAGSPAIKKGILQTVKVVDELVKVMGRHKPENIVIEMARENQTTQKGQKNSRERMKRIEEGIKELGSQILKEHPVENTQLQNEKLYLYYLQNGRDMYVDQELDINRLSDYDVDHIVPQSFLKDDSIDNKVLTRSDKARGKSDNVPSEEVVKKMKNYWRQLLNAKLITQRKFDNLTKAERGGLSELDKAGFIKRQLVETRQITKHVAQILDSRMNTKYDENDKLIREVKVITLKSKLVSDFRKDFQFYKVREINNYHHAHDAYLNAVVGTALIKKYPKLESEFVYGDYKVYDVRKMIAKSEQEIGKATAKYFFYSNIMNFFKTEITLANGEIRKRPLIETNGETGEIVWDKGRDFATVRKVLSMPQVNIVKKTEVQTGGFSKESILPKRNSDKLIARKKDWDPKKYGGFDSPTVAYSVLVVAKVEKGKSKKLKSVKELLGITIMERSSFEKNPIDFLEAKGYKEVKKDLIIKLPKYSLFELENGRKRMLASAGELQKGNELALPSKYVNFLYLASHYEKLKGSPEDNEQKQLFVEQHKHYLDEIIEQISEFSKRVILADANLDKVLSAYNKHRDKPIREQAENIIHLFTLTNLGAPAAFKYFDTTIDRKRYTSTKEVLDATLIHQSITGLYETRIDLSQLGGDGGGGGGGGGLLGRDLLTKLKAQIQFSTEGPQVTWEDRPAMCLVLNLEEEYRLHEKPVPPSIDPSWLQLFPMVWAEKAGMGLANQVPPVVVELKSDASPVAVRQYPMSKEAREGIRPHIQRFLDLGILVPCQSPWNTPLLPVKKPGTNDYRPVQDLREVNKRVQDIHPTVPNPYNLLSSLPPSHTWYSVLDLKDAFFCLKLHPNSQPLFAFEWRDPEKGNTGQLTWTRLPQGFKNSPTLFNEALHRDLASFRALNPQVVMLQYVDDLLVAAPTYRDCKEGTRRLLQELSKLGYRVSAKKAQLCREEVTYLGYLLKGGKRWLTPARKATVMKIPTPTTPRQVREFLGTAGFCRLWIPGFASLAAPLYPLTRPKVPFTWTEAHQEAFGRIKEALLSAPALALPDLTKPFALYVDEKEGVARGVLTQTLGPWRRPVAYLSKKLDPVASGWPTCLKAIAAVALLLKDADKLTLGQNVLVIAPHNLESIVRQPPDRWMTNARMTHYQSLLLNERVSFAPPAILNPATLLPVESDDTPIHICSEILAEETGTRPDLRDQPLPGVPAWYTDGSSFIMDGRRQAGAAIVDNKRTVWASNLPEGTSAQKAELIALTQALRLAEGKSINIYTDSRYAFATAHVHGAIYKQRGWLTSAGKDIKNKEEILALLEAIHLPKRVAIIHCPGHQRGTDPVATGNRKADEAAKQAAQSTRILTETTKNAGKRTADGSEFEKRTADGSEFESPKKKAKVE

SEQ ID NO: 1644 - protein, 2127 aa, synthetic construct
MPAAKRVKLDGGDKKYSIGLDIGTNSVGWAVITDEYKVPSKKFKVLGNTDRHSIKKNLIGALLFDSGETAEATRLKRTARRRYTRRKNRICYLQEIFSNEMAKVDDSFFHRLEESFLVEEDKKHERHPIFGNIVDEVAYHEKYPTIYHLRKKLVDSTDKADLRLIYLALAHMIKFRGHFLIEGDLNPDNSDVDKLFIQLVQTYNQLFEENPINASGVDAKAILSARLSKSRRLENLIAQLPGEKKNGLFGNLIALSLGLTPNFKSNFDLAEDAKLQLSKDTYDDDLDNLLAQIGDQYADLFLAAKNLSDAILLSDILRVNTEITKAPLSASMIKRYDEHHQDLTLLKALVRQQLPEKYKEIFFDQSKNGYAGYIDGGASQEEFYKFIKPILEKMDGTEELLVKLNREDLLRKQRTFDNGSIPHQIHLGELHAILRRQEDFYPFLKDNREKIEKILTFRIPYYVGPLARGNSRFAWMTRKSEETITPWNFEEVVDKGASAQSFIERMTNFDKNLPNEKVLPKHSLLYEYFTVYNELTKVKYVTEGMRKPAFLSGEQKKAIVDLLFKTNRKVTVKQLKEDYFKKIECFDSVEISGVEDRFNASLGTYHDLLKIIKDKDFLDNEENEDILEDIVLTLTLFEDREMIEERLKTYAHLFDDKVMKQLKRRRYTGWGRLSRKLINGIRDKQSGKTILDFLKSDGFANRNFMQLIHDDSLTFKEDIQKAQVSGQGDSLHEHIANLAGSPAIKKGILQTVKVVDELVKVMGRHKPENIVIEMARENQTTQKGQKNSRERMKRIEEGIKELGSQILKEHPVENTQLQNEKLYLYYLQNGRDMYVDQELDINRLSDYDVDHIVPQSFLKDDSIDNKVLTRSDKARGKSDNVPSEEVVKKMKNYWRQLLNAKLITQRKFDNLTKAERGGLSELDKAGFIKRQLVETRQITKHVAQILDSRMNTKYDENDKLIREVKVITLKSKLVSDFRKDFQFYKVREINNYHHAHDAYLNAVVGTALIKKYPKLESEFVYGDYKVYDVRKMIAKSEQEIGKATAKYFFYSNIMNFFKTEITLANGEIRKRPLIETNGETGEIVWDKGRDFATVRKVLSMPQVNIVKKTEVQTGGFSKESILPKRNSDKLIARKKDWDPKKYGGFDSPTVAYSVLVVAKVEKGKSKKLKSVKELLGITIMERSSFEKNPIDFLEAKGYKEVKKDLIIKLPKYSLFELENGRKRMLASAGELQKGNELALPSKYVNFLYLASHYEKLKGSPEDNEQKQLFVEQHKHYLDEIIEQISEFSKRVILADANLDKVLSAYNKHRDKPIREQAENIIHLFTLTNLGAPAAFKYFDTTIDRKRYTSTKEVLDATLIHQSITGLYETRIDLSQLGGDGGGGSGSSEAAAKGGLLGRDLLTKLKAQIQFSTEGPQVTWEDRPAMCLVLNLEEEYRLHEKPVPPSIDPSWLQLFPMVWAEKAGMGLANQVPPVVVELKSDASPVAVRQYPMSKEAREGIRPHIQRFLDLGILVPCQSPWNTPLLPVKKPGTNDYRPVQDLREVNKRVQDIHPTVPNPYNLLSSLPPSHTWYSVLDLKDAFFCLKLHPNSQPLFAFEWRDPEKGNTGQLTWTRLPQGFKNSPTLFNEALHRDLASFRALNPQVVMLQYVDDLLVAAPTYRDCKEGTRRLLQELSKLGYRVSAKKAQLCREEVTYLGYLLKGGKRWLTPARKATVMKIPTPTTPRQVREFLGTAGFCRLWIPGFASLAAPLYPLTRPKVPFTWTEAHQEAFGRIKEALLSAPALALPDLTKPFALYVDEKEGVARGVLTQTLGPWRRPVAYLSKKLDPVASGWPTCLKAIAAVALLLKDADKLTLGQNVLVIAPHNLESIVRQPPDRWMTNARMTHYQSLLLNERVSFAPPAILNPATLLPVESDDTPIHICSEILAEETGTRPDLRDQPLPGVPAWYTDGSSFIMDGRRQAGAAIVDNKRTVWASNLPEGTSAQKAELIALTQALRLAEGKSINIYTDSRYAFATAHVHGAIYKQRGWLTSAGKDIKNKEEILALLEAIHLPKRVAIIHCPGHQRGTDPVATGNRKADEAAKQAAQSTRILTETTKNAGKRTADGSEFEKRTADGSEFESPKKKAKVE

SEQ ID NO: 1645 - protein, 2127 aa, synthetic construct
MPAAKRVKLDGGDKKYSIGLDIGTNSVGWAVITDEYKVPSKKFKVLGNTDRHSIKKNLIGALLFDSGETAEATRLKRTARRRYTRRKNRICYLQEIFSNEMAKVDDSFFHRLEESFLVEEDKKHERHPIFGNIVDEVAYHEKYPTIYHLRKKLVDSTDKADLRLIYLALAHMIKFRGHFLIEGDLNPDNSDVDKLFIQLVQTYNQLFEENPINASGVDAKAILSARLSKSRRLENLIAQLPGEKKNGLFGNLIALSLGLTPNFKSNFDLAEDAKLQLSKDTYDDDLDNLLAQIGDQYADLFLAAKNLSDAILLSDILRVNTEITKAPLSASMIKRYDEHHQDLTLLKALVRQQLPEKYKEIFFDQSKNGYAGYIDGGASQEEFYKFIKPILEKMDGTEELLVKLNREDLLRKQRTFDNGSIPHQIHLGELHAILRRQEDFYPFLKDNREKIEKILTFRIPYYVGPLARGNSRFAWMTRKSEETITPWNFEEVVDKGASAQSFIERMTNFDKNLPNEKVLPKHSLLYEYFTVYNELTKVKYVTEGMRKPAFLSGEQKKAIVDLLFKTNRKVTVKQLKEDYFKKIECFDSVEISGVEDRFNASLGTYHDLLKIIKDKDFLDNEENEDILEDIVLTLTLFEDREMIEERLKTYAHLFDDKVMKQLKRRRYTGWGRLSRKLINGIRDKQSGKTILDFLKSDGFANRNFMQLIHDDSLTFKEDIQKAQVSGQGDSLHEHIANLAGSPAIKKGILQTVKVVDELVKVMGRHKPENIVIEMARENQTTQKGQKNSRERMKRIEEGIKELGSQILKEHPVENTQLQNEKLYLYYLQNGRDMYVDQELDINRLSDYDVDHIVPQSFLKDDSIDNKVLTRSDKARGKSDNVPSEEVVKKMKNYWRQLLNAKLITQRKFDNLTKAERGGLSELDKAGFIKRQLVETRQITKHVAQILDSRMNTKYDENDKLIREVKVITLKSKLVSDFRKDFQFYKVREINNYHHAHDAYLNAVVGTALIKKYPKLESEFVYGDYKVYDVRKMIAKSEQEIGKATAKYFFYSNIMNFFKTEITLANGEIRKRPLIETNGETGEIVWDKGRDFATVRKVLSMPQVNIVKKTEVQTGGFSKESILPKRNSDKLIARKKDWDPKKYGGFDSPTVAYSVLVVAKVEKGKSKKLKSVKELLGITIMERSSFEKNPIDFLEAKGYKEVKKDLIIKLPKYSLFELENGRKRMLASAGELQKGNELALPSKYVNFLYLASHYEKLKGSPEDNEQKQLFVEQHKHYLDEIIEQISEFSKRVILADANLDKVLSAYNKHRDKPIREQAENIIHLFTLTNLGAPAAFKYFDTTIDRKRYTSTKEVLDATLIHQSITGLYETRIDLSQLGGDGGEAAAKGGSGSSGGLLGRDLLTKLKAQIQFSTEGPQVTWEDRPAMCLVLNLEEEYRLHEKPVPPSIDPSWLQLFPMVWAEKAGMGLANQVPPVVVELKSDASPVAVRQYPMSKEAREGIRPHIQRFLDLGILVPCQSPWNTPLLPVKKPGTNDYRPVQDLREVNKRVQDIHPTVPNPYNLLSSLPPSHTWYSVLDLKDAFFCLKLHPNSQPLFAFEWRDPEKGNTGQLTWTRLPQGFKNSPTLFNEALHRDLASFRALNPQVVMLQYVDDLLVAAPTYRDCKEGTRRLLQELSKLGYRVSAKKAQLCREEVTYLGYLLKGGKRWLTPARKATVMKIPTPTTPRQVREFLGTAGFCRLWIPGFASLAAPLYPLTRPKVPFTWTEAHQEAFGRIKEALLSAPALALPDLTKPFALYVDEKEGVARGVLTQTLGPWRRPVAYLSKKLDPVASGWPTCLKAIAAVALLLKDADKLTLGQNVLVIAPHNLESIVRQPPDRWMTNARMTHYQSLLLNERVSFAPPAILNPATLLPVESDDTPIHICSEILAEETGTRPDLRDQPLPGVPAWYTDGSSFIMDGRRQAGAAIVDNKRTVWASNLPEGTSAQKAELIALTQALRLAEGKSINIYTDSRYAFATAHVHGAIYKQRGWLTSAGKDIKNKEEILALLEAIHLPKRVAIIHCPGHQRGTDPVATGNRKADEAAKQAAQSTRILTETTKNAGKRTADGSEFEKRTADGSEFESPKKKAKVE

SEQ ID NO: 1646 - protein, 2127 aa, synthetic construct
MPAAKRVKLDGGDKKYSIGLDIGTNSVGWAVITDEYKVPSKKFKVLGNTDRHSIKKNLIGALLFDSGETAEATRLKRTARRRYTRRKNRICYLQEIFSNEMAKVDDSFFHRLEESFLVEEDKKHERHPIFGNIVDEVAYHEKYPTIYHLRKKLVDSTDKADLRLIYLALAHMIKFRGHFLIEGDLNPDNSDVDKLFIQLVQTYNQLFEENPINASGVDAKAILSARLSKSRRLENLIAQLPGEKKNGLFGNLIALSLGLTPNFKSNFDLAEDAKLQLSKDTYDDDLDNLLAQIGDQYADLFLAAKNLSDAILLSDILRVNTEITKAPLSASMIKRYDEHHQDLTLLKALVRQQLPEKYKEIFFDQSKNGYAGYIDGGASQEEFYKFIKPILEKMDGTEELLVKLNREDLLRKQRTFDNGSIPHQIHLGELHAILRRQEDFYPFLKDNREKIEKILTFRIPYYVGPLARGNSRFAWMTRKSEETITPWNFEEVVDKGASAQSFIERMTNFDKNLPNEKVLPKHSLLYEYFTVYNELTKVKYVTEGMRKPAFLSGEQKKAIVDLLFKTNRKVTVKQLKEDYFKKIECFDSVEISGVEDRFNASLGTYHDLLKIIKDKDFLDNEENEDILEDIVLTLTLFEDREMIEERLKTYAHLFDDKVMKQLKRRRYTGWGRLSRKLINGIRDKQSGKTILDFLKSDGFANRNFMQLIHDDSLTFKEDIQKAQVSGQGDSLHEHIANLAGSPAIKKGILQTVKVVDELVKVMGRHKPENIVIEMARENQTTQKGQKNSRERMKRIEEGIKELGSQILKEHPVENTQLQNEKLYLYYLQNGRDMYVDQELDINRLSDYDVDHIVPQSFLKDDSIDNKVLTRSDKARGKSDNVPSEEVVKKMKNYWRQLLNAKLITQRKFDNLTKAERGGLSELDKAGFIKRQLVETRQITKHVAQILDSRMNTKYDENDKLIREVKVITLKSKLVSDFRKDFQFYKVREINNYHHAHDAYLNAVVGTALIKKYPKLESEFVYGDYKVYDVRKMIAKSEQEIGKATAKYFFYSNIMNFFKTEITLANGEIRKRPLIETNGETGEIVWDKGRDFATVRKVLSMPQVNIVKKTEVQTGGFSKESILPKRNSDKLIARKKDWDPKKYGGFDSPTVAYSVLVVAKVEKGKSKKLKSVKELLGITIMERSSFEKNPIDFLEAKGYKEVKKDLIIKLPKYSLFELENGRKRMLASAGELQKGNELALPSKYVNFLYLASHYEKLKGSPEDNEQKQLFVEQHKHYLDEIIEQISEFSKRVILADANLDKVLSAYNKHRDKPIREQAENIIHLFTLTNLGAPAAFKYFDTTIDRKRYTSTKEVLDATLIHQSITGLYETRIDLSQLGGDGGEAAAKGGGGGSGGLLGRDLLTKLKAQIQFSTEGPQVTWEDRPAMCLVLNLEEEYRLHEKPVPPSIDPSWLQLFPMVWAEKAGMGLANQVPPVVVELKSDASPVAVRQYPMSKEAREGIRPHIQRFLDLGILVPCQSPWNTPLLPVKKPGTNDYRPVQDLREVNKRVQDIHPTVPNPYNLLSSLPPSHTWYSVLDLKDAFFCLKLHPNSQPLFAFEWRDPEKGNTGQLTWTRLPQGFKNSPTLFNEALHRDLASFRALNPQVVMLQYVDDLLVAAPTYRDCKEGTRRLLQELSKLGYRVSAKKAQLCREEVTYLGYLLKGGKRWLTPARKATVMKIPTPTTPRQVREFLGTAGFCRLWIPGFASLAAPLYPLTRPKVPFTWTEAHQEAFGRIKEALLSAPALALPDLTKPFALYVDEKEGVARGVLTQTLGPWRRPVAYLSKKLDPVASGWPTCLKAIAAVALLLKDADKLTLGQNVLVIAPHNLESIVRQPPDRWMTNARMTHYQSLLLNERVSFAPPAILNPATLLPVESDDTPIHICSEILAEETGTRPDLRDQPLPGVPAWYTDGSSFIMDGRRQAGAAIVDNKRTVWASNLPEGTSAQKAELIALTQALRLAEGKSINIYTDSRYAFATAHVHGAIYKQRGWLTSAGKDIKNKEEILALLEAIHLPKRVAIIHCPGHQRGTDPVATGNRKADEAAKQAAQSTRILTETTKNAGKRTADGSEFEKRTADGSEFESPKKKAKVE

SEQ ID NO: 1647 - protein, 2127 aa, synthetic construct
MPAAKRVKLDGGDKKYSIGLDIGTNSVGWAVITDEYKVPSKKFKVLGNTDRHSIKKNLIGALLFDSGETAEATRLKRTARRRYTRRKNRICYLQEIFSNEMAKVDDSFFHRLEESFLVEEDKKHERHPIFGNIVDEVAYHEKYPTIYHLRKKLVDSTDKADLRLIYLALAHMIKFRGHFLIEGDLNPDNSDVDKLFIQLVQTYNQLFEENPINASGVDAKAILSARLSKSRRLENLIAQLPGEKKNGLFGNLIALSLGLTPNFKSNFDLAEDAKLQLSKDTYDDDLDNLLAQIGDQYADLFLAAKNLSDAILLSDILRVNTEITKAPLSASMIKRYDEHHQDLTLLKALVRQQLPEKYKEIFFDQSKNGYAGYIDGGASQEEFYKFIKPILEKMDGTEELLVKLNREDLLRKQRTFDNGSIPHQIHLGELHAILRRQEDFYPFLKDNREKIEKILTFRIPYYVGPLARGNSRFAWMTRKSEETITPWNFEEVVDKGASAQSFIERMTNFDKNLPNEKVLPKHSLLYEYFTVYNELTKVKYVTEGMRKPAFLSGEQKKAIVDLLFKTNRKVTVKQLKEDYFKKIECFDSVEISGVEDRFNASLGTYHDLLKIIKDKDFLDNEENEDILEDIVLTLTLFEDREMIEERLKTYAHLFDDKVMKQLKRRRYTGWGRLSRKLINGIRDKQSGKTILDFLKSDGFANRNFMQLIHDDSLTFKEDIQKAQVSGQGDSLHEHIANLAGSPAIKKGILQTVKVVDELVKVMGRHKPENIVIEMARENQTTQKGQKNSRERMKRIEEGIKELGSQILKEHPVENTQLQNEKLYLYYLQNGRDMYVDQELDINRLSDYDVDHIVPQSFLKDDSIDNKVLTRSDKARGKSDNVPSEEVVKKMKNYWRQLLNAKLITQRKFDNLTKAERGGLSELDKAGFIKRQLVETRQITKHVAQILDSRMNTKYDENDKLIREVKVITLKSKLVSDFRKDFQFYKVREINNYHHAHDAYLNAVVGTALIKKYPKLESEFVYGDYKVYDVRKMIAKSEQEIGKATAKYFFYSNIMNFFKTEITLANGEIRKRPLIETNGETGEIVWDKGRDFATVRKVLSMPQVNIVKKTEVQTGGFSKESILPKRNSDKLIARKKDWDPKKYGGFDSPTVAYSVLVVAKVEKGKSKKLKSVKELLGITIMERSSFEKNPIDFLEAKGYKEVKKDLIIKLPKYSLFELENGRKRMLASAGELQKGNELALPSKYVNFLYLASHYEKLKGSPEDNEQKQLFVEQHKHYLDEIIEQISEFSKRVILADANLDKVLSAYNKHRDKPIREQAENIIHLFTLTNLGAPAAFKYFDTTIDRKRYTSTKEVLDATLIHQSITGLYETRIDLSQLGGDGGGGSEAAAKGGGGGLLGRDLLTKLKAQIQFSTEGPQVTWEDRPAMCLVLNLEEEYRLHEKPVPPSIDPSWLQLFPMVWAEKAGMGLANQVPPVVVELKSDASPVAVRQYPMSKEAREGIRPHIQRFLDLGILVPCQSPWNTPLLPVKKPGTNDYRPVQDLREVNKRVQDIHPTVPNPYNLLSSLPPSHTWYSVLDLKDAFFCLKLHPNSQPLFAFEWRDPEKGNTGQLTWTRLPQGFKNSPTLFNEALHRDLASFRALNPQVVMLQYVDDLLVAAPTYRDCKEGTRRLLQELSKLGYRVSAKKAQLCREEVTYLGYLLKGGKRWLTPARKATVMKIPTPTTPRQVREFLGTAGFCRLWIPGFASLAAPLYPLTRPKVPFTWTEAHQEAFGRIKEALLSAPALALPDLTKPFALYVDEKEGVARGVLTQTLGPWRRPVAYLSKKLDPVASGWPTCLKAIAAVALLLKDADKLTLGQNVLVIAPHNLESIVRQPPDRWMTNARMTHYQSLLLNERVSFAPPAILNPATLLPVESDDTPIHICSEILAEETGTRPDLRDQPLPGVPAWYTDGSSFIMDGRRQAGAAIVDNKRTVWASNLPEGTSAQKAELIALTQALRLAEGKSINIYTDSRYAFATAHVHGAIYKQRGWLTSAGKDIKNKEEILALLEAIHLPKRVAIIHCPGHQRGTDPVATGNRKADEAAKQAAQSTRILTETTKNAGKRTADGSEFEKRTADGSEFESPKKKAKVE

SEQ ID NO: 1648 - protein, 2125 aa, synthetic construct
MPAAKRVKLDGGDKKYSIGLDIGTNSVGWAVITDEYKVPSKKFKVLGNTDRHSIKKNLIGALLFDSGETAEATRLKRTARRRYTRRKNRICYLQEIFSNEMAKVDDSFFHRLEESFLVEEDKKHERHPIFGNIVDEVAYHEKYPTIYHLRKKLVDSTDKADLRLIYLALAHMIKFRGHFLIEGDLNPDNSDVDKLFIQLVQTYNQLFEENPINASGVDAKAILSARLSKSRRLENLIAQLPGEKKNGLFGNLIALSLGLTPNFKSNFDLAEDAKLQLSKDTYDDDLDNLLAQIGDQYADLFLAAKNLSDAILLSDILRVNTEITKAPLSASMIKRYDEHHQDLTLLKALVRQQLPEKYKEIFFDQSKNGYAGYIDGGASQEEFYKFIKPILEKMDGTEELLVKLNREDLLRKQRTFDNGSIPHQIHLGELHAILRRQEDFYPFLKDNREKIEKILTFRIPYYVGPLARGNSRFAWMTRKSEETITPWNFEEVVDKGASAQSFIERMTNFDKNLPNEKVLPKHSLLYEYFTVYNELTKVKYVTEGMRKPAFLSGEQKKAIVDLLFKTNRKVTVKQLKEDYFKKIECFDSVEISGVEDRFNASLGTYHDLLKIIKDKDFLDNEENEDILEDIVLTLTLFEDREMIEERLKTYAHLFDDKVMKQLKRRRYTGWGRLSRKLINGIRDKQSGKTILDFLKSDGFANRNFMQLIHDDSLTFKEDIQKAQVSGQGDSLHEHIANLAGSPAIKKGILQTVKVVDELVKVMGRHKPENIVIEMARENQTTQKGQKNSRERMKRIEEGIKELGSQILKEHPVENTQLQNEKLYLYYLQNGRDMYVDQELDINRLSDYDVDHIVPQSFLKDDSIDNKVLTRSDKARGKSDNVPSEEVVKKMKNYWRQLLNAKLITQRKFDNLTKAERGGLSELDKAGFIKRQLVETRQITKHVAQILDSRMNTKYDENDKLIREVKVITLKSKLVSDFRKDFQFYKVREINNYHHAHDAYLNAVVGTALIKKYPKLESEFVYGDYKVYDVRKMIAKSEQEIGKATAKYFFYSNIMNFFKTEITLANGEIRKRPLIETNGETGEIVWDKGRDFATVRKVLSMPQVNIVKKTEVQTGGFSKESILPKRNSDKLIARKKDWDPKKYGGFDSPTVAYSVLVVAKVEKGKSKKLKSVKELLGITIMERSSFEKNPIDFLEAKGYKEVKKDLIIKLPKYSLFELENGRKRMLASAGELQKGNELALPSKYVNFLYLASHYEKLKGSPEDNEQKQLFVEQHKHYLDEIIEQISEFSKRVILADANLDKVLSAYNKHRDKPIREQAENIIHLFTLTNLGAPAAFKYFDTTIDRKRYTSTKEVLDATLIHQSITGLYETRIDLSQLGGDGGGGSPAPGSSGGLLGRDLLTKLKAQIQFSTEGPQVTWEDRPAMCLVLNLEEEYRLHEKPVPPSIDPSWLQLFPMVWAEKAGMGLANQVPPVVVELKSDASPVAVRQYPMSKEAREGIRPHIQRFLDLGILVPCQSPWNTPLLPVKKPGTNDYRPVQDLREVNKRVQDIHPTVPNPYNLLSSLPPSHTWYSVLDLKDAFFCLKLHPNSQPLFAFEWRDPEKGNTGQLTWTRLPQGFKNSPTLFNEALHRDLASFRALNPQVVMLQYVDDLLVAAPTYRDCKEGTRRLLQELSKLGYRVSAKKAQLCREEVTYLGYLLKGGKRWLTPARKATVMKIPTPTTPRQVREFLGTAGFCRLWIPGFASLAAPLYPLTRPKVPFTWTEAHQEAFGRIKEALLSAPALALPDLTKPFALYVDEKEGVARGVLTQTLGPWRRPVAYLSKKLDPVASGWPTCLKAIAAVALLLKDADKLTLGQNVLVIAPHNLESIVRQPPDRWMTNARMTHYQSLLLNERVSFAPPAILNPATLLPVESDDTPIHICSEILAEETGTRPDLRDQPLPGVPAWYTDGSSFIMDGRRQAGAAIVDNKRTVWASNLPEGTSAQKAELIALTQALRLAEGKSINIYTDSRYAFATAHVHGAIYKQRGWLTSAGKDIKNKEEILALLEAIHLPKRVAIIHCPGHQRGTDPVATGNRKADEAAKQAAQSTRILTETTKNAGKRTADGSEFEKRTADGSEFESPKKKAKVE

SEQ ID NO: 1649 - protein, 2149 aa, synthetic construct
MPAAKRVKLDGGDKKYSIGLDIGTNSVGWAVITDEYKVPSKKFKVLGNTDRHSIKKNLIGALLFDSGETAEATRLKRTARRRYTRRKNRICYLQEIFSNEMAKVDDSFFHRLEESFLVEEDKKHERHPIFGNIVDEVAYHEKYPTIYHLRKKLVDSTDKADLRLIYLALAHMIKFRGHFLIEGDLNPDNSDVDKLFIQLVQTYNQLFEENPINASGVDAKAILSARLSKSRRLENLIAQLPGEKKNGLFGNLIALSLGLTPNFKSNFDLAEDAKLQLSKDTYDDDLDNLLAQIGDQYADLFLAAKNLSDAILLSDILRVNTEITKAPLSASMIKRYDEHHQDLTLLKALVRQQLPEKYKEIFFDQSKNGYAGYIDGGASQEEFYKFIKPILEKMDGTEELLVKLNREDLLRKQRTFDNGSIPHQIHLGELHAILRRQEDFYPFLKDNREKIEKILTFRIPYYVGPLARGNSRFAWMTRKSEETITPWNFEEVVDKGASAQSFIERMTNFDKNLPNEKVLPKHSLLYEYFTVYNELTKVKYVTEGMRKPAFLSGEQKKAIVDLLFKTNRKVTVKQLKEDYFKKIECFDSVEISGVEDRFNASLGTYHDLLKIIKDKDFLDNEENEDILEDIVLTLTLFEDREMIEERLKTYAHLFDDKVMKQLKRRRYTGWGRLSRKLINGIRDKQSGKTILDFLKSDGFANRNFMQLIHDDSLTFKEDIQKAQVSGQGDSLHEHIANLAGSPAIKKGILQTVKVVDELVKVMGRHKPENIVIEMARENQTTQKGQKNSRERMKRIEEGIKELGSQILKEHPVENTQLQNEKLYLYYLQNGRDMYVDQELDINRLSDYDVDHIVPQSFLKDDSIDNKVLTRSDKARGKSDNVPSEEVVKKMKNYWRQLLNAKLITQRKFDNLTKAERGGLSELDKAGFIKRQLVETRQITKHVAQILDSRMNTKYDENDKLIREVKVITLKSKLVSDFRKDFQFYKVREINNYHHAHDAYLNAVVGTALIKKYPKLESEFVYGDYKVYDVRKMIAKSEQEIGKATAKYFFYSNIMNFFKTEITLANGEIRKRPLIETNGETGEIVWDKGRDFATVRKVLSMPQVNIVKKTEVQTGGFSKESILPKRNSDKLIARKKDWDPKKYGGFDSPTVAYSVLVVAKVEKGKSKKLKSVKELLGITIMERSSFEKNPIDFLEAKGYKEVKKDLIIKLPKYSLFELENGRKRMLASAGELQKGNELALPSKYVNFLYLASHYEKLKGSPEDNEQKQLFVEQHKHYLDEIIEQISEFSKRVILADANLDKVLSAYNKHRDKPIREQAENIIHLFTLTNLGAPAAFKYFDTTIDRKRYTSTKEVLDATLIHQSITGLYETRIDLSQLGGDGGSGGSSGGSSGSETPGTSESATPESSGGSSGGSSGGLLGRDLLTKLKAQIQFSTEGPQVTWEDRPAMCLVLNLEEEYRLHEKPVPPSIDPSWLQLFPMVWAEKAGMGLANQVPPVVVELKSDASPVAVRQYPMSKEAREGIRPHIQRFLDLGILVPCQSPWNTPLLPVKKPGTNDYRPVQDLREVNKRVQDIHPTVPNPYNLLSSLPPSHTWYSVLDLKDAFFCLKLHPNSQPLFAFEWRDPEKGNTGQLTWTRLPQGFKNSPTLFNEALHRDLASFRALNPQVVMLQYVDDLLVAAPTYRDCKEGTRRLLQELSKLGYRVSAKKAQLCREEVTYLGYLLKGGKRWLTPARKATVMKIPTPTTPRQVREFLGTAGFCRLWIPGFASLAAPLYPLTRPKVPFTWTEAHQEAFGRIKEALLSAPALALPDLTKPFALYVDEKEGVARGVLTQTLGPWRRPVAYLSKKLDPVASGWPTCLKAIAAVALLLKDADKLTLGQNVLVIAPHNLESIVRQPPDRWMTNARMTHYQSLLLNERVSFAPPAILNPATLLPVESDDTPIHICSEILAEETGTRPDLRDQPLPGVPAWYTDGSSFIMDGRRQAGAAIVDNKRTVWASNLPEGTSAQKAELIALTQALRLAEGKSINIYTDSRYAFATAHVHGAIYKQRGWLTSAGKDIKNKEEILALLEAIHLPKRVAIIHCPGHQRGTDPVATGNRKADEAAKQAAQSTRILTETTKNAGKRTADGSEFEKRTADGSEFESPKKKAKVE

SEQ ID NO: 1650 - protein, 2121 aa, synthetic construct
MPAAKRVKLDGGDKKYSIGLDIGTNSVGWAVITDEYKVPSKKFKVLGNTDRHSIKKNLIGALLFDSGETAEATRLKRTARRRYTRRKNRICYLQEIFSNEMAKVDDSFFHRLEESFLVEEDKKHERHPIFGNIVDEVAYHEKYPTIYHLRKKLVDSTDKADLRLIYLALAHMIKFRGHFLIEGDLNPDNSDVDKLFIQLVQTYNQLFEENPINASGVDAKAILSARLSKSRRLENLIAQLPGEKKNGLFGNLIALSLGLTPNFKSNFDLAEDAKLQLSKDTYDDDLDNLLAQIGDQYADLFLAAKNLSDAILLSDILRVNTEITKAPLSASMIKRYDEHHQDLTLLKALVRQQLPEKYKEIFFDQSKNGYAGYIDGGASQEEFYKFIKPILEKMDGTEELLVKLNREDLLRKQRTFDNGSIPHQIHLGELHAILRRQEDFYPFLKDNREKIEKILTFRIPYYVGPLARGNSRFAWMTRKSEETITPWNFEEVVDKGASAQSFIERMTNFDKNLPNEKVLPKHSLLYEYFTVYNELTKVKYVTEGMRKPAFLSGEQKKAIVDLLFKTNRKVTVKQLKEDYFKKIECFDSVEISGVEDRFNASLGTYHDLLKIIKDKDFLDNEENEDILEDIVLTLTLFEDREMIEERLKTYAHLFDDKVMKQLKRRRYTGWGRLSRKLINGIRDKQSGKTILDFLKSDGFANRNFMQLIHDDSLTFKEDIQKAQVSGQGDSLHEHIANLAGSPAIKKGILQTVKVVDELVKVMGRHKPENIVIEMARENQTTQKGQKNSRERMKRIEEGIKELGSQILKEHPVENTQLQNEKLYLYYLQNGRDMYVDQELDINRLSDYDVDHIVPQSFLKDDSIDNKVLTRSDKARGKSDNVPSEEVVKKMKNYWRQLLNAKLITQRKFDNLTKAERGGLSELDKAGFIKRQLVETRQITKHVAQILDSRMNTKYDENDKLIREVKVITLKSKLVSDFRKDFQFYKVREINNYHHAHDAYLNAVVGTALIKKYPKLESEFVYGDYKVYDVRKMIAKSEQEIGKATAKYFFYSNIMNFFKTEITLANGEIRKRPLIETNGETGEIVWDKGRDFATVRKVLSMPQVNIVKKTEVQTGGFSKESILPKRNSDKLIARKKDWDPKKYGGFDSPTVAYSVLVVAKVEKGKSKKLKSVKELLGITIMERSSFEKNPIDFLEAKGYKEVKKDLIIKLPKYSLFELENGRKRMLASAGELQKGNELALPSKYVNFLYLASHYEKLKGSPEDNEQKQLFVEQHKHYLDEIIEQISEFSKRVILADANLDKVLSAYNKHRDKPIREQAENIIHLFTLTNLGAPAAFKYFDTTIDRKRYTSTKEVLDATLIHQSITGLYETRIDLSQLGGDGGGGGGSGGLLGRDLLTKLKAQIQFSTEGPQVTWEDRPAMCLVLNLEEEYRLHEKPVPPSIDPSWLQLFPMVWAEKAGMGLANQVPPVVVELKSDASPVAVRQYPMSKEAREGIRPHIQRFLDLGILVPCQSPWNTPLLPVKKPGTNDYRPVQDLREVNKRVQDIHPTVPNPYNLLSSLPPSHTWYSVLDLKDAFFCLKLHPNSQPLFAFEWRDPEKGNTGQLTWTRLPQGFKNSPTLFNEALHRDLASFRALNPQVVMLQYVDDLLVAAPTYRDCKEGTRRLLQELSKLGYRVSAKKAQLCREEVTYLGYLLKGGKRWLTPARKATVMKIPTPTTPRQVREFLGTAGFCRLWIPGFASLAAPLYPLTRPKVPFTWTEAHQEAFGRIKEALLSAPALALPDLTKPFALYVDEKEGVARGVLTQTLGPWRRPVAYLSKKLDPVASGWPTCLKAIAAVALLLKDADKLTLGQNVLVIAPHNLESIVRQPPDRWMTNARMTHYQSLLLNERVSFAPPAILNPATLLPVESDDTPIHICSEILAEETGTRPDLRDQPLPGVPAWYTDGSSFIMDGRRQAGAAIVDNKRTVWASNLPEGTSAQKAELIALTQALRLAEGKSINIYTDSRYAFATAHVHGAIYKQRGWLTSAGKDIKNKEEILALLEAIHLPKRVAIIHCPGHQRGTDPVATGNRKADEAAKQAAQSTRILTETTKNAGKRTADGSEFEKRTADGSEFESPKKKAKVE

SEQ ID NO: 1651 - protein, 2125 aa, synthetic construct
MPAAKRVKLDGGDKKYSIGLDIGTNSVGWAVITDEYKVPSKKFKVLGNTDRHSIKKNLIGALLFDSGETAEATRLKRTARRRYTRRKNRICYLQEIFSNEMAKVDDSFFHRLEESFLVEEDKKHERHPIFGNIVDEVAYHEKYPTIYHLRKKLVDSTDKADLRLIYLALAHMIKFRGHFLIEGDLNPDNSDVDKLFIQLVQTYNQLFEENPINASGVDAKAILSARLSKSRRLENLIAQLPGEKKNGLFGNLIALSLGLTPNFKSNFDLAEDAKLQLSKDTYDDDLDNLLAQIGDQYADLFLAAKNLSDAILLSDILRVNTEITKAPLSASMIKRYDEHHQDLTLLKALVRQQLPEKYKEIFFDQSKNGYAGYIDGGASQEEFYKFIKPILEKMDGTEELLVKLNREDLLRKQRTFDNGSIPHQIHLGELHAILRRQEDFYPFLKDNREKIEKILTFRIPYYVGPLARGNSRFAWMTRKSEETITPWNFEEVVDKGASAQSFIERMTNFDKNLPNEKVLPKHSLLYEYFTVYNELTKVKYVTEGMRKPAFLSGEQKKAIVDLLFKTNRKVTVKQLKEDYFKKIECFDSVEISGVEDRFNASLGTYHDLLKIIKDKDFLDNEENEDILEDIVLTLTLFEDREMIEERLKTYAHLFDDKVMKQLKRRRYTGWGRLSRKLINGIRDKQSGKTILDFLKSDGFANRNFMQLIHDDSLTFKEDIQKAQVSGQGDSLHEHIANLAGSPAIKKGILQTVKVVDELVKVMGRHKPENIVIEMARENQTTQKGQKNSRERMKRIEEGIKELGSQILKEHPVENTQLQNEKLYLYYLQNGRDMYVDQELDINRLSDYDVDHIVPQSFLKDDSIDNKVLTRSDKARGKSDNVPSEEVVKKMKNYWRQLLNAKLITQRKFDNLTKAERGGLSELDKAGFIKRQLVETRQITKHVAQILDSRMNTKYDENDKLIREVKVITLKSKLVSDFRKDFQFYKVREINNYHHAHDAYLNAVVGTALIKKYPKLESEFVYGDYKVYDVRKMIAKSEQEIGKATAKYFFYSNIMNFFKTEITLANGEIRKRPLIETNGETGEIVWDKGRDFATVRKVLSMPQVNIVKKTEVQTGGFSKESILPKRNSDKLIARKKDWDPKKYGGFDSPTVAYSVLVVAKVEKGKSKKLKSVKELLGITIMERSSFEKNPIDFLEAKGYKEVKKDLIIKLPKYSLFELENGRKRMLASAGELQKGNELALPSKYVNFLYLASHYEKLKGSPEDNEQKQLFVEQHKHYLDEIIEQISEFSKRVILADANLDKVLSAYNKHRDKPIREQAENIIHLFTLTNLGAPAAFKYFDTTIDRKRYTSTKEVLDATLIHQSITGLYETRIDLSQLGGDGGPAPGSSGGSGGLLGRDLLTKLKAQIQFSTEGPQVTWEDRPAMCLVLNLEEEYRLHEKPVPPSIDPSWLQLFPMVWAEKAGMGLANQVPPVVVELKSDASPVAVRQYPMSKEAREGIRPHIQRFLDLGILVPCQSPWNTPLLPVKKPGTNDYRPVQDLREVNKRVQDIHPTVPNPYNLLSSLPPSHTWYSVLDLKDAFFCLKLHPNSQPLFAFEWRDPEKGNTGQLTWTRLPQGFKNSPTLFNEALHRDLASFRALNPQVVMLQYVDDLLVAAPTYRDCKEGTRRLLQELSKLGYRVSAKKAQLCREEVTYLGYLLKGGKRWLTPARKATVMKIPTPTTPRQVREFLGTAGFCRLWIPGFASLAAPLYPLTRPKVPFTWTEAHQEAFGRIKEALLSAPALALPDLTKPFALYVDEKEGVARGVLTQTLGPWRRPVAYLSKKLDPVASGWPTCLKAIAAVALLLKDADKLTLGQNVLVIAPHNLESIVRQPPDRWMTNARMTHYQSLLLNERVSFAPPAILNPATLLPVESDDTPIHICSEILAEETGTRPDLRDQPLPGVPAWYTDGSSFIMDGRRQAGAAIVDNKRTVWASNLPEGTSAQKAELIALTQALRLAEGKSINIYTDSRYAFATAHVHGAIYKQRGWLTSAGKDIKNKEEILALLEAIHLPKRVAIIHCPGHQRGTDPVATGNRKADEAAKQAAQSTRILTETTKNAGKRTADGSEFEKRTADGSEFESPKKKAKVE

SEQ ID NO: 1652 - protein, 2125 aa, synthetic construct
MPAAKRVKLDGGDKKYSIGLDIGTNSVGWAVITDEYKVPSKKFKVLGNTDRHSIKKNLIGALLFDSGETAEATRLKRTARRRYTRRKNRICYLQEIFSNEMAKVDDSFFHRLEESFLVEEDKKHERHPIFGNIVDEVAYHEKYPTIYHLRKKLVDSTDKADLRLIYLALAHMIKFRGHFLIEGDLNPDNSDVDKLFIQLVQTYNQLFEENPINASGVDAKAILSARLSKSRRLENLIAQLPGEKKNGLFGNLIALSLGLTPNFKSNFDLAEDAKLQLSKDTYDDDLDNLLAQIGDQYADLFLAAKNLSDAILLSDILRVNTEITKAPLSASMIKRYDEHHQDLTLLKALVRQQLPEKYKEIFFDQSKNGYAGYIDGGASQEEFYKFIKPILEKMDGTEELLVKLNREDLLRKQRTFDNGSIPHQIHLGELHAILRRQEDFYPFLKDNREKIEKILTFRIPYYVGPLARGNSRFAWMTRKSEETITPWNFEEVVDKGASAQSFIERMTNFDKNLPNEKVLPKHSLLYEYFTVYNELTKVKYVTEGMRKPAFLSGEQKKAIVDLLFKTNRKVTVKQLKEDYFKKIECFDSVEISGVEDRFNASLGTYHDLLKIIKDKDFLDNEENEDILEDIVLTLTLFEDREMIEERLKTYAHLFDDKVMKQLKRRRYTGWGRLSRKLINGIRDKQSGKTILDFLKSDGFANRNFMQLIHDDSLTFKEDIQKAQVSGQGDSLHEHIANLAGSPAIKKGILQTVKVVDELVKVMGRHKPENIVIEMARENQTTQKGQKNSRERMKRIEEGIKELGSQILKEHPVENTQLQNEKLYLYYLQNGRDMYVDQELDINRLSDYDVDHIVPQSFLKDDSIDNKVLTRSDKARGKSDNVPSEEVVKKMKNYWRQLLNAKLITQRKFDNLTKAERGGLSELDKAGFIKRQLVETRQITKHVAQILDSRMNTKYDENDKLIREVKVITLKSKLVSDFRKDFQFYKVREINNYHHAHDAYLNAVVGTALIKKYPKLESEFVYGDYKVYDVRKMIAKSEQEIGKATAKYFFYSNIMNFFKTEITLANGEIRKRPLIETNGETGEIVWDKGRDFATVRKVLSMPQVNIVKKTEVQTGGFSKESILPKRNSDKLIARKKDWDPKKYGGFDSPTVAYSVLVVAKVEKGKSKKLKSVKELLGITIMERSSFEKNPIDFLEAKGYKEVKKDLIIKLPKYSLFELENGRKRMLASAGELQKGNELALPSKYVNFLYLASHYEKLKGSPEDNEQKQLFVEQHKHYLDEIIEQISEFSKRVILADANLDKVLSAYNKHRDKPIREQAENIIHLFTLTNLGAPAAFKYFDTTIDRKRYTSTKEVLDATLIHQSITGLYETRIDLSQLGGDGGPAPGGSGGGGGLLGRDLLTKLKAQIQFSTEGPQVTWEDRPAMCLVLNLEEEYRLHEKPVPPSIDPSWLQLFPMVWAEKAGMGLANQVPPVVVELKSDASPVAVRQYPMSKEAREGIRPHIQRFLDLGILVPCQSPWNTPLLPVKKPGTNDYRPVQDLREVNKRVQDIHPTVPNPYNLLSSLPPSHTWYSVLDLKDAFFCLKLHPNSQPLFAFEWRDPEKGNTGQLTWTRLPQGFKNSPTLFNEALHRDLASFRALNPQVVMLQYVDDLLVAAPTYRDCKEGTRRLLQELSKLGYRVSAKKAQLCREEVTYLGYLLKGGKRWLTPARKATVMKIPTPTTPRQVREFLGTAGFCRLWIPGFASLAAPLYPLTRPKVPFTWTEAHQEAFGRIKEALLSAPALALPDLTKPFALYVDEKEGVARGVLTQTLGPWRRPVAYLSKKLDPVASGWPTCLKAIAAVALLLKDADKLTLGQNVLVIAPHNLESIVRQPPDRWMTNARMTHYQSLLLNERVSFAPPAILNPATLLPVESDDTPIHICSEILAEETGTRPDLRDQPLPGVPAWYTDGSSFIMDGRRQAGAAIVDNKRTVWASNLPEGTSAQKAELIALTQALRLAEGKSINIYTDSRYAFATAHVHGAIYKQRGWLTSAGKDIKNKEEILALLEAIHLPKRVAIIHCPGHQRGTDPVATGNRKADEAAKQAAQSTRILTETTKNAGKRTADGSEFEKRTADGSEFESPKKKAKVE

SEQ ID NO: 1653 - protein, 2125 aa, synthetic construct
MPAAKRVKLDGGDKKYSIGLDIGTNSVGWAVITDEYKVPSKKFKVLGNTDRHSIKKNLIGALLFDSGETAEATRLKRTARRRYTRRKNRICYLQEIFSNEMAKVDDSFFHRLEESFLVEEDKKHERHPIFGNIVDEVAYHEKYPTIYHLRKKLVDSTDKADLRLIYLALAHMIKFRGHFLIEGDLNPDNSDVDKLFIQLVQTYNQLFEENPINASGVDAKAILSARLSKSRRLENLIAQLPGEKKNGLFGNLIALSLGLTPNFKSNFDLAEDAKLQLSKDTYDDDLDNLLAQIGDQYADLFLAAKNLSDAILLSDILRVNTEITKAPLSASMIKRYDEHHQDLTLLKALVRQQLPEKYKEIFFDQSKNGYAGYIDGGASQEEFYKFIKPILEKMDGTEELLVKLNREDLLRKQRTFDNGSIPHQIHLGELHAILRRQEDFYPFLKDNREKIEKILTFRIPYYVGPLARGNSRFAWMTRKSEETITPWNFEEVVDKGASAQSFIERMTNFDKNLPNEKVLPKHSLLYEYFTVYNELTKVKYVTEGMRKPAFLSGEQKKAIVDLLFKTNRKVTVKQLKEDYFKKIECFDSVEISGVEDRFNASLGTYHDLLKIIKDKDFLDNEENEDILEDIVLTLTLFEDREMIEERLKTYAHLFDDKVMKQLKRRRYTGWGRLSRKLINGIRDKQSGKTILDFLKSDGFANRNFMQLIHDDSLTFKEDIQKAQVSGQGDSLHEHIANLAGSPAIKKGILQTVKVVDELVKVMGRHKPENIVIEMARENQTTQKGQKNSRERMKRIEEGIKELGSQILKEHPVENTQLQNEKLYLYYLQNGRDMYVDQELDINRLSDYDVDHIVPQSFLKDDSIDNKVLTRSDKARGKSDNVPSEEVVKKMKNYWRQLLNAKLITQRKFDNLTKAERGGLSELDKAGFIKRQLVETRQITKHVAQILDSRMNTKYDENDKLIREVKVITLKSKLVSDFRKDFQFYKVREINNYHHAHDAYLNAVVGTALIKKYPKLESEFVYGDYKVYDVRKMIAKSEQEIGKATAKYFFYSNIMNFFKTEITLANGEIRKRPLIETNGETGEIVWDKGRDFATVRKVLSMPQVNIVKKTEVQTGGFSKESILPKRNSDKLIARKKDWDPKKYGGFDSPTVAYSVLVVAKVEKGKSKKLKSVKELLGITIMERSSFEKNPIDFLEAKGYKEVKKDLIIKLPKYSLFELENGRKRMLASAGELQKGNELALPSKYVNFLYLASHYEKLKGSPEDNEQKQLFVEQHKHYLDEIIEQISEFSKRVILADANLDKVLSAYNKHRDKPIREQAENIIHLFTLTNLGAPAAFKYFDTTIDRKRYTSTKEVLDATLIHQSITGLYETRIDLSQLGGDGGGGGGGSPAPGGLLGRDLLTKLKAQIQFSTEGPQVTWEDRPAMCLVLNLEEEYRLHEKPVPPSIDPSWLQLFPMVWAEKAGMGLANQVPPVVVELKSDASPVAVRQYPMSKEAREGIRPHIQRFLDLGILVPCQSPWNTPLLPVKKPGTNDYRPVQDLREVNKRVQDIHPTVPNPYNLLSSLPPSHTWYSVLDLKDAFFCLKLHPNSQPLFAFEWRDPEKGNTGQLTWTRLPQGFKNSPTLFNEALHRDLASFRALNPQVVMLQYVDDLLVAAPTYRDCKEGTRRLLQELSKLGYRVSAKKAQLCREEVTYLGYLLKGGKRWLTPARKATVMKIPTPTTPRQVREFLGTAGFCRLWIPGFASLAAPLYPLTRPKVPFTWTEAHQEAFGRIKEALLSAPALALPDLTKPFALYVDEKEGVARGVLTQTLGPWRRPVAYLSKKLDPVASGWPTCLKAIAAVALLLKDADKLTLGQNVLVIAPHNLESIVRQPPDRWMTNARMTHYQSLLLNERVSFAPPAILNPATLLPVESDDTPIHICSEILAEETGTRPDLRDQPLPGVPAWYTDGSSFIMDGRRQAGAAIVDNKRTVWASNLPEGTSAQKAELIALTQALRLAEGKSINIYTDSRYAFATAHVHGAIYKQRGWLTSAGKDIKNKEEILALLEAIHLPKRVAIIHCPGHQRGTDPVATGNRKADEAAKQAAQSTRILTETTKNAGKRTADGSEFEKRTADGSEFESPKKKAKVE

SEQ ID NO: 1654 - protein, 2127 aa, synthetic construct
MPAAKRVKLDGGDKKYSIGLDIGTNSVGWAVITDEYKVPSKKFKVLGNTDRHSIKKNLIGALLFDSGETAEATRLKRTARRRYTRRKNRICYLQEIFSNEMAKVDDSFFHRLEESFLVEEDKKHERHPIFGNIVDEVAYHEKYPTIYHLRKKLVDSTDKADLRLIYLALAHMIKFRGHFLIEGDLNPDNSDVDKLFIQLVQTYNQLFEENPINASGVDAKAILSARLSKSRRLENLIAQLPGEKKNGLFGNLIALSLGLTPNFKSNFDLAEDAKLQLSKDTYDDDLDNLLAQIGDQYADLFLAAKNLSDAILLSDILRVNTEITKAPLSASMIKRYDEHHQDLTLLKALVRQQLPEKYKEIFFDQSKNGYAGYIDGGASQEEFYKFIKPILEKMDGTEELLVKLNREDLLRKQRTFDNGSIPHQIHLGELHAILRRQEDFYPFLKDNREKIEKILTFRIPYYVGPLARGNSRFAWMTRKSEETITPWNFEEVVDKGASAQSFIERMTNFDKNLPNEKVLPKHSLLYEYFTVYNELTKVKYVTEGMRKPAFLSGEQKKAIVDLLFKTNRKVTVKQLKEDYFKKIECFDSVEISGVEDRFNASLGTYHDLLKIIKDKDFLDNEENEDILEDIVLTLTLFEDREMIEERLKTYAHLFDDKVMKQLKRRRYTGWGRLSRKLINGIRDKQSGKTILDFLKSDGFANRNFMQLIHDDSLTFKEDIQKAQVSGQGDSLHEHIANLAGSPAIKKGILQTVKVVDELVKVMGRHKPENIVIEMARENQTTQKGQKNSRERMKRIEEGIKELGSQILKEHPVENTQLQNEKLYLYYLQNGRDMYVDQELDINRLSDYDVDHIVPQSFLKDDSIDNKVLTRSDKARGKSDNVPSEEVVKKMKNYWRQLLNAKLITQRKFDNLTKAERGGLSELDKAGFIKRQLVETRQITKHVAQILDSRMNTKYDENDKLIREVKVITLKSKLVSDFRKDFQFYKVREINNYHHAHDAYLNAVVGTALIKKYPKLESEFVYGDYKVYDVRKMIAKSEQEIGKATAKYFFYSNIMNFFKTEITLANGEIRKRPLIETNGETGEIVWDKGRDFATVRKVLSMPQVNIVKKTEVQTGGFSKESILPKRNSDKLIARKKDWDPKKYGGFDSPTVAYSVLVVAKVEKGKSKKLKSVKELLGITIMERSSFEKNPIDFLEAKGYKEVKKDLIIKLPKYSLFELENGRKRMLASAGELQKGNELALPSKYVNFLYLASHYEKLKGSPEDNEQKQLFVEQHKHYLDEIIEQISEFSKRVILADANLDKVLSAYNKHRDKPIREQAENIIHLFTLTNLGAPAAFKYFDTTIDRKRYTSTKEVLDATLIHQSITGLYETRIDLSQLGGDGGGGSEAAAKPAPGGLLGRDLLTKLKAQIQFSTEGPQVTWEDRPAMCLVLNLEEEYRLHEKPVPPSIDPSWLQLFPMVWAEKAGMGLANQVPPVVVELKSDASPVAVRQYPMSKEAREGIRPHIQRFLDLGILVPCQSPWNTPLLPVKKPGTNDYRPVQDLREVNKRVQDIHPTVPNPYNLLSSLPPSHTWYSVLDLKDAFFCLKLHPNSQPLFAFEWRDPEKGNTGQLTWTRLPQGFKNSPTLFNEALHRDLASFRALNPQVVMLQYVDDLLVAAPTYRDCKEGTRRLLQELSKLGYRVSAKKAQLCREEVTYLGYLLKGGKRWLTPARKATVMKIPTPTTPRQVREFLGTAGFCRLWIPGFASLAAPLYPLTRPKVPFTWTEAHQEAFGRIKEALLSAPALALPDLTKPFALYVDEKEGVARGVLTQTLGPWRRPVAYLSKKLDPVASGWPTCLKAIAAVALLLKDADKLTLGQNVLVIAPHNLESIVRQPPDRWMTNARMTHYQSLLLNERVSFAPPAILNPATLLPVESDDTPIHICSEILAEETGTRPDLRDQPLPGVPAWYTDGSSFIMDGRRQAGAAIVDNKRTVWASNLPEGTSAQKAELIALTQALRLAEGKSINIYTDSRYAFATAHVHGAIYKQRGWLTSAGKDIKNKEEILALLEAIHLPKRVAIIHCPGHQRGTDPVATGNRKADEAAKQAAQSTRILTETTKNAGKRTADGSEFEKRTADGSEFESPKKKAKVE

SEQ ID NO: 1655 - protein, 2125 aa, synthetic construct
MPAAKRVKLDGGDKKYSIGLDIGTNSVGWAVITDEYKVPSKKFKVLGNTDRHSIKKNLIGALLFDSGETAEATRLKRTARRRYTRRKNRICYLQEIFSNEMAKVDDSFFHRLEESFLVEEDKKHERHPIFGNIVDEVAYHEKYPTIYHLRKKLVDSTDKADLRLIYLALAHMIKFRGHFLIEGDLNPDNSDVDKLFIQLVQTYNQLFEENPINASGVDAKAILSARLSKSRRLENLIAQLPGEKKNGLFGNLIALSLGLTPNFKSNFDLAEDAKLQLSKDTYDDDLDNLLAQIGDQYADLFLAAKNLSDAILLSDILRVNTEITKAPLSASMIKRYDEHHQDLTLLKALVRQQLPEKYKEIFFDQSKNGYAGYIDGGASQEEFYKFIKPILEKMDGTEELLVKLNREDLLRKQRTFDNGSIPHQIHLGELHAILRRQEDFYPFLKDNREKIEKILTFRIPYYVGPLARGNSRFAWMTRKSEETITPWNFEEVVDKGASAQSFIERMTNFDKNLPNEKVLPKHSLLYEYFTVYNELTKVKYVTEGMRKPAFLSGEQKKAIVDLLFKTNRKVTVKQLKEDYFKKIECFDSVEISGVEDRFNASLGTYHDLLKIIKDKDFLDNEENEDILEDIVLTLTLFEDREMIEERLKTYAHLFDDKVMKQLKRRRYTGWGRLSRKLINGIRDKQSGKTILDFLKSDGFANRNFMQLIHDDSLTFKEDIQKAQVSGQGDSLHEHIANLAGSPAIKKGILQTVKVVDELVKVMGRHKPENIVIEMARENQTTQKGQKNSRERMKRIEEGIKELGSQILKEHPVENTQLQNEKLYLYYLQNGRDMYVDQELDINRLSDYDVDHIVPQSFLKDDSIDNKVLTRSDKARGKSDNVPSEEVVKKMKNYWRQLLNAKLITQRKFDNLTKAERGGLSELDKAGFIKRQLVETRQITKHVAQILDSRMNTKYDENDKLIREVKVITLKSKLVSDFRKDFQFYKVREINNYHHAHDAYLNAVVGTALIKKYPKLESEFVYGDYKVYDVRKMIAKSEQEIGKATAKYFFYSNIMNFFKTEITLANGEIRKRPLIETNGETGEIVWDKGRDFATVRKVLSMPQVNIVKKTEVQTGGFSKESILPKRNSDKLIARKKDWDPKKYGGFDSPTVAYSVLVVAKVEKGKSKKLKSVKELLGITIMERSSFEKNPIDFLEAKGYKEVKKDLIIKLPKYSLFELENGRKRMLASAGELQKGNELALPSKYVNFLYLASHYEKLKGSPEDNEQKQLFVEQHKHYLDEIIEQISEFSKRVILADANLDKVLSAYNKHRDKPIREQAENIIHLFTLTNLGAPAAFKYFDTTIDRKRYTSTKEVLDATLIHQSITGLYETRIDLSQLGGDGGGGSGGSGGSGGLLGRDLLTKLKAQIQFSTEGPQVTWEDRPAMCLVLNLEEEYRLHEKPVPPSIDPSWLQLFPMVWAEKAGMGLANQVPPVVVELKSDASPVAVRQYPMSKEAREGIRPHIQRFLDLGILVPCQSPWNTPLLPVKKPGTNDYRPVQDLREVNKRVQDIHPTVPNPYNLLSSLPPSHTWYSVLDLKDAFFCLKLHPNSQPLFAFEWRDPEKGNTGQLTWTRLPQGFKNSPTLFNEALHRDLASFRALNPQVVMLQYVDDLLVAAPTYRDCKEGTRRLLQELSKLGYRVSAKKAQLCREEVTYLGYLLKGGKRWLTPARKATVMKIPTPTTPRQVREFLGTAGFCRLWIPGFASLAAPLYPLTRPKVPFTWTEAHQEAFGRIKEALLSAPALALPDLTKPFALYVDEKEGVARGVLTQTLGPWRRPVAYLSKKLDPVASGWPTCLKAIAAVALLLKDADKLTLGQNVLVIAPHNLESIVRQPPDRWMTNARMTHYQSLLLNERVSFAPPAILNPATLLPVESDDTPIHICSEILAEETGTRPDLRDQPLPGVPAWYTDGSSFIMDGRRQAGAAIVDNKRTVWASNLPEGTSAQKAELIALTQALRLAEGKSINIYTDSRYAFATAHVHGAIYKQRGWLTSAGKDIKNKEEILALLEAIHLPKRVAIIHCPGHQRGTDPVATGNRKADEAAKQAAQSTRILTETTKNAGKRTADGSEFEKRTADGSEFESPKKKAKVE

SEQ ID NO: 1656 - protein, 2127 aa, synthetic construct
MPAAKRVKLDGGDKKYSIGLDIGTNSVGWAVITDEYKVPSKKFKVLGNTDRHSIKKNLIGALLFDSGETAEATRLKRTARRRYTRRKNRICYLQEIFSNEMAKVDDSFFHRLEESFLVEEDKKHERHPIFGNIVDEVAYHEKYPTIYHLRKKLVDSTDKADLRLIYLALAHMIKFRGHFLIEGDLNPDNSDVDKLFIQLVQTYNQLFEENPINASGVDAKAILSARLSKSRRLENLIAQLPGEKKNGLFGNLIALSLGLTPNFKSNFDLAEDAKLQLSKDTYDDDLDNLLAQIGDQYADLFLAAKNLSDAILLSDILRVNTEITKAPLSASMIKRYDEHHQDLTLLKALVRQQLPEKYKEIFFDQSKNGYAGYIDGGASQEEFYKFIKPILEKMDGTEELLVKLNREDLLRKQRTFDNGSIPHQIHLGELHAILRRQEDFYPFLKDNREKIEKILTFRIPYYVGPLARGNSRFAWMTRKSEETITPWNFEEVVDKGASAQSFIERMTNFDKNLPNEKVLPKHSLLYEYFTVYNELTKVKYVTEGMRKPAFLSGEQKKAIVDLLFKTNRKVTVKQLKEDYFKKIECFDSVEISGVEDRFNASLGTYHDLLKIIKDKDFLDNEENEDILEDIVLTLTLFEDREMIEERLKTYAHLFDDKVMKQLKRRRYTGWGRLSRKLINGIRDKQSGKTILDFLKSDGFANRNFMQLIHDDSLTFKEDIQKAQVSGQGDSLHEHIANLAGSPAIKKGILQTVKVVDELVKVMGRHKPENIVIEMARENQTTQKGQKNSRERMKRIEEGIKELGSQILKEHPVENTQLQNEKLYLYYLQNGRDMYVDQELDINRLSDYDVDHIVPQSFLKDDSIDNKVLTRSDKARGKSDNVPSEEVVKKMKNYWRQLLNAKLITQRKFDNLTKAERGGLSELDKAGFIKRQLVETRQITKHVAQILDSRMNTKYDENDKLIREVKVITLKSKLVSDFRKDFQFYKVREINNYHHAHDAYLNAVVGTALIKKYPKLESEFVYGDYKVYDVRKMIAKSEQEIGKATAKYFFYSNIMNFFKTEITLANGEIRKRPLIETNGETGEIVWDKGRDFATVRKVLSMPQVNIVKKTEVQTGGFSKESILPKRNSDKLIARKKDWDPKKYGGFDSPTVAYSVLVVAKVEKGKSKKLKSVKELLGITIMERSSFEKNPIDFLEAKGYKEVKKDLIIKLPKYSLFELENGRKRMLASAGELQKGNELALPSKYVNFLYLASHYEKLKGSPEDNEQKQLFVEQHKHYLDEIIEQISEFSKRVILADANLDKVLSAYNKHRDKPIREQAENIIHLFTLTNLGAPAAFKYFDTTIDRKRYTSTKEVLDATLIHQSITGLYETRIDLSQLGGDGGPAPEAAAKGSSGGLLGRDLLTKLKAQIQFSTEGPQVTWEDRPAMCLVLNLEEEYRLHEKPVPPSIDPSWLQLFPMVWAEKAGMGLANQVPPVVVELKSDASPVAVRQYPMSKEAREGIRPHIQRFLDLGILVPCQSPWNTPLLPVKKPGTNDYRPVQDLREVNKRVQDIHPTVPNPYNLLSSLPPSHTWYSVLDLKDAFFCLKLHPNSQPLFAFEWRDPEKGNTGQLTWTRLPQGFKNSPTLFNEALHRDLASFRALNPQVVMLQYVDDLLVAAPTYRDCKEGTRRLLQELSKLGYRVSAKKAQLCREEVTYLGYLLKGGKRWLTPARKATVMKIPTPTTPRQVREFLGTAGFCRLWIPGFASLAAPLYPLTRPKVPFTWTEAHQEAFGRIKEALLSAPALALPDLTKPFALYVDEKEGVARGVLTQTLGPWRRPVAYLSKKLDPVASGWPTCLKAIAAVALLLKDADKLTLGQNVLVIAPHNLESIVRQPPDRWMTNARMTHYQSLLLNERVSFAPPAILNPATLLPVESDDTPIHICSEILAEETGTRPDLRDQPLPGVPAWYTDGSSFIMDGRRQAGAAIVDNKRTVWASNLPEGTSAQKAELIALTQALRLAEGKSINIYTDSRYAFATAHVHGAIYKQRGWLTSAGKDIKNKEEILALLEAIHLPKRVAIIHCPGHQRGTDPVATGNRKADEAAKQAAQSTRILTETTKNAGKRTADGSEFEKRTADGSEFESPKKKAKVE

SEQ ID NO: 1657 - protein, 2122 aa, synthetic construct
MPAAKRVKLDGGDKKYSIGLDIGTNSVGWAVITDEYKVPSKKFKVLGNTDRHSIKKNLIGALLFDSGETAEATRLKRTARRRYTRRKNRICYLQEIFSNEMAKVDDSFFHRLEESFLVEEDKKHERHPIFGNIVDEVAYHEKYPTIYHLRKKLVDSTDKADLRLIYLALAHMIKFRGHFLIEGDLNPDNSDVDKLFIQLVQTYNQLFEENPINASGVDAKAILSARLSKSRRLENLIAQLPGEKKNGLFGNLIALSLGLTPNFKSNFDLAEDAKLQLSKDTYDDDLDNLLAQIGDQYADLFLAAKNLSDAILLSDILRVNTEITKAPLSASMIKRYDEHHQDLTLLKALVRQQLPEKYKEIFFDQSKNGYAGYIDGGASQEEFYKFIKPILEKMDGTEELLVKLNREDLLRKQRTFDNGSIPHQIHLGELHAILRRQEDFYPFLKDNREKIEKILTFRIPYYVGPLARGNSRFAWMTRKSEETITPWNFEEVVDKGASAQSFIERMTNFDKNLPNEKVLPKHSLLYEYFTVYNELTKVKYVTEGMRKPAFLSGEQKKAIVDLLFKTNRKVTVKQLKEDYFKKIECFDSVEISGVEDRFNASLGTYHDLLKIIKDKDFLDNEENEDILEDIVLTLTLFEDREMIEERLKTYAHLFDDKVMKQLKRRRYTGWGRLSRKLINGIRDKQSGKTILDFLKSDGFANRNFMQLIHDDSLTFKEDIQKAQVSGQGDSLHEHIANLAGSPAIKKGILQTVKVVDELVKVMGRHKPENIVIEMARENQTTQKGQKNSRERMKRIEEGIKELGSQILKEHPVENTQLQNEKLYLYYLQNGRDMYVDQELDINRLSDYDVDHIVPQSFLKDDSIDNKVLTRSDKARGKSDNVPSEEVVKKMKNYWRQLLNAKLITQRKFDNLTKAERGGLSELDKAGFIKRQLVETRQITKHVAQILDSRMNTKYDENDKLIREVKVITLKSKLVSDFRKDFQFYKVREINNYHHAHDAYLNAVVGTALIKKYPKLESEFVYGDYKVYDVRKMIAKSEQEIGKATAKYFFYSNIMNFFKTEITLANGEIRKRPLIETNGETGEIVWDKGRDFATVRKVLSMPQVNIVKKTEVQTGGFSKESILPKRNSDKLIARKKDWDPKKYGGFDSPTVAYSVLVVAKVEKGKSKKLKSVKELLGITIMERSSFEKNPIDFLEAKGYKEVKKDLIIKLPKYSLFELENGRKRMLASAGELQKGNELALPSKYVNFLYLASHYEKLKGSPEDNEQKQLFVEQHKHYLDEIIEQISEFSKRVILADANLDKVLSAYNKHRDKPIREQAENIIHLFTLTNLGAPAAFKYFDTTIDRKRYTSTKEVLDATLIHQSITGLYETRIDLSQLGGDGGGGGGSSGGLLGRDLLTKLKAQIQFSTEGPQVTWEDRPAMCLVLNLEEEYRLHEKPVPPSIDPSWLQLFPMVWAEKAGMGLANQVPPVVVELKSDASPVAVRQYPMSKEAREGIRPHIQRFLDLGILVPCQSPWNTPLLPVKKPGTNDYRPVQDLREVNKRVQDIHPTVPNPYNLLSSLPPSHTWYSVLDLKDAFFCLKLHPNSQPLFAFEWRDPEKGNTGQLTWTRLPQGFKNSPTLFNEALHRDLASFRALNPQVVMLQYVDDLLVAAPTYRDCKEGTRRLLQELSKLGYRVSAKKAQLCREEVTYLGYLLKGGKRWLTPARKATVMKIPTPTTPRQVREFLGTAGFCRLWIPGFASLAAPLYPLTRPKVPFTWTEAHQEAFGRIKEALLSAPALALPDLTKPFALYVDEKEGVARGVLTQTLGPWRRPVAYLSKKLDPVASGWPTCLKAIAAVALLLKDADKLTLGQNVLVIAPHNLESIVRQPPDRWMTNARMTHYQSLLLNERVSFAPPAILNPATLLPVESDDTPIHICSEILAEETGTRPDLRDQPLPGVPAWYTDGSSFIMDGRRQAGAAIVDNKRTVWASNLPEGTSAQKAELIALTQALRLAEGKSINIYTDSRYAFATAHVHGAIYKQRGWLTSAGKDIKNKEEILALLEAIHLPKRVAIIHCPGHQRGTDPVATGNRKADEAAKQAAQSTRILTETTKNAGKRTADGSEFEKRTADGSEFESPKKKAKVE

SEQ ID NO: 1658 - protein, 2125 aa, synthetic construct
MPAAKRVKLDGGDKKYSIGLDIGTNSVGWAVITDEYKVPSKKFKVLGNTDRHSIKKNLIGALLFDSGETAEATRLKRTARRRYTRRKNRICYLQEIFSNEMAKVDDSFFHRLEESFLVEEDKKHERHPIFGNIVDEVAYHEKYPTIYHLRKKLVDSTDKADLRLIYLALAHMIKFRGHFLIEGDLNPDNSDVDKLFIQLVQTYNQLFEENPINASGVDAKAILSARLSKSRRLENLIAQLPGEKKNGLFGNLIALSLGLTPNFKSNFDLAEDAKLQLSKDTYDDDLDNLLAQIGDQYADLFLAAKNLSDAILLSDILRVNTEITKAPLSASMIKRYDEHHQDLTLLKALVRQQLPEKYKEIFFDQSKNGYAGYIDGGASQEEFYKFIKPILEKMDGTEELLVKLNREDLLRKQRTFDNGSIPHQIHLGELHAILRRQEDFYPFLKDNREKIEKILTFRIPYYVGPLARGNSRFAWMTRKSEETITPWNFEEVVDKGASAQSFIERMTNFDKNLPNEKVLPKHSLLYEYFTVYNELTKVKYVTEGMRKPAFLSGEQKKAIVDLLFKTNRKVTVKQLKEDYFKKIECFDSVEISGVEDRFNASLGTYHDLLKIIKDKDFLDNEENEDILEDIVLTLTLFEDREMIEERLKTYAHLFDDKVMKQLKRRRYTGWGRLSRKLINGIRDKQSGKTILDFLKSDGFANRNFMQLIHDDSLTFKEDIQKAQVSGQGDSLHEHIANLAGSPAIKKGILQTVKVVDELVKVMGRHKPENIVIEMARENQTTQKGQKNSRERMKRIEEGIKELGSQILKEHPVENTQLQNEKLYLYYLQNGRDMYVDQELDINRLSDYDVDHIVPQSFLKDDSIDNKVLTRSDKARGKSDNVPSEEVVKKMKNYWRQLLNAKLITQRKFDNLTKAERGGLSELDKAGFIKRQLVETRQITKHVAQILDSRMNTKYDENDKLIREVKVITLKSKLVSDFRKDFQFYKVREINNYHHAHDAYLNAVVGTALIKKYPKLESEFVYGDYKVYDVRKMIAKSEQEIGKATAKYFFYSNIMNFFKTEITLANGEIRKRPLIETNGETGEIVWDKGRDFATVRKVLSMPQVNIVKKTEVQTGGFSKESILPKRNSDKLIARKKDWDPKKYGGFDSPTVAYSVLVVAKVEKGKSKKLKSVKELLGITIMERSSFEKNPIDFLEAKGYKEVKKDLIIKLPKYSLFELENGRKRMLASAGELQKGNELALPSKYVNFLYLASHYEKLKGSPEDNEQKQLFVEQHKHYLDEIIEQISEFSKRVILADANLDKVLSAYNKHRDKPIREQAENIIHLFTLTNLGAPAAFKYFDTTIDRKRYTSTKEVLDATLIHQSITGLYETRIDLSQLGGDGGPAPGGSGSSGGLLGRDLLTKLKAQIQFSTEGPQVTWEDRPAMCLVLNLEEEYRLHEKPVPPSIDPSWLQLFPMVWAEKAGMGLANQVPPVVVELKSDASPVAVRQYPMSKEAREGIRPHIQRFLDLGILVPCQSPWNTPLLPVKKPGTNDYRPVQDLREVNKRVQDIHPTVPNPYNLLSSLPPSHTWYSVLDLKDAFFCLKLHPNSQPLFAFEWRDPEKGNTGQLTWTRLPQGFKNSPTLFNEALHRDLASFRALNPQVVMLQYVDDLLVAAPTYRDCKEGTRRLLQELSKLGYRVSAKKAQLCREEVTYLGYLLKGGKRWLTPARKATVMKIPTPTTPRQVREFLGTAGFCRLWIPGFASLAAPLYPLTRPKVPFTWTEAHQEAFGRIKEALLSAPALALPDLTKPFALYVDEKEGVARGVLTQTLGPWRRPVAYLSKKLDPVASGWPTCLKAIAAVALLLKDADKLTLGQNVLVIAPHNLESIVRQPPDRWMTNARMTHYQSLLLNERVSFAPPAILNPATLLPVESDDTPIHICSEILAEETGTRPDLRDQPLPGVPAWYTDGSSFIMDGRRQAGAAIVDNKRTVWASNLPEGTSAQKAELIALTQALRLAEGKSINIYTDSRYAFATAHVHGAIYKQRGWLTSAGKDIKNKEEILALLEAIHLPKRVAIIHCPGHQRGTDPVATGNRKADEAAKQAAQSTRILTETTKNAGKRTADGSEFEKRTADGSEFESPKKKAKVE

SEQ ID NO: 1659 - protein, 2127 aa, synthetic construct
MPAAKRVKLDGGDKKYSIGLDIGTNSVGWAVITDEYKVPSKKFKVLGNTDRHSIKKNLIGALLFDSGETAEATRLKRTARRRYTRRKNRICYLQEIFSNEMAKVDDSFFHRLEESFLVEEDKKHERHPIFGNIVDEVAYHEKYPTIYHLRKKLVDSTDKADLRLIYLALAHMIKFRGHFLIEGDLNPDNSDVDKLFIQLVQTYNQLFEENPINASGVDAKAILSARLSKSRRLENLIAQLPGEKKNGLFGNLIALSLGLTPNFKSNFDLAEDAKLQLSKDTYDDDLDNLLAQIGDQYADLFLAAKNLSDAILLSDILRVNTEITKAPLSASMIKRYDEHHQDLTLLKALVRQQLPEKYKEIFFDQSKNGYAGYIDGGASQEEFYKFIKPILEKMDGTEELLVKLNREDLLRKQRTFDNGSIPHQIHLGELHAILRRQEDFYPFLKDNREKIEKILTFRIPYYVGPLARGNSRFAWMTRKSEETITPWNFEEVVDKGASAQSFIERMTNFDKNLPNEKVLPKHSLLYEYFTVYNELTKVKYVTEGMRKPAFLSGEQKKAIVDLLFKTNRKVTVKQLKEDYFKKIECFDSVEISGVEDRFNASLGTYHDLLKIIKDKDFLDNEENEDILEDIVLTLTLFEDREMIEERLKTYAHLFDDKVMKQLKRRRYTGWGRLSRKLINGIRDKQSGKTILDFLKSDGFANRNFMQLIHDDSLTFKEDIQKAQVSGQGDSLHEHIANLAGSPAIKKGILQTVKVVDELVKVMGRHKPENIVIEMARENQTTQKGQKNSRERMKRIEEGIKELGSQILKEHPVENTQLQNEKLYLYYLQNGRDMYVDQELDINRLSDYDVDHIVPQSFLKDDSIDNKVLTRSDKARGKSDNVPSEEVVKKMKNYWRQLLNAKLITQRKFDNLTKAERGGLSELDKAGFIKRQLVETRQITKHVAQILDSRMNTKYDENDKLIREVKVITLKSKLVSDFRKDFQFYKVREINNYHHAHDAYLNAVVGTALIKKYPKLESEFVYGDYKVYDVRKMIAKSEQEIGKATAKYFFYSNIMNFFKTEITLANGEIRKRPLIETNGETGEIVWDKGRDFATVRKVLSMPQVNIVKKTEVQTGGFSKESILPKRNSDKLIARKKDWDPKKYGGFDSPTVAYSVLVVAKVEKGKSKKLKSVKELLGITIMERSSFEKNPIDFLEAKGYKEVKKDLIIKLPKYSLFELENGRKRMLASAGELQKGNELALPSKYVNFLYLASHYEKLKGSPEDNEQKQLFVEQHKHYLDEIIEQISEFSKRVILADANLDKVLSAYNKHRDKPIREQAENIIHLFTLTNLGAPAAFKYFDTTIDRKRYTSTKEVLDATLIHQSITGLYETRIDLSQLGGDGGGGSGGGEAAAKGGLLGRDLLTKLKAQIQFSTEGPQVTWEDRPAMCLVLNLEEEYRLHEKPVPPSIDPSWLQLFPMVWAEKAGMGLANQVPPVVVELKSDASPVAVRQYPMSKEAREGIRPHIQRFLDLGILVPCQSPWNTPLLPVKKPGTNDYRPVQDLREVNKRVQDIHPTVPNPYNLLSSLPPSHTWYSVLDLKDAFFCLKLHPNSQPLFAFEWRDPEKGNTGQLTWTRLPQGFKNSPTLFNEALHRDLASFRALNPQVVMLQYVDDLLVAAPTYRDCKEGTRRLLQELSKLGYRVSAKKAQLCREEVTYLGYLLKGGKRWLTPARKATVMKIPTPTTPRQVREFLGTAGFCRLWIPGFASLAAPLYPLTRPKVPFTWTEAHQEAFGRIKEALLSAPALALPDLTKPFALYVDEKEGVARGVLTQTLGPWRRPVAYLSKKLDPVASGWPTCLKAIAAVALLLKDADKLTLGQNVLVIAPHNLESIVRQPPDRWMTNARMTHYQSLLLNERVSFAPPAILNPATLLPVESDDTPIHICSEILAEETGTRPDLRDQPLPGVPAWYTDGSSFIMDGRRQAGAAIVDNKRTVWASNLPEGTSAQKAELIALTQALRLAEGKSINIYTDSRYAFATAHVHGAIYKQRGWLTSAGKDIKNKEEILALLEAIHLPKRVAIIHCPGHQRGTDPVATGNRKADEAAKQAAQSTRILTETTKNAGKRTADGSEFEKRTADGSEFESPKKKAKVE

SEQ ID NO: 1660 - protein, 2132 aa, synthetic construct
MPAAKRVKLDGGDKKYSIGLDIGTNSVGWAVITDEYKVPSKKFKVLGNTDRHSIKKNLIGALLFDSGETAEATRLKRTARRRYTRRKNRICYLQEIFSNEMAKVDDSFFHRLEESFLVEEDKKHERHPIFGNIVDEVAYHEKYPTIYHLRKKLVDSTDKADLRLIYLALAHMIKFRGHFLIEGDLNPDNSDVDKLFIQLVQTYNQLFEENPINASGVDAKAILSARLSKSRRLENLIAQLPGEKKNGLFGNLIALSLGLTPNFKSNFDLAEDAKLQLSKDTYDDDLDNLLAQIGDQYADLFLAAKNLSDAILLSDILRVNTEITKAPLSASMIKRYDEHHQDLTLLKALVRQQLPEKYKEIFFDQSKNGYAGYIDGGASQEEFYKFIKPILEKMDGTEELLVKLNREDLLRKQRTFDNGSIPHQIHLGELHAILRRQEDFYPFLKDNREKIEKILTFRIPYYVGPLARGNSRFAWMTRKSEETITPWNFEEVVDKGASAQSFIERMTNFDKNLPNEKVLPKHSLLYEYFTVYNELTKVKYVTEGMRKPAFLSGEQKKAIVDLLFKTNRKVTVKQLKEDYFKKIECFDSVEISGVEDRFNASLGTYHDLLKIIKDKDFLDNEENEDILEDIVLTLTLFEDREMIEERLKTYAHLFDDKVMKQLKRRRYTGWGRLSRKLINGIRDKQSGKTILDFLKSDGFANRNFMQLIHDDSLTFKEDIQKAQVSGQGDSLHEHIANLAGSPAIKKGILQTVKVVDELVKVMGRHKPENIVIEMARENQTTQKGQKNSRERMKRIEEGIKELGSQILKEHPVENTQLQNEKLYLYYLQNGRDMYVDQELDINRLSDYDVDHIVPQSFLKDDSIDNKVLTRSDKARGKSDNVPSEEVVKKMKNYWRQLLNAKLITQRKFDNLTKAERGGLSELDKAGFIKRQLVETRQITKHVAQILDSRMNTKYDENDKLIREVKVITLKSKLVSDFRKDFQFYKVREINNYHHAHDAYLNAVVGTALIKKYPKLESEFVYGDYKVYDVRKMIAKSEQEIGKATAKYFFYSNIMNFFKTEITLANGEIRKRPLIETNGETGEIVWDKGRDFATVRKVLSMPQVNIVKKTEVQTGGFSKESILPKRNSDKLIARKKDWDPKKYGGFDSPTVAYSVLVVAKVEKGKSKKLKSVKELLGITIMERSSFEKNPIDFLEAKGYKEVKKDLIIKLPKYSLFELENGRKRMLASAGELQKGNELALPSKYVNFLYLASHYEKLKGSPEDNEQKQLFVEQHKHYLDEIIEQISEFSKRVILADANLDKVLSAYNKHRDKPIREQAENIIHLFTLTNLGAPAAFKYFDTTIDRKRYTSTKEVLDATLIHQSITGLYETRIDLSQLGGDGGSGSETPGTSESATPESGGLLGRDLLTKLKAQIQFSTEGPQVTWEDRPAMCLVLNLEEEYRLHEKPVPPSIDPSWLQLFPMVWAEKAGMGLANQVPPVVVELKSDASPVAVRQYPMSKEAREGIRPHIQRFLDLGILVPCQSPWNTPLLPVKKPGTNDYRPVQDLREVNKRVQDIHPTVPNPYNLLSSLPPSHTWYSVLDLKDAFFCLKLHPNSQPLFAFEWRDPEKGNTGQLTWTRLPQGFKNSPTLFNEALHRDLASFRALNPQVVMLQYVDDLLVAAPTYRDCKEGTRRLLQELSKLGYRVSAKKAQLCREEVTYLGYLLKGGKRWLTPARKATVMKIPTPTTPRQVREFLGTAGFCRLWIPGFASLAAPLYPLTRPKVPFTWTEAHQEAFGRIKEALLSAPALALPDLTKPFALYVDEKEGVARGVLTQTLGPWRRPVAYLSKKLDPVASGWPTCLKAIAAVALLLKDADKLTLGQNVLVIAPHNLESIVRQPPDRWMTNARMTHYQSLLLNERVSFAPPAILNPATLLPVESDDTPIHICSEILAEETGTRPDLRDQPLPGVPAWYTDGSSFIMDGRRQAGAAIVDNKRTVWASNLPEGTSAQKAELIALTQALRLAEGKSINIYTDSRYAFATAHVHGAIYKQRGWLTSAGKDIKNKEEILALLEAIHLPKRVAIIHCPGHQRGTDPVATGNRKADEAAKQAAQSTRILTETTKNAGKRTADGSEFEKRTADGSEFESPKKKAKVE

SEQ ID NO: 1661 - protein, 2125 aa, synthetic construct
MPAAKRVKLDGGDKKYSIGLDIGTNSVGWAVITDEYKVPSKKFKVLGNTDRHSIKKNLIGALLFDSGETAEATRLKRTARRRYTRRKNRICYLQEIFSNEMAKVDDSFFHRLEESFLVEEDKKHERHPIFGNIVDEVAYHEKYPTIYHLRKKLVDSTDKADLRLIYLALAHMIKFRGHFLIEGDLNPDNSDVDKLFIQLVQTYNQLFEENPINASGVDAKAILSARLSKSRRLENLIAQLPGEKKNGLFGNLIALSLGLTPNFKSNFDLAEDAKLQLSKDTYDDDLDNLLAQIGDQYADLFLAAKNLSDAILLSDILRVNTEITKAPLSASMIKRYDEHHQDLTLLKALVRQQLPEKYKEIFFDQSKNGYAGYIDGGASQEEFYKFIKPILEKMDGTEELLVKLNREDLLRKQRTFDNGSIPHQIHLGELHAILRRQEDFYPFLKDNREKIEKILTFRIPYYVGPLARGNSRFAWMTRKSEETITPWNFEEVVDKGASAQSFIERMTNFDKNLPNEKVLPKHSLLYEYFTVYNELTKVKYVTEGMRKPAFLSGEQKKAIVDLLFKTNRKVTVKQLKEDYFKKIECFDSVEISGVEDRFNASLGTYHDLLKIIKDKDFLDNEENEDILEDIVLTLTLFEDREMIEERLKTYAHLFDDKVMKQLKRRRYTGWGRLSRKLINGIRDKQSGKTILDFLKSDGFANRNFMQLIHDDSLTFKEDIQKAQVSGQGDSLHEHIANLAGSPAIKKGILQTVKVVDELVKVMGRHKPENIVIEMARENQTTQKGQKNSRERMKRIEEGIKELGSQILKEHPVENTQLQNEKLYLYYLQNGRDMYVDQELDINRLSDYDVDHIVPQSFLKDDSIDNKVLTRSDKARGKSDNVPSEEVVKKMKNYWRQLLNAKLITQRKFDNLTKAERGGLSELDKAGFIKRQLVETRQITKHVAQILDSRMNTKYDENDKLIREVKVITLKSKLVSDFRKDFQFYKVREINNYHHAHDAYLNAVVGTALIKKYPKLESEFVYGDYKVYDVRKMIAKSEQEIGKATAKYFFYSNIMNFFKTEITLANGEIRKRPLIETNGETGEIVWDKGRDFATVRKVLSMPQVNIVKKTEVQTGGFSKESILPKRNSDKLIARKKDWDPKKYGGFDSPTVAYSVLVVAKVEKGKSKKLKSVKELLGITIMERSSFEKNPIDFLEAKGYKEVKKDLIIKLPKYSLFELENGRKRMLASAGELQKGNELALPSKYVNFLYLASHYEKLKGSPEDNEQKQLFVEQHKHYLDEIIEQISEFSKRVILADANLDKVLSAYNKHRDKPIREQAENIIHLFTLTNLGAPAAFKYFDTTIDRKRYTSTKEVLDATLIHQSITGLYETRIDLSQLGGDGGGSSGGSPAPGGLLGRDLLTKLKAQIQFSTEGPQVTWEDRPAMCLVLNLEEEYRLHEKPVPPSIDPSWLQLFPMVWAEKAGMGLANQVPPVVVELKSDASPVAVRQYPMSKEAREGIRPHIQRFLDLGILVPCQSPWNTPLLPVKKPGTNDYRPVQDLREVNKRVQDIHPTVPNPYNLLSSLPPSHTWYSVLDLKDAFFCLKLHPNSQPLFAFEWRDPEKGNTGQLTWTRLPQGFKNSPTLFNEALHRDLASFRALNPQVVMLQYVDDLLVAAPTYRDCKEGTRRLLQELSKLGYRVSAKKAQLCREEVTYLGYLLKGGKRWLTPARKATVMKIPTPTTPRQVREFLGTAGFCRLWIPGFASLAAPLYPLTRPKVPFTWTEAHQEAFGRIKEALLSAPALALPDLTKPFALYVDEKEGVARGVLTQTLGPWRRPVAYLSKKLDPVASGWPTCLKAIAAVALLLKDADKLTLGQNVLVIAPHNLESIVRQPPDRWMTNARMTHYQSLLLNERVSFAPPAILNPATLLPVESDDTPIHICSEILAEETGTRPDLRDQPLPGVPAWYTDGSSFIMDGRRQAGAAIVDNKRTVWASNLPEGTSAQKAELIALTQALRLAEGKSINIYTDSRYAFATAHVHGAIYKQRGWLTSAGKDIKNKEEILALLEAIHLPKRVAIIHCPGHQRGTDPVATGNRKADEAAKQAAQSTRILTETTKNAGKRTADGSEFEKRTADGSEFESPKKKAKVE

SEQ ID NO: 1662 - protein, 2146 aa, synthetic construct
MPAAKRVKLDGGDKKYSIGLDIGTNSVGWAVITDEYKVPSKKFKVLGNTDRHSIKKNLIGALLFDSGETAEATRLKRTARRRYTRRKNRICYLQEIFSNEMAKVDDSFFHRLEESFLVEEDKKHERHPIFGNIVDEVAYHEKYPTIYHLRKKLVDSTDKADLRLIYLALAHMIKFRGHFLIEGDLNPDNSDVDKLFIQLVQTYNQLFEENPINASGVDAKAILSARLSKSRRLENLIAQLPGEKKNGLFGNLIALSLGLTPNFKSNFDLAEDAKLQLSKDTYDDDLDNLLAQIGDQYADLFLAAKNLSDAILLSDILRVNTEITKAPLSASMIKRYDEHHQDLTLLKALVRQQLPEKYKEIFFDQSKNGYAGYIDGGASQEEFYKFIKPILEKMDGTEELLVKLNREDLLRKQRTFDNGSIPHQIHLGELHAILRRQEDFYPFLKDNREKIEKILTFRIPYYVGPLARGNSRFAWMTRKSEETITPWNFEEVVDKGASAQSFIERMTNFDKNLPNEKVLPKHSLLYEYFTVYNELTKVKYVTEGMRKPAFLSGEQKKAIVDLLFKTNRKVTVKQLKEDYFKKIECFDSVEISGVEDRFNASLGTYHDLLKIIKDKDFLDNEENEDILEDIVLTLTLFEDREMIEERLKTYAHLFDDKVMKQLKRRRYTGWGRLSRKLINGIRDKQSGKTILDFLKSDGFANRNFMQLIHDDSLTFKEDIQKAQVSGQGDSLHEHIANLAGSPAIKKGILQTVKVVDELVKVMGRHKPENIVIEMARENQTTQKGQKNSRERMKRIEEGIKELGSQILKEHPVENTQLQNEKLYLYYLQNGRDMYVDQELDINRLSDYDVDHIVPQSFLKDDSIDNKVLTRSDKARGKSDNVPSEEVVKKMKNYWRQLLNAKLITQRKFDNLTKAERGGLSELDKAGFIKRQLVETRQITKHVAQILDSRMNTKYDENDKLIREVKVITLKSKLVSDFRKDFQFYKVREINNYHHAHDAYLNAVVGTALIKKYPKLESEFVYGDYKVYDVRKMIAKSEQEIGKATAKYFFYSNIMNFFKTEITLANGEIRKRPLIETNGETGEIVWDKGRDFATVRKVLSMPQVNIVKKTEVQTGGFSKESILPKRNSDKLIARKKDWDPKKYGGFDSPTVAYSVLVVAKVEKGKSKKLKSVKELLGITIMERSSFEKNPIDFLEAKGYKEVKKDLIIKLPKYSLFELENGRKRMLASAGELQKGNELALPSKYVNFLYLASHYEKLKGSPEDNEQKQLFVEQHKHYLDEIIEQISEFSKRVILADANLDKVLSAYNKHRDKPIREQAENIIHLFTLTNLGAPAAFKYFDTTIDRKRYTSTKEVLDATLIHQSITGLYETRIDLSQLGGDGGGGGGSGGGGSGGGGSGGGGSGGGGSGGGGSGGLLGRDLLTKLKAQIQFSTEGPQVTWEDRPAMCLVLNLEEEYRLHEKPVPPSIDPSWLQLFPMVWAEKAGMGLANQVPPVVVELKSDASPVAVRQYPMSKEAREGIRPHIQRFLDLGILVPCQSPWNTPLLPVKKPGTNDYRPVQDLREVNKRVQDIHPTVPNPYNLLSSLPPSHTWYSVLDLKDAFFCLKLHPNSQPLFAFEWRDPEKGNTGQLTWTRLPQGFKNSPTLFNEALHRDLASFRALNPQVVMLQYVDDLLVAAPTYRDCKEGTRRLLQELSKLGYRVSAKKAQLCREEVTYLGYLLKGGKRWLTPARKATVMKIPTPTTPRQVREFLGKAGFCRLFIPGFASLAAPLYPLTRPKVPFTWTEAHQEAFGRIKEALLSAPALALPDLTKPFALYVDEKEGVARGVLTQTLGPWRRPVAYLSKKLDPVASGWPTCLKAIAAVALLLKDADKLTLGQNVLVIAPHNLESIVRQPPDRWMTNARMTHYQSLLLNERVSFAPPAILNPATLLPVESDDTPIHICSEILAEETGTRPDLRDQPLPGVPAWYTDGSSFIMDGRRQAGAAIVDNKRTVWASNLPEGTSAQKAELIALTQALRLAEGKSINIYTDSRYAFATAHVHGAIYKQRGWLTSAGKDIKNKEEILALLEAIHLPKRVAIIHCPGHQRGTDPVATGNRKADEAAKQAAQSTRILTETTKNAGKRTADGSEFEKRTADGSEFESPKKKAKVE

SEQ ID NO: 1663 - protein, 2127 aa, synthetic construct
MPAAKRVKLDGGDKKYSIGLDIGTNSVGWAVITDEYKVPSKKFKVLGNTDRHSIKKNLIGALLFDSGETAEATRLKRTARRRYTRRKNRICYLQEIFSNEMAKVDDSFFHRLEESFLVEEDKKHERHPIFGNIVDEVAYHEKYPTIYHLRKKLVDSTDKADLRLIYLALAHMIKFRGHFLIEGDLNPDNSDVDKLFIQLVQTYNQLFEENPINASGVDAKAILSARLSKSRRLENLIAQLPGEKKNGLFGNLIALSLGLTPNFKSNFDLAEDAKLQLSKDTYDDDLDNLLAQIGDQYADLFLAAKNLSDAILLSDILRVNTEITKAPLSASMIKRYDEHHQDLTLLKALVRQQLPEKYKEIFFDQSKNGYAGYIDGGASQEEFYKFIKPILEKMDGTEELLVKLNREDLLRKQRTFDNGSIPHQIHLGELHAILRRQEDFYPFLKDNREKIEKILTFRIPYYVGPLARGNSRFAWMTRKSEETITPWNFEEVVDKGASAQSFIERMTNFDKNLPNEKVLPKHSLLYEYFTVYNELTKVKYVTEGMRKPAFLSGEQKKAIVDLLFKTNRKVTVKQLKEDYFKKIECFDSVEISGVEDRFNASLGTYHDLLKIIKDKDFLDNEENEDILEDIVLTLTLFEDREMIEERLKTYAHLFDDKVMKQLKRRRYTGWGRLSRKLINGIRDKQSGKTILDFLKSDGFANRNFMQLIHDDSLTFKEDIQKAQVSGQGDSLHEHIANLAGSPAIKKGILQTVKVVDELVKVMGRHKPENIVIEMARENQTTQKGQKNSRERMKRIEEGIKELGSQILKEHPVENTQLQNEKLYLYYLQNGRDMYVDQELDINRLSDYDVDHIVPQSFLKDDSIDNKVLTRSDKARGKSDNVPSEEVVKKMKNYWRQLLNAKLITQRKFDNLTKAERGGLSELDKAGFIKRQLVETRQITKHVAQILDSRMNTKYDENDKLIREVKVITLKSKLVSDFRKDFQFYKVREINNYHHAHDAYLNAVVGTALIKKYPKLESEFVYGDYKVYDVRKMIAKSEQEIGKATAKYFFYSNIMNFFKTEITLANGEIRKRPLIETNGETGEIVWDKGRDFATVRKVLSMPQVNIVKKTEVQTGGFSKESILPKRNSDKLIARKKDWDPKKYGGFDSPTVAYSVLVVAKVEKGKSKKLKSVKELLGITIMERSSFEKNPIDFLEAKGYKEVKKDLIIKLPKYSLFELENGRKRMLASAGELQKGNELALPSKYVNFLYLASHYEKLKGSPEDNEQKQLFVEQHKHYLDEIIEQISEFSKRVILADANLDKVLSAYNKHRDKPIREQAENIIHLFTLTNLGAPAAFKYFDTTIDRKRYTSTKEVLDATLIHQSITGLYETRIDLSQLGGDGGPAPEAAAKGGGGGLLGRDLLTKLKAQIQFSTEGPQVTWEDRPAMCLVLNLEEEYRLHEKPVPPSIDPSWLQLFPMVWAEKAGMGLANQVPPVVVELKSDASPVAVRQYPMSKEAREGIRPHIQRFLDLGILVPCQSPWNTPLLPVKKPGTNDYRPVQDLREVNKRVQDIHPTVPNPYNLLSSLPPSHTWYSVLDLKDAFFCLKLHPNSQPLFAFEWRDPEKGNTGQLTWTRLPQGFKNSPTLFNEALHRDLASFRALNPQVVMLQYVDDLLVAAPTYRDCKEGTRRLLQELSKLGYRVSAKKAQLCREEVTYLGYLLKGGKRWLTPARKATVMKIPTPTTPRQVREFLGKAGFCRLFIPGFASLAAPLYPLTRPKVPFTWTEAHQEAFGRIKEALLSAPALALPDLTKPFALYVDEKEGVARGVLTQTLGPWRRPVAYLSKKLDPVASGWPTCLKAIAAVALLLKDADKLTLGQNVLVIAPHNLESIVRQPPDRWMTNARMTHYQSLLLNERVSFAPPAILNPATLLPVESDDTPIHICSEILAEETGTRPDLRDQPLPGVPAWYTDGSSFIMDGRRQAGAAIVDNKRTVWASNLPEGTSAQKAELIALTQALRLAEGKSINIYTDSRYAFATAHVHGAIYKQRGWLTSAGKDIKNKEEILALLEAIHLPKRVAIIHCPGHQRGTDPVATGNRKADEAAKQAAQSTRILTETTKNAGKRTADGSEFEKRTADGSEFESPKKKAKVE

SEQ ID NO: 1664 - protein, 2127 aa, synthetic construct
MPAAKRVKLDGGDKKYSIGLDIGTNSVGWAVITDEYKVPSKKFKVLGNTDRHSIKKNLIGALLFDSGETAEATRLKRTARRRYTRRKNRICYLQEIFSNEMAKVDDSFFHRLEESFLVEEDKKHERHPIFGNIVDEVAYHEKYPTIYHLRKKLVDSTDKADLRLIYLALAHMIKFRGHFLIEGDLNPDNSDVDKLFIQLVQTYNQLFEENPINASGVDAKAILSARLSKSRRLENLIAQLPGEKKNGLFGNLIALSLGLTPNFKSNFDLAEDAKLQLSKDTYDDDLDNLLAQIGDQYADLFLAAKNLSDAILLSDILRVNTEITKAPLSASMIKRYDEHHQDLTLLKALVRQQLPEKYKEIFFDQSKNGYAGYIDGGASQEEFYKFIKPILEKMDGTEELLVKLNREDLLRKQRTFDNGSIPHQIHLGELHAILRRQEDFYPFLKDNREKIEKILTFRIPYYVGPLARGNSRFAWMTRKSEETITPWNFEEVVDKGASAQSFIERMTNFDKNLPNEKVLPKHSLLYEYFTVYNELTKVKYVTEGMRKPAFLSGEQKKAIVDLLFKTNRKVTVKQLKEDYFKKIECFDSVEISGVEDRFNASLGTYHDLLKIIKDKDFLDNEENEDILEDIVLTLTLFEDREMIEERLKTYAHLFDDKVMKQLKRRRYTGWGRLSRKLINGIRDKQSGKTILDFLKSDGFANRNFMQLIHDDSLTFKEDIQKAQVSGQGDSLHEHIANLAGSPAIKKGILQTVKVVDELVKVMGRHKPENIVIEMARENQTTQKGQKNSRERMKRIEEGIKELGSQILKEHPVENTQLQNEKLYLYYLQNGRDMYVDQELDINRLSDYDVDHIVPQSFLKDDSIDNKVLTRSDKARGKSDNVPSEEVVKKMKNYWRQLLNAKLITQRKFDNLTKAERGGLSELDKAGFIKRQLVETRQITKHVAQILDSRMNTKYDENDKLIREVKVITLKSKLVSDFRKDFQFYKVREINNYHHAHDAYLNAVVGTALIKKYPKLESEFVYGDYKVYDVRKMIAKSEQEIGKATAKYFFYSNIMNFFKTEITLANGEIRKRPLIETNGETGEIVWDKGRDFATVRKVLSMPQVNIVKKTEVQTGGFSKESILPKRNSDKLIARKKDWDPKKYGGFDSPTVAYSVLVVAKVEKGKSKKLKSVKELLGITIMERSSFEKNPIDFLEAKGYKEVKKDLIIKLPKYSLFELENGRKRMLASAGELQKGNELALPSKYVNFLYLASHYEKLKGSPEDNEQKQLFVEQHKHYLDEIIEQISEFSKRVILADANLDKVLSAYNKHRDKPIREQAENIIHLFTLTNLGAPAAFKYFDTTIDRKRYTSTKEVLDATLIHQSITGLYETRIDLSQLGGDGGEAAAKGSSPAPGGLLGRDLLTKLKAQIQFSTEGPQVTWEDRPAMCLVLNLEEEYRLHEKPVPPSIDPSWLQLFPMVWAEKAGMGLANQVPPVVVELKSDASPVAVRQYPMSKEAREGIRPHIQRFLDLGILVPCQSPWNTPLLPVKKPGTNDYRPVQDLREVNKRVQDIHPTVPNPYNLLSSLPPSHTWYSVLDLKDAFFCLKLHPNSQPLFAFEWRDPEKGNTGQLTWTRLPQGFKNSPTLFNEALHRDLASFRALNPQVVMLQYVDDLLVAAPTYRDCKEGTRRLLQELSKLGYRVSAKKAQLCREEVTYLGYLLKGGKRWLTPARKATVMKIPTPTTPRQVREFLGKAGFCRLFIPGFASLAAPLYPLTRPKVPFTWTEAHQEAFGRIKEALLSAPALALPDLTKPFALYVDEKEGVARGVLTQTLGPWRRPVAYLSKKLDPVASGWPTCLKAIAAVALLLKDADKLTLGQNVLVIAPHNLESIVRQPPDRWMTNARMTHYQSLLLNERVSFAPPAILNPATLLPVESDDTPIHICSEILAEETGTRPDLRDQPLPGVPAWYTDGSSFIMDGRRQAGAAIVDNKRTVWASNLPEGTSAQKAELIALTQALRLAEGKSINIYTDSRYAFATAHVHGAIYKQRGWLTSAGKDIKNKEEILALLEAIHLPKRVAIIHCPGHQRGTDPVATGNRKADEAAKQAAQSTRILTETTKNAGKRTADGSEFEKRTADGSEFESPKKKAKVE

SEQ ID NO: 1665 - protein, 2131 aa, synthetic construct
MPAAKRVKLDGGDKKYSIGLDIGTNSVGWAVITDEYKVPSKKFKVLGNTDRHSIKKNLIGALLFDSGETAEATRLKRTARRRYTRRKNRICYLQEIFSNEMAKVDDSFFHRLEESFLVEEDKKHERHPIFGNIVDEVAYHEKYPTIYHLRKKLVDSTDKADLRLIYLALAHMIKFRGHFLIEGDLNPDNSDVDKLFIQLVQTYNQLFEENPINASGVDAKAILSARLSKSRRLENLIAQLPGEKKNGLFGNLIALSLGLTPNFKSNFDLAEDAKLQLSKDTYDDDLDNLLAQIGDQYADLFLAAKNLSDAILLSDILRVNTEITKAPLSASMIKRYDEHHQDLTLLKALVRQQLPEKYKEIFFDQSKNGYAGYIDGGASQEEFYKFIKPILEKMDGTEELLVKLNREDLLRKQRTFDNGSIPHQIHLGELHAILRRQEDFYPFLKDNREKIEKILTFRIPYYVGPLARGNSRFAWMTRKSEETITPWNFEEVVDKGASAQSFIERMTNFDKNLPNEKVLPKHSLLYEYFTVYNELTKVKYVTEGMRKPAFLSGEQKKAIVDLLFKTNRKVTVKQLKEDYFKKIECFDSVEISGVEDRFNASLGTYHDLLKIIKDKDFLDNEENEDILEDIVLTLTLFEDREMIEERLKTYAHLFDDKVMKQLKRRRYTGWGRLSRKLINGIRDKQSGKTILDFLKSDGFANRNFMQLIHDDSLTFKEDIQKAQVSGQGDSLHEHIANLAGSPAIKKGILQTVKVVDELVKVMGRHKPENIVIEMARENQTTQKGQKNSRERMKRIEEGIKELGSQILKEHPVENTQLQNEKLYLYYLQNGRDMYVDQELDINRLSDYDVDHIVPQSFLKDDSIDNKVLTRSDKARGKSDNVPSEEVVKKMKNYWRQLLNAKLITQRKFDNLTKAERGGLSELDKAGFIKRQLVETRQITKHVAQILDSRMNTKYDENDKLIREVKVITLKSKLVSDFRKDFQFYKVREINNYHHAHDAYLNAVVGTALIKKYPKLESEFVYGDYKVYDVRKMIAKSEQEIGKATAKYFFYSNIMNFFKTEITLANGEIRKRPLIETNGETGEIVWDKGRDFATVRKVLSMPQVNIVKKTEVQTGGFSKESILPKRNSDKLIARKKDWDPKKYGGFDSPTVAYSVLVVAKVEKGKSKKLKSVKELLGITIMERSSFEKNPIDFLEAKGYKEVKKDLIIKLPKYSLFELENGRKRMLASAGELQKGNELALPSKYVNFLYLASHYEKLKGSPEDNEQKQLFVEQHKHYLDEIIEQISEFSKRVILADANLDKVLSAYNKHRDKPIREQAENIIHLFTLTNLGAPAAFKYFDTTIDRKRYTSTKEVLDATLIHQSITGLYETRIDLSQLGGDGGGGSGGSGGSGGSGGSGGLLGRDLLTKLKAQIQFSTEGPQVTWEDRPAMCLVLNLEEEYRLHEKPVPPSIDPSWLQLFPMVWAEKAGMGLANQVPPVVVELKSDASPVAVRQYPMSKEAREGIRPHIQRFLDLGILVPCQSPWNTPLLPVKKPGTNDYRPVQDLREVNKRVQDIHPTVPNPYNLLSSLPPSHTWYSVLDLKDAFFCLKLHPNSQPLFAFEWRDPEKGNTGQLTWTRLPQGFKNSPTLFNEALHRDLASFRALNPQVVMLQYVDDLLVAAPTYRDCKEGTRRLLQELSKLGYRVSAKKAQLCREEVTYLGYLLKGGKRWLTPARKATVMKIPTPTTPRQVREFLGKAGFCRLFIPGFASLAAPLYPLTRPKVPFTWTEAHQEAFGRIKEALLSAPALALPDLTKPFALYVDEKEGVARGVLTQTLGPWRRPVAYLSKKLDPVASGWPTCLKAIAAVALLLKDADKLTLGQNVLVIAPHNLESIVRQPPDRWMTNARMTHYQSLLLNERVSFAPPAILNPATLLPVESDDTPIHICSEILAEETGTRPDLRDQPLPGVPAWYTDGSSFIMDGRRQAGAAIVDNKRTVWASNLPEGTSAQKAELIALTQALRLAEGKSINIYTDSRYAFATAHVHGAIYKQRGWLTSAGKDIKNKEEILALLEAIHLPKRVAIIHCPGHQRGTDPVATGNRKADEAAKQAAQSTRILTETTKNAGKRTADGSEFEKRTADGSEFESPKKKAKVE

SEQ ID NO: 1666 - protein, 2127 aa, synthetic construct
MPAAKRVKLDGGDKKYSIGLDIGTNSVGWAVITDEYKVPSKKFKVLGNTDRHSIKKNLIGALLFDSGETAEATRLKRTARRRYTRRKNRICYLQEIFSNEMAKVDDSFFHRLEESFLVEEDKKHERHPIFGNIVDEVAYHEKYPTIYHLRKKLVDSTDKADLRLIYLALAHMIKFRGHFLIEGDLNPDNSDVDKLFIQLVQTYNQLFEENPINASGVDAKAILSARLSKSRRLENLIAQLPGEKKNGLFGNLIALSLGLTPNFKSNFDLAEDAKLQLSKDTYDDDLDNLLAQIGDQYADLFLAAKNLSDAILLSDILRVNTEITKAPLSASMIKRYDEHHQDLTLLKALVRQQLPEKYKEIFFDQSKNGYAGYIDGGASQEEFYKFIKPILEKMDGTEELLVKLNREDLLRKQRTFDNGSIPHQIHLGELHAILRRQEDFYPFLKDNREKIEKILTFRIPYYVGPLARGNSRFAWMTRKSEETITPWNFEEVVDKGASAQSFIERMTNFDKNLPNEKVLPKHSLLYEYFTVYNELTKVKYVTEGMRKPAFLSGEQKKAIVDLLFKTNRKVTVKQLKEDYFKKIECFDSVEISGVEDRFNASLGTYHDLLKIIKDKDFLDNEENEDILEDIVLTLTLFEDREMIEERLKTYAHLFDDKVMKQLKRRRYTGWGRLSRKLINGIRDKQSGKTILDFLKSDGFANRNFMQLIHDDSLTFKEDIQKAQVSGQGDSLHEHIANLAGSPAIKKGILQTVKVVDELVKVMGRHKPENIVIEMARENQTTQKGQKNSRERMKRIEEGIKELGSQILKEHPVENTQLQNEKLYLYYLQNGRDMYVDQELDINRLSDYDVDHIVPQSFLKDDSIDNKVLTRSDKARGKSDNVPSEEVVKKMKNYWRQLLNAKLITQRKFDNLTKAERGGLSELDKAGFIKRQLVETRQITKHVAQILDSRMNTKYDENDKLIREVKVITLKSKLVSDFRKDFQFYKVREINNYHHAHDAYLNAVVGTALIKKYPKLESEFVYGDYKVYDVRKMIAKSEQEIGKATAKYFFYSNIMNFFKTEITLANGEIRKRPLIETNGETGEIVWDKGRDFATVRKVLSMPQVNIVKKTEVQTGGFSKESILPKRNSDKLIARKKDWDPKKYGGFDSPTVAYSVLVVAKVEKGKSKKLKSVKELLGITIMERSSFEKNPIDFLEAKGYKEVKKDLIIKLPKYSLFELENGRKRMLASAGELQKGNELALPSKYVNFLYLASHYEKLKGSPEDNEQKQLFVEQHKHYLDEIIEQISEFSKRVILADANLDKVLSAYNKHRDKPIREQAENIIHLFTLTNLGAPAAFKYFDTTIDRKRYTSTKEVLDATLIHQSITGLYETRIDLSQLGGDGGGGSPAPEAAAKGGLLGRDLLTKLKAQIQFSTEGPQVTWEDRPAMCLVLNLEEEYRLHEKPVPPSIDPSWLQLFPMVWAEKAGMGLANQVPPVVVELKSDASPVAVRQYPMSKEAREGIRPHIQRFLDLGILVPCQSPWNTPLLPVKKPGTNDYRPVQDLREVNKRVQDIHPTVPNPYNLLSSLPPSHTWYSVLDLKDAFFCLKLHPNSQPLFAFEWRDPEKGNTGQLTWTRLPQGFKNSPTLFNEALHRDLASFRALNPQVVMLQYVDDLLVAAPTYRDCKEGTRRLLQELSKLGYRVSAKKAQLCREEVTYLGYLLKGGKRWLTPARKATVMKIPTPTTPRQVREFLGKAGFCRLFIPGFASLAAPLYPLTRPKVPFTWTEAHQEAFGRIKEALLSAPALALPDLTKPFALYVDEKEGVARGVLTQTLGPWRRPVAYLSKKLDPVASGWPTCLKAIAAVALLLKDADKLTLGQNVLVIAPHNLESIVRQPPDRWMTNARMTHYQSLLLNERVSFAPPAILNPATLLPVESDDTPIHICSEILAEETGTRPDLRDQPLPGVPAWYTDGSSFIMDGRRQAGAAIVDNKRTVWASNLPEGTSAQKAELIALTQALRLAEGKSINIYTDSRYAFATAHVHGAIYKQRGWLTSAGKDIKNKEEILALLEAIHLPKRVAIIHCPGHQRGTDPVATGNRKADEAAKQAAQSTRILTETTKNAGKRTADGSEFEKRTADGSEFESPKKKAKVE

SEQ ID NO: 1667 - protein, 2134 aa, synthetic construct
MPAAKRVKLDGGDKKYSIGLDIGTNSVGWAVITDEYKVPSKKFKVLGNTDRHSIKKNLIGALLFDSGETAEATRLKRTARRRYTRRKNRICYLQEIFSNEMAKVDDSFFHRLEESFLVEEDKKHERHPIFGNIVDEVAYHEKYPTIYHLRKKLVDSTDKADLRLIYLALAHMIKFRGHFLIEGDLNPDNSDVDKLFIQLVQTYNQLFEENPINASGVDAKAILSARLSKSRRLENLIAQLPGEKKNGLFGNLIALSLGLTPNFKSNFDLAEDAKLQLSKDTYDDDLDNLLAQIGDQYADLFLAAKNLSDAILLSDILRVNTEITKAPLSASMIKRYDEHHQDLTLLKALVRQQLPEKYKEIFFDQSKNGYAGYIDGGASQEEFYKFIKPILEKMDGTEELLVKLNREDLLRKQRTFDNGSIPHQIHLGELHAILRRQEDFYPFLKDNREKIEKILTFRIPYYVGPLARGNSRFAWMTRKSEETITPWNFEEVVDKGASAQSFIERMTNFDKNLPNEKVLPKHSLLYEYFTVYNELTKVKYVTEGMRKPAFLSGEQKKAIVDLLFKTNRKVTVKQLKEDYFKKIECFDSVEISGVEDRFNASLGTYHDLLKIIKDKDFLDNEENEDILEDIVLTLTLFEDREMIEERLKTYAHLFDDKVMKQLKRRRYTGWGRLSRKLINGIRDKQSGKTILDFLKSDGFANRNFMQLIHDDSLTFKEDIQKAQVSGQGDSLHEHIANLAGSPAIKKGILQTVKVVDELVKVMGRHKPENIVIEMARENQTTQKGQKNSRERMKRIEEGIKELGSQILKEHPVENTQLQNEKLYLYYLQNGRDMYVDQELDINRLSDYDVDHIVPQSFLKDDSIDNKVLTRSDKARGKSDNVPSEEVVKKMKNYWRQLLNAKLITQRKFDNLTKAERGGLSELDKAGFIKRQLVETRQITKHVAQILDSRMNTKYDENDKLIREVKVITLKSKLVSDFRKDFQFYKVREINNYHHAHDAYLNAVVGTALIKKYPKLESEFVYGDYKVYDVRKMIAKSEQEIGKATAKYFFYSNIMNFFKTEITLANGEIRKRPLIETNGETGEIVWDKGRDFATVRKVLSMPQVNIVKKTEVQTGGFSKESILPKRNSDKLIARKKDWDPKKYGGFDSPTVAYSVLVVAKVEKGKSKKLKSVKELLGITIMERSSFEKNPIDFLEAKGYKEVKKDLIIKLPKYSLFELENGRKRMLASAGELQKGNELALPSKYVNFLYLASHYEKLKGSPEDNEQKQLFVEQHKHYLDEIIEQISEFSKRVILADANLDKVLSAYNKHRDKPIREQAENIIHLFTLTNLGAPAAFKYFDTTIDRKRYTSTKEVLDATLIHQSITGLYETRIDLSQLGGDGGGSSGSSGSSGSSGSSGSSGGLLGRDLLTKLKAQIQFSTEGPQVTWEDRPAMCLVLNLEEEYRLHEKPVPPSIDPSWLQLFPMVWAEKAGMGLANQVPPVVVELKSDASPVAVRQYPMSKEAREGIRPHIQRFLDLGILVPCQSPWNTPLLPVKKPGTNDYRPVQDLREVNKRVQDIHPTVPNPYNLLSSLPPSHTWYSVLDLKDAFFCLKLHPNSQPLFAFEWRDPEKGNTGQLTWTRLPQGFKNSPTLFNEALHRDLASFRALNPQVVMLQYVDDLLVAAPTYRDCKEGTRRLLQELSKLGYRVSAKKAQLCREEVTYLGYLLKGGKRWLTPARKATVMKIPTPTTPRQVREFLGKAGFCRLFIPGFASLAAPLYPLTRPKVPFTWTEAHQEAFGRIKEALLSAPALALPDLTKPFALYVDEKEGVARGVLTQTLGPWRRPVAYLSKKLDPVASGWPTCLKAIAAVALLLKDADKLTLGQNVLVIAPHNLESIVRQPPDRWMTNARMTHYQSLLLNERVSFAPPAILNPATLLPVESDDTPIHICSEILAEETGTRPDLRDQPLPGVPAWYTDGSSFIMDGRRQAGAAIVDNKRTVWASNLPEGTSAQKAELIALTQALRLAEGKSINIYTDSRYAFATAHVHGAIYKQRGWLTSAGKDIKNKEEILALLEAIHLPKRVAIIHCPGHQRGTDPVATGNRKADEAAKQAAQSTRILTETTKNAGKRTADGSEFEKRTADGSEFESPKKKAKVE

SEQ ID NO: 1668 - protein, 2122 aa, synthetic construct
MPAAKRVKLDGGDKKYSIGLDIGTNSVGWAVITDEYKVPSKKFKVLGNTDRHSIKKNLIGALLFDSGETAEATRLKRTARRRYTRRKNRICYLQEIFSNEMAKVDDSFFHRLEESFLVEEDKKHERHPIFGNIVDEVAYHEKYPTIYHLRKKLVDSTDKADLRLIYLALAHMIKFRGHFLIEGDLNPDNSDVDKLFIQLVQTYNQLFEENPINASGVDAKAILSARLSKSRRLENLIAQLPGEKKNGLFGNLIALSLGLTPNFKSNFDLAEDAKLQLSKDTYDDDLDNLLAQIGDQYADLFLAAKNLSDAILLSDILRVNTEITKAPLSASMIKRYDEHHQDLTLLKALVRQQLPEKYKEIFFDQSKNGYAGYIDGGASQEEFYKFIKPILEKMDGTEELLVKLNREDLLRKQRTFDNGSIPHQIHLGELHAILRRQEDFYPFLKDNREKIEKILTFRIPYYVGPLARGNSRFAWMTRKSEETITPWNFEEVVDKGASAQSFIERMTNFDKNLPNEKVLPKHSLLYEYFTVYNELTKVKYVTEGMRKPAFLSGEQKKAIVDLLFKTNRKVTVKQLKEDYFKKIECFDSVEISGVEDRFNASLGTYHDLLKIIKDKDFLDNEENEDILEDIVLTLTLFEDREMIEERLKTYAHLFDDKVMKQLKRRRYTGWGRLSRKLINGIRDKQSGKTILDFLKSDGFANRNFMQLIHDDSLTFKEDIQKAQVSGQGDSLHEHIANLAGSPAIKKGILQTVKVVDELVKVMGRHKPENIVIEMARENQTTQKGQKNSRERMKRIEEGIKELGSQILKEHPVENTQLQNEKLYLYYLQNGRDMYVDQELDINRLSDYDVDHIVPQSFLKDDSIDNKVLTRSDKARGKSDNVPSEEVVKKMKNYWRQLLNAKLITQRKFDNLTKAERGGLSELDKAGFIKRQLVETRQITKHVAQILDSRMNTKYDENDKLIREVKVITLKSKLVSDFRKDFQFYKVREINNYHHAHDAYLNAVVGTALIKKYPKLESEFVYGDYKVYDVRKMIAKSEQEIGKATAKYFFYSNIMNFFKTEITLANGEIRKRPLIETNGETGEIVWDKGRDFATVRKVLSMPQVNIVKKTEVQTGGFSKESILPKRNSDKLIARKKDWDPKKYGGFDSPTVAYSVLVVAKVEKGKSKKLKSVKELLGITIMERSSFEKNPIDFLEAKGYKEVKKDLIIKLPKYSLFELENGRKRMLASAGELQKGNELALPSKYVNFLYLASHYEKLKGSPEDNEQKQLFVEQHKHYLDEIIEQISEFSKRVILADANLDKVLSAYNKHRDKPIREQAENIIHLFTLTNLGAPAAFKYFDTTIDRKRYTSTKEVLDATLIHQSITGLYETRIDLSQLGGDGGGGSGGGGGLLGRDLLTKLKAQIQFSTEGPQVTWEDRPAMCLVLNLEEEYRLHEKPVPPSIDPSWLQLFPMVWAEKAGMGLANQVPPVVVELKSDASPVAVRQYPMSKEAREGIRPHIQRFLDLGILVPCQSPWNTPLLPVKKPGTNDYRPVQDLREVNKRVQDIHPTVPNPYNLLSSLPPSHTWYSVLDLKDAFFCLKLHPNSQPLFAFEWRDPEKGNTGQLTWTRLPQGFKNSPTLFNEALHRDLASFRALNPQVVMLQYVDDLLVAAPTYRDCKEGTRRLLQELSKLGYRVSAKKAQLCREEVTYLGYLLKGGKRWLTPARKATVMKIPTPTTPRQVREFLGKAGFCRLFIPGFASLAAPLYPLTRPKVPFTWTEAHQEAFGRIKEALLSAPALALPDLTKPFALYVDEKEGVARGVLTQTLGPWRRPVAYLSKKLDPVASGWPTCLKAIAAVALLLKDADKLTLGQNVLVIAPHNLESIVRQPPDRWMTNARMTHYQSLLLNERVSFAPPAILNPATLLPVESDDTPIHICSEILAEETGTRPDLRDQPLPGVPAWYTDGSSFIMDGRRQAGAAIVDNKRTVWASNLPEGTSAQKAELIALTQALRLAEGKSINIYTDSRYAFATAHVHGAIYKQRGWLTSAGKDIKNKEEILALLEAIHLPKRVAIIHCPGHQRGTDPVATGNRKADEAAKQAAQSTRILTETTKNAGKRTADGSEFEKRTADGSEFESPKKKAKVE

SEQ ID NO: 1669 - protein, 2124 aa, synthetic construct
MPAAKRVKLDGGDKKYSIGLDIGTNSVGWAVITDEYKVPSKKFKVLGNTDRHSIKKNLIGALLFDSGETAEATRLKRTARRRYTRRKNRICYLQEIFSNEMAKVDDSFFHRLEESFLVEEDKKHERHPIFGNIVDEVAYHEKYPTIYHLRKKLVDSTDKADLRLIYLALAHMIKFRGHFLIEGDLNPDNSDVDKLFIQLVQTYNQLFEENPINASGVDAKAILSARLSKSRRLENLIAQLPGEKKNGLFGNLIALSLGLTPNFKSNFDLAEDAKLQLSKDTYDDDLDNLLAQIGDQYADLFLAAKNLSDAILLSDILRVNTEITKAPLSASMIKRYDEHHQDLTLLKALVRQQLPEKYKEIFFDQSKNGYAGYIDGGASQEEFYKFIKPILEKMDGTEELLVKLNREDLLRKQRTFDNGSIPHQIHLGELHAILRRQEDFYPFLKDNREKIEKILTFRIPYYVGPLARGNSRFAWMTRKSEETITPWNFEEVVDKGASAQSFIERMTNFDKNLPNEKVLPKHSLLYEYFTVYNELTKVKYVTEGMRKPAFLSGEQKKAIVDLLFKTNRKVTVKQLKEDYFKKIECFDSVEISGVEDRFNASLGTYHDLLKIIKDKDFLDNEENEDILEDIVLTLTLFEDREMIEERLKTYAHLFDDKVMKQLKRRRYTGWGRLSRKLINGIRDKQSGKTILDFLKSDGFANRNFMQLIHDDSLTFKEDIQKAQVSGQGDSLHEHIANLAGSPAIKKGILQTVKVVDELVKVMGRHKPENIVIEMARENQTTQKGQKNSRERMKRIEEGIKELGSQILKEHPVENTQLQNEKLYLYYLQNGRDMYVDQELDINRLSDYDVDHIVPQSFLKDDSIDNKVLTRSDKARGKSDNVPSEEVVKKMKNYWRQLLNAKLITQRKFDNLTKAERGGLSELDKAGFIKRQLVETRQITKHVAQILDSRMNTKYDENDKLIREVKVITLKSKLVSDFRKDFQFYKVREINNYHHAHDAYLNAVVGTALIKKYPKLESEFVYGDYKVYDVRKMIAKSEQEIGKATAKYFFYSNIMNFFKTEITLANGEIRKRPLIETNGETGEIVWDKGRDFATVRKVLSMPQVNIVKKTEVQTGGFSKESILPKRNSDKLIARKKDWDPKKYGGFDSPTVAYSVLVVAKVEKGKSKKLKSVKELLGITIMERSSFEKNPIDFLEAKGYKEVKKDLIIKLPKYSLFELENGRKRMLASAGELQKGNELALPSKYVNFLYLASHYEKLKGSPEDNEQKQLFVEQHKHYLDEIIEQISEFSKRVILADANLDKVLSAYNKHRDKPIREQAENIIHLFTLTNLGAPAAFKYFDTTIDRKRYTSTKEVLDATLIHQSITGLYETRIDLSQLGGDGGPAPEAAAKGGLLGRDLLTKLKAQIQFSTEGPQVTWEDRPAMCLVLNLEEEYRLHEKPVPPSIDPSWLQLFPMVWAEKAGMGLANQVPPVVVELKSDASPVAVRQYPMSKEAREGIRPHIQRFLDLGILVPCQSPWNTPLLPVKKPGTNDYRPVQDLREVNKRVQDIHPTVPNPYNLLSSLPPSHTWYSVLDLKDAFFCLKLHPNSQPLFAFEWRDPEKGNTGQLTWTRLPQGFKNSPTLFNEALHRDLASFRALNPQVVMLQYVDDLLVAAPTYRDCKEGTRRLLQELSKLGYRVSAKKAQLCREEVTYLGYLLKGGKRWLTPARKATVMKIPTPTTPRQVREFLGKAGFCRLFIPGFASLAAPLYPLTRPKVPFTWTEAHQEAFGRIKEALLSAPALALPDLTKPFALYVDEKEGVARGVLTQTLGPWRRPVAYLSKKLDPVASGWPTCLKAIAAVALLLKDADKLTLGQNVLVIAPHNLESIVRQPPDRWMTNARMTHYQSLLLNERVSFAPPAILNPATLLPVESDDTPIHICSEILAEETGTRPDLRDQPLPGVPAWYTDGSSFIMDGRRQAGAAIVDNKRTVWASNLPEGTSAQKAELIALTQALRLAEGKSINIYTDSRYAFATAHVHGAIYKQRGWLTSAGKDIKNKEEILALLEAIHLPKRVAIIHCPGHQRGTDPVATGNRKADEAAKQAAQSTRILTETTKNAGKRTADGSEFEKRTADGSEFESPKKKAKVE

SEQ ID NO: 1670 - protein, 2162 aa, synthetic construct
MPAAKRVKLDGGDKKYSIGLDIGTNSVGWAVITDEYKVPSKKFKVLGNTDRHSIKKNLIGALLFDSGETAEATRLKRTARRRYTRRKNRICYLQEIFSNEMAKVDDSFFHRLEESFLVEEDKKHERHPIFGNIVDEVAYHEKYPTIYHLRKKLVDSTDKADLRLIYLALAHMIKFRGHFLIEGDLNPDNSDVDKLFIQLVQTYNQLFEENPINASGVDAKAILSARLSKSRRLENLIAQLPGEKKNGLFGNLIALSLGLTPNFKSNFDLAEDAKLQLSKDTYDDDLDNLLAQIGDQYADLFLAAKNLSDAILLSDILRVNTEITKAPLSASMIKRYDEHHQDLTLLKALVRQQLPEKYKEIFFDQSKNGYAGYIDGGASQEEFYKFIKPILEKMDGTEELLVKLNREDLLRKQRTFDNGSIPHQIHLGELHAILRRQEDFYPFLKDNREKIEKILTFRIPYYVGPLARGNSRFAWMTRKSEETITPWNFEEVVDKGASAQSFIERMTNFDKNLPNEKVLPKHSLLYEYFTVYNELTKVKYVTEGMRKPAFLSGEQKKAIVDLLFKTNRKVTVKQLKEDYFKKIECFDSVEISGVEDRFNASLGTYHDLLKIIKDKDFLDNEENEDILEDIVLTLTLFEDREMIEERLKTYAHLFDDKVMKQLKRRRYTGWGRLSRKLINGIRDKQSGKTILDFLKSDGFANRNFMQLIHDDSLTFKEDIQKAQVSGQGDSLHEHIANLAGSPAIKKGILQTVKVVDELVKVMGRHKPENIVIEMARENQTTQKGQKNSRERMKRIEEGIKELGSQILKEHPVENTQLQNEKLYLYYLQNGRDMYVDQELDINRLSDYDVDHIVPQSFLKDDSIDNKVLTRSDKARGKSDNVPSEEVVKKMKNYWRQLLNAKLITQRKFDNLTKAERGGLSELDKAGFIKRQLVETRQITKHVAQILDSRMNTKYDENDKLIREVKVITLKSKLVSDFRKDFQFYKVREINNYHHAHDAYLNAVVGTALIKKYPKLESEFVYGDYKVYDVRKMIAKSEQEIGKATAKYFFYSNIMNFFKTEITLANGEIRKRPLIETNGETGEIVWDKGRDFATVRKVLSMPQVNIVKKTEVQTGGFSKESILPKRNSDKLIARKKDWDPKKYGGFDSPTVAYSVLVVAKVEKGKSKKLKSVKELLGITIMERSSFEKNPIDFLEAKGYKEVKKDLIIKLPKYSLFELENGRKRMLASAGELQKGNELALPSKYVNFLYLASHYEKLKGSPEDNEQKQLFVEQHKHYLDEIIEQISEFSKRVILADANLDKVLSAYNKHRDKPIREQAENIIHLFTLTNLGAPAAFKYFDTTIDRKRYTSTKEVLDATLIHQSITGLYETRIDLSQLGGDGGAEAAAKEAAAKEAAAKEAAAKALEAEAAAKEAAAKEAAAKEAAAKAGGLLGRDLLTKLKAQIQFSTEGPQVTWEDRPAMCLVLNLEEEYRLHEKPVPPSIDPSWLQLFPMVWAEKAGMGLANQVPPVVVELKSDASPVAVRQYPMSKEAREGIRPHIQRFLDLGILVPCQSPWNTPLLPVKKPGTNDYRPVQDLREVNKRVQDIHPTVPNPYNLLSSLPPSHTWYSVLDLKDAFFCLKLHPNSQPLFAFEWRDPEKGNTGQLTWTRLPQGFKNSPTLFNEALHRDLASFRALNPQVVMLQYVDDLLVAAPTYRDCKEGTRRLLQELSKLGYRVSAKKAQLCREEVTYLGYLLKGGKRWLTPARKATVMKIPTPTTPRQVREFLGKAGFCRLFIPGFASLAAPLYPLTRPKVPFTWTEAHQEAFGRIKEALLSAPALALPDLTKPFALYVDEKEGVARGVLTQTLGPWRRPVAYLSKKLDPVASGWPTCLKAIAAVALLLKDADKLTLGQNVLVIAPHNLESIVRQPPDRWMTNARMTHYQSLLLNERVSFAPPAILNPATLLPVESDDTPIHICSEILAEETGTRPDLRDQPLPGVPAWYTDGSSFIMDGRRQAGAAIVDNKRTVWASNLPEGTSAQKAELIALTQALRLAEGKSINIYTDSRYAFATAHVHGAIYKQRGWLTSAGKDIKNKEEILALLEAIHLPKRVAIIHCPGHQRGTDPVATGNRKADEAAKQAAQSTRILTETTKNAGKRTADGSEFEKRTADGSEFESPKKKAKVE

SEQ ID NO: 1671 - protein, 2124 aa, synthetic construct
MPAAKRVKLDGGDKKYSIGLDIGTNSVGWAVITDEYKVPSKKFKVLGNTDRHSIKKNLIGALLFDSGETAEATRLKRTARRRYTRRKNRICYLQEIFSNEMAKVDDSFFHRLEESFLVEEDKKHERHPIFGNIVDEVAYHEKYPTIYHLRKKLVDSTDKADLRLIYLALAHMIKFRGHFLIEGDLNPDNSDVDKLFIQLVQTYNQLFEENPINASGVDAKAILSARLSKSRRLENLIAQLPGEKKNGLFGNLIALSLGLTPNFKSNFDLAEDAKLQLSKDTYDDDLDNLLAQIGDQYADLFLAAKNLSDAILLSDILRVNTEITKAPLSASMIKRYDEHHQDLTLLKALVRQQLPEKYKEIFFDQSKNGYAGYIDGGASQEEFYKFIKPILEKMDGTEELLVKLNREDLLRKQRTFDNGSIPHQIHLGELHAILRRQEDFYPFLKDNREKIEKILTFRIPYYVGPLARGNSRFAWMTRKSEETITPWNFEEVVDKGASAQSFIERMTNFDKNLPNEKVLPKHSLLYEYFTVYNELTKVKYVTEGMRKPAFLSGEQKKAIVDLLFKTNRKVTVKQLKEDYFKKIECFDSVEISGVEDRFNASLGTYHDLLKIIKDKDFLDNEENEDILEDIVLTLTLFEDREMIEERLKTYAHLFDDKVMKQLKRRRYTGWGRLSRKLINGIRDKQSGKTILDFLKSDGFANRNFMQLIHDDSLTFKEDIQKAQVSGQGDSLHEHIANLAGSPAIKKGILQTVKVVDELVKVMGRHKPENIVIEMARENQTTQKGQKNSRERMKRIEEGIKELGSQILKEHPVENTQLQNEKLYLYYLQNGRDMYVDQELDINRLSDYDVDHIVPQSFLKDDSIDNKVLTRSDKARGKSDNVPSEEVVKKMKNYWRQLLNAKLITQRKFDNLTKAERGGLSELDKAGFIKRQLVETRQITKHVAQILDSRMNTKYDENDKLIREVKVITLKSKLVSDFRKDFQFYKVREINNYHHAHDAYLNAVVGTALIKKYPKLESEFVYGDYKVYDVRKMIAKSEQEIGKATAKYFFYSNIMNFFKTEITLANGEIRKRPLIETNGETGEIVWDKGRDFATVRKVLSMPQVNIVKKTEVQTGGFSKESILPKRNSDKLIARKKDWDPKKYGGFDSPTVAYSVLVVAKVEKGKSKKLKSVKELLGITIMERSSFEKNPIDFLEAKGYKEVKKDLIIKLPKYSLFELENGRKRMLASAGELQKGNELALPSKYVNFLYLASHYEKLKGSPEDNEQKQLFVEQHKHYLDEIIEQISEFSKRVILADANLDKVLSAYNKHRDKPIREQAENIIHLFTLTNLGAPAAFKYFDTTIDRKRYTSTKEVLDATLIHQSITGLYETRIDLSQLGGDGGEAAAKGSSGGLLGRDLLTKLKAQIQFSTEGPQVTWEDRPAMCLVLNLEEEYRLHEKPVPPSIDPSWLQLFPMVWAEKAGMGLANQVPPVVVELKSDASPVAVRQYPMSKEAREGIRPHIQRFLDLGILVPCQSPWNTPLLPVKKPGTNDYRPVQDLREVNKRVQDIHPTVPNPYNLLSSLPPSHTWYSVLDLKDAFFCLKLHPNSQPLFAFEWRDPEKGNTGQLTWTRLPQGFKNSPTLFNEALHRDLASFRALNPQVVMLQYVDDLLVAAPTYRDCKEGTRRLLQELSKLGYRVSAKKAQLCREEVTYLGYLLKGGKRWLTPARKATVMKIPTPTTPRQVREFLGKAGFCRLFIPGFASLAAPLYPLTRPKVPFTWTEAHQEAFGRIKEALLSAPALALPDLTKPFALYVDEKEGVARGVLTQTLGPWRRPVAYLSKKLDPVASGWPTCLKAIAAVALLLKDADKLTLGQNVLVIAPHNLESIVRQPPDRWMTNARMTHYQSLLLNERVSFAPPAILNPATLLPVESDDTPIHICSEILAEETGTRPDLRDQPLPGVPAWYTDGSSFIMDGRRQAGAAIVDNKRTVWASNLPEGTSAQKAELIALTQALRLAEGKSINIYTDSRYAFATAHVHGAIYKQRGWLTSAGKDIKNKEEILALLEAIHLPKRVAIIHCPGHQRGTDPVATGNRKADEAAKQAAQSTRILTETTKNAGKRTADGSEFEKRTADGSEFESPKKKAKVE

SEQ ID NO: 1672 - protein, 2127 aa, synthetic construct
MPAAKRVKLDGGDKKYSIGLDIGTNSVGWAVITDEYKVPSKKFKVLGNTDRHSIKKNLIGALLFDSGETAEATRLKRTARRRYTRRKNRICYLQEIFSNEMAKVDDSFFHRLEESFLVEEDKKHERHPIFGNIVDEVAYHEKYPTIYHLRKKLVDSTDKADLRLIYLALAHMIKFRGHFLIEGDLNPDNSDVDKLFIQLVQTYNQLFEENPINASGVDAKAILSARLSKSRRLENLIAQLPGEKKNGLFGNLIALSLGLTPNFKSNFDLAEDAKLQLSKDTYDDDLDNLLAQIGDQYADLFLAAKNLSDAILLSDILRVNTEITKAPLSASMIKRYDEHHQDLTLLKALVRQQLPEKYKEIFFDQSKNGYAGYIDGGASQEEFYKFIKPILEKMDGTEELLVKLNREDLLRKQRTFDNGSIPHQIHLGELHAILRRQEDFYPFLKDNREKIEKILTFRIPYYVGPLARGNSRFAWMTRKSEETITPWNFEEVVDKGASAQSFIERMTNFDKNLPNEKVLPKHSLLYEYFTVYNELTKVKYVTEGMRKPAFLSGEQKKAIVDLLFKTNRKVTVKQLKEDYFKKIECFDSVEISGVEDRFNASLGTYHDLLKIIKDKDFLDNEENEDILEDIVLTLTLFEDREMIEERLKTYAHLFDDKVMKQLKRRRYTGWGRLSRKLINGIRDKQSGKTILDFLKSDGFANRNFMQLIHDDSLTFKEDIQKAQVSGQGDSLHEHIANLAGSPAIKKGILQTVKVVDELVKVMGRHKPENIVIEMARENQTTQKGQKNSRERMKRIEEGIKELGSQILKEHPVENTQLQNEKLYLYYLQNGRDMYVDQELDINRLSDYDVDHIVPQSFLKDDSIDNKVLTRSDKARGKSDNVPSEEVVKKMKNYWRQLLNAKLITQRKFDNLTKAERGGLSELDKAGFIKRQLVETRQITKHVAQILDSRMNTKYDENDKLIREVKVITLKSKLVSDFRKDFQFYKVREINNYHHAHDAYLNAVVGTALIKKYPKLESEFVYGDYKVYDVRKMIAKSEQEIGKATAKYFFYSNIMNFFKTEITLANGEIRKRPLIETNGETGEIVWDKGRDFATVRKVLSMPQVNIVKKTEVQTGGFSKESILPKRNSDKLIARKKDWDPKKYGGFDSPTVAYSVLVVAKVEKGKSKKLKSVKELLGITIMERSSFEKNPIDFLEAKGYKEVKKDLIIKLPKYSLFELENGRKRMLASAGELQKGNELALPSKYVNFLYLASHYEKLKGSPEDNEQKQLFVEQHKHYLDEIIEQISEFSKRVILADANLDKVLSAYNKHRDKPIREQAENIIHLFTLTNLGAPAAFKYFDTTIDRKRYTSTKEVLDATLIHQSITGLYETRIDLSQLGGDGGGGGEAAAKPAPGGLLGRDLLTKLKAQIQFSTEGPQVTWEDRPAMCLVLNLEEEYRLHEKPVPPSIDPSWLQLFPMVWAEKAGMGLANQVPPVVVELKSDASPVAVRQYPMSKEAREGIRPHIQRFLDLGILVPCQSPWNTPLLPVKKPGTNDYRPVQDLREVNKRVQDIHPTVPNPYNLLSSLPPSHTWYSVLDLKDAFFCLKLHPNSQPLFAFEWRDPEKGNTGQLTWTRLPQGFKNSPTLFNEALHRDLASFRALNPQVVMLQYVDDLLVAAPTYRDCKEGTRRLLQELSKLGYRVSAKKAQLCREEVTYLGYLLKGGKRWLTPARKATVMKIPTPTTPRQVREFLGKAGFCRLFIPGFASLAAPLYPLTRPKVPFTWTEAHQEAFGRIKEALLSAPALALPDLTKPFALYVDEKEGVARGVLTQTLGPWRRPVAYLSKKLDPVASGWPTCLKAIAAVALLLKDADKLTLGQNVLVIAPHNLESIVRQPPDRWMTNARMTHYQSLLLNERVSFAPPAILNPATLLPVESDDTPIHICSEILAEETGTRPDLRDQPLPGVPAWYTDGSSFIMDGRRQAGAAIVDNKRTVWASNLPEGTSAQKAELIALTQALRLAEGKSINIYTDSRYAFATAHVHGAIYKQRGWLTSAGKDIKNKEEILALLEAIHLPKRVAIIHCPGHQRGTDPVATGNRKADEAAKQAAQSTRILTETTKNAGKRTADGSEFEKRTADGSEFESPKKKAKVE

SEQ ID NO: 1673 - protein, 2122 aa, synthetic construct
MPAAKRVKLDGGDKKYSIGLDIGTNSVGWAVITDEYKVPSKKFKVLGNTDRHSIKKNLIGALLFDSGETAEATRLKRTARRRYTRRKNRICYLQEIFSNEMAKVDDSFFHRLEESFLVEEDKKHERHPIFGNIVDEVAYHEKYPTIYHLRKKLVDSTDKADLRLIYLALAHMIKFRGHFLIEGDLNPDNSDVDKLFIQLVQTYNQLFEENPINASGVDAKAILSARLSKSRRLENLIAQLPGEKKNGLFGNLIALSLGLTPNFKSNFDLAEDAKLQLSKDTYDDDLDNLLAQIGDQYADLFLAAKNLSDAILLSDILRVNTEITKAPLSASMIKRYDEHHQDLTLLKALVRQQLPEKYKEIFFDQSKNGYAGYIDGGASQEEFYKFIKPILEKMDGTEELLVKLNREDLLRKQRTFDNGSIPHQIHLGELHAILRRQEDFYPFLKDNREKIEKILTFRIPYYVGPLARGNSRFAWMTRKSEETITPWNFEEVVDKGASAQSFIERMTNFDKNLPNEKVLPKHSLLYEYFTVYNELTKVKYVTEGMRKPAFLSGEQKKAIVDLLFKTNRKVTVKQLKEDYFKKIECFDSVEISGVEDRFNASLGTYHDLLKIIKDKDFLDNEENEDILEDIVLTLTLFEDREMIEERLKTYAHLFDDKVMKQLKRRRYTGWGRLSRKLINGIRDKQSGKTILDFLKSDGFANRNFMQLIHDDSLTFKEDIQKAQVSGQGDSLHEHIANLAGSPAIKKGILQTVKVVDELVKVMGRHKPENIVIEMARENQTTQKGQKNSRERMKRIEEGIKELGSQILKEHPVENTQLQNEKLYLYYLQNGRDMYVDQELDINRLSDYDVDHIVPQSFLKDDSIDNKVLTRSDKARGKSDNVPSEEVVKKMKNYWRQLLNAKLITQRKFDNLTKAERGGLSELDKAGFIKRQLVETRQITKHVAQILDSRMNTKYDENDKLIREVKVITLKSKLVSDFRKDFQFYKVREINNYHHAHDAYLNAVVGTALIKKYPKLESEFVYGDYKVYDVRKMIAKSEQEIGKATAKYFFYSNIMNFFKTEITLANGEIRKRPLIETNGETGEIVWDKGRDFATVRKVLSMPQVNIVKKTEVQTGGFSKESILPKRNSDKLIARKKDWDPKKYGGFDSPTVAYSVLVVAKVEKGKSKKLKSVKELLGITIMERSSFEKNPIDFLEAKGYKEVKKDLIIKLPKYSLFELENGRKRMLASAGELQKGNELALPSKYVNFLYLASHYEKLKGSPEDNEQKQLFVEQHKHYLDEIIEQISEFSKRVILADANLDKVLSAYNKHRDKPIREQAENIIHLFTLTNLGAPAAFKYFDTTIDRKRYTSTKEVLDATLIHQSITGLYETRIDLSQLGGDGGGGGPAPGGLLGRDLLTKLKAQIQFSTEGPQVTWEDRPAMCLVLNLEEEYRLHEKPVPPSIDPSWLQLFPMVWAEKAGMGLANQVPPVVVELKSDASPVAVRQYPMSKEAREGIRPHIQRFLDLGILVPCQSPWNTPLLPVKKPGTNDYRPVQDLREVNKRVQDIHPTVPNPYNLLSSLPPSHTWYSVLDLKDAFFCLKLHPNSQPLFAFEWRDPEKGNTGQLTWTRLPQGFKNSPTLFNEALHRDLASFRALNPQVVMLQYVDDLLVAAPTYRDCKEGTRRLLQELSKLGYRVSAKKAQLCREEVTYLGYLLKGGKRWLTPARKATVMKIPTPTTPRQVREFLGKAGFCRLFIPGFASLAAPLYPLTRPKVPFTWTEAHQEAFGRIKEALLSAPALALPDLTKPFALYVDEKEGVARGVLTQTLGPWRRPVAYLSKKLDPVASGWPTCLKAIAAVALLLKDADKLTLGQNVLVIAPHNLESIVRQPPDRWMTNARMTHYQSLLLNERVSFAPPAILNPATLLPVESDDTPIHICSEILAEETGTRPDLRDQPLPGVPAWYTDGSSFIMDGRRQAGAAIVDNKRTVWASNLPEGTSAQKAELIALTQALRLAEGKSINIYTDSRYAFATAHVHGAIYKQRGWLTSAGKDIKNKEEILALLEAIHLPKRVAIIHCPGHQRGTDPVATGNRKADEAAKQAAQSTRILTETTKNAGKRTADGSEFEKRTADGSEFESPKKKAKVE

SEQ ID NO: 1674 - protein, 2136 aa, synthetic construct
MPAAKRVKLDGGDKKYSIGLDIGTNSVGWAVITDEYKVPSKKFKVLGNTDRHSIKKNLIGALLFDSGETAEATRLKRTARRRYTRRKNRICYLQEIFSNEMAKVDDSFFHRLEESFLVEEDKKHERHPIFGNIVDEVAYHEKYPTIYHLRKKLVDSTDKADLRLIYLALAHMIKFRGHFLIEGDLNPDNSDVDKLFIQLVQTYNQLFEENPINASGVDAKAILSARLSKSRRLENLIAQLPGEKKNGLFGNLIALSLGLTPNFKSNFDLAEDAKLQLSKDTYDDDLDNLLAQIGDQYADLFLAAKNLSDAILLSDILRVNTEITKAPLSASMIKRYDEHHQDLTLLKALVRQQLPEKYKEIFFDQSKNGYAGYIDGGASQEEFYKFIKPILEKMDGTEELLVKLNREDLLRKQRTFDNGSIPHQIHLGELHAILRRQEDFYPFLKDNREKIEKILTFRIPYYVGPLARGNSRFAWMTRKSEETITPWNFEEVVDKGASAQSFIERMTNFDKNLPNEKVLPKHSLLYEYFTVYNELTKVKYVTEGMRKPAFLSGEQKKAIVDLLFKTNRKVTVKQLKEDYFKKIECFDSVEISGVEDRFNASLGTYHDLLKIIKDKDFLDNEENEDILEDIVLTLTLFEDREMIEERLKTYAHLFDDKVMKQLKRRRYTGWGRLSRKLINGIRDKQSGKTILDFLKSDGFANRNFMQLIHDDSLTFKEDIQKAQVSGQGDSLHEHIANLAGSPAIKKGILQTVKVVDELVKVMGRHKPENIVIEMARENQTTQKGQKNSRERMKRIEEGIKELGSQILKEHPVENTQLQNEKLYLYYLQNGRDMYVDQELDINRLSDYDVDHIVPQSFLKDDSIDNKVLTRSDKARGKSDNVPSEEVVKKMKNYWRQLLNAKLITQRKFDNLTKAERGGLSELDKAGFIKRQLVETRQITKHVAQILDSRMNTKYDENDKLIREVKVITLKSKLVSDFRKDFQFYKVREINNYHHAHDAYLNAVVGTALIKKYPKLESEFVYGDYKVYDVRKMIAKSEQEIGKATAKYFFYSNIMNFFKTEITLANGEIRKRPLIETNGETGEIVWDKGRDFATVRKVLSMPQVNIVKKTEVQTGGFSKESILPKRNSDKLIARKKDWDPKKYGGFDSPTVAYSVLVVAKVEKGKSKKLKSVKELLGITIMERSSFEKNPIDFLEAKGYKEVKKDLIIKLPKYSLFELENGRKRMLASAGELQKGNELALPSKYVNFLYLASHYEKLKGSPEDNEQKQLFVEQHKHYLDEIIEQISEFSKRVILADANLDKVLSAYNKHRDKPIREQAENIIHLFTLTNLGAPAAFKYFDTTIDRKRYTSTKEVLDATLIHQSITGLYETRIDLSQLGGDGGEAAAKEAAAKEAAAKEAAAKGGLLGRDLLTKLKAQIQFSTEGPQVTWEDRPAMCLVLNLEEEYRLHEKPVPPSIDPSWLQLFPMVWAEKAGMGLANQVPPVVVELKSDASPVAVRQYPMSKEAREGIRPHIQRFLDLGILVPCQSPWNTPLLPVKKPGTNDYRPVQDLREVNKRVQDIHPTVPNPYNLLSSLPPSHTWYSVLDLKDAFFCLKLHPNSQPLFAFEWRDPEKGNTGQLTWTRLPQGFKNSPTLFNEALHRDLASFRALNPQVVMLQYVDDLLVAAPTYRDCKEGTRRLLQELSKLGYRVSAKKAQLCREEVTYLGYLLKGGKRWLTPARKATVMKIPTPTTPRQVREFLGKAGFCRLFIPGFASLAAPLYPLTRPKVPFTWTEAHQEAFGRIKEALLSAPALALPDLTKPFALYVDEKEGVARGVLTQTLGPWRRPVAYLSKKLDPVASGWPTCLKAIAAVALLLKDADKLTLGQNVLVIAPHNLESIVRQPPDRWMTNARMTHYQSLLLNERVSFAPPAILNPATLLPVESDDTPIHICSEILAEETGTRPDLRDQPLPGVPAWYTDGSSFIMDGRRQAGAAIVDNKRTVWASNLPEGTSAQKAELIALTQALRLAEGKSINIYTDSRYAFATAHVHGAIYKQRGWLTSAGKDIKNKEEILALLEAIHLPKRVAIIHCPGHQRGTDPVATGNRKADEAAKQAAQSTRILTETTKNAGKRTADGSEFEKRTADGSEFESPKKKAKVE

SEQ ID NO: 1675 - protein, 2119 aa, synthetic construct
MPAAKRVKLDGGDKKYSIGLDIGTNSVGWAVITDEYKVPSKKFKVLGNTDRHSIKKNLIGALLFDSGETAEATRLKRTARRRYTRRKNRICYLQEIFSNEMAKVDDSFFHRLEESFLVEEDKKHERHPIFGNIVDEVAYHEKYPTIYHLRKKLVDSTDKADLRLIYLALAHMIKFRGHFLIEGDLNPDNSDVDKLFIQLVQTYNQLFEENPINASGVDAKAILSARLSKSRRLENLIAQLPGEKKNGLFGNLIALSLGLTPNFKSNFDLAEDAKLQLSKDTYDDDLDNLLAQIGDQYADLFLAAKNLSDAILLSDILRVNTEITKAPLSASMIKRYDEHHQDLTLLKALVRQQLPEKYKEIFFDQSKNGYAGYIDGGASQEEFYKFIKPILEKMDGTEELLVKLNREDLLRKQRTFDNGSIPHQIHLGELHAILRRQEDFYPFLKDNREKIEKILTFRIPYYVGPLARGNSRFAWMTRKSEETITPWNFEEVVDKGASAQSFIERMTNFDKNLPNEKVLPKHSLLYEYFTVYNELTKVKYVTEGMRKPAFLSGEQKKAIVDLLFKTNRKVTVKQLKEDYFKKIECFDSVEISGVEDRFNASLGTYHDLLKIIKDKDFLDNEENEDILEDIVLTLTLFEDREMIEERLKTYAHLFDDKVMKQLKRRRYTGWGRLSRKLINGIRDKQSGKTILDFLKSDGFANRNFMQLIHDDSLTFKEDIQKAQVSGQGDSLHEHIANLAGSPAIKKGILQTVKVVDELVKVMGRHKPENIVIEMARENQTTQKGQKNSRERMKRIEEGIKELGSQILKEHPVENTQLQNEKLYLYYLQNGRDMYVDQELDINRLSDYDVDHIVPQSFLKDDSIDNKVLTRSDKARGKSDNVPSEEVVKKMKNYWRQLLNAKLITQRKFDNLTKAERGGLSELDKAGFIKRQLVETRQITKHVAQILDSRMNTKYDENDKLIREVKVITLKSKLVSDFRKDFQFYKVREINNYHHAHDAYLNAVVGTALIKKYPKLESEFVYGDYKVYDVRKMIAKSEQEIGKATAKYFFYSNIMNFFKTEITLANGEIRKRPLIETNGETGEIVWDKGRDFATVRKVLSMPQVNIVKKTEVQTGGFSKESILPKRNSDKLIARKKDWDPKKYGGFDSPTVAYSVLVVAKVEKGKSKKLKSVKELLGITIMERSSFEKNPIDFLEAKGYKEVKKDLIIKLPKYSLFELENGRKRMLASAGELQKGNELALPSKYVNFLYLASHYEKLKGSPEDNEQKQLFVEQHKHYLDEIIEQISEFSKRVILADANLDKVLSAYNKHRDKPIREQAENIIHLFTLTNLGAPAAFKYFDTTIDRKRYTSTKEVLDATLIHQSITGLYETRIDLSQLGGDGGGGSGGLLGRDLLTKLKAQIQFSTEGPQVTWEDRPAMCLVLNLEEEYRLHEKPVPPSIDPSWLQLFPMVWAEKAGMGLANQVPPVVVELKSDASPVAVRQYPMSKEAREGIRPHIQRFLDLGILVPCQSPWNTPLLPVKKPGTNDYRPVQDLREVNKRVQDIHPTVPNPYNLLSSLPPSHTWYSVLDLKDAFFCLKLHPNSQPLFAFEWRDPEKGNTGQLTWTRLPQGFKNSPTLFNEALHRDLASFRALNPQVVMLQYVDDLLVAAPTYRDCKEGTRRLLQELSKLGYRVSAKKAQLCREEVTYLGYLLKGGKRWLTPARKATVMKIPTPTTPRQVREFLGKAGFCRLFIPGFASLAAPLYPLTRPKVPFTWTEAHQEAFGRIKEALLSAPALALPDLTKPFALYVDEKEGVARGVLTQTLGPWRRPVAYLSKKLDPVASGWPTCLKAIAAVALLLKDADKLTLGQNVLVIAPHNLESIVRQPPDRWMTNARMTHYQSLLLNERVSFAPPAILNPATLLPVESDDTPIHICSEILAEETGTRPDLRDQPLPGVPAWYTDGSSFIMDGRRQAGAAIVDNKRTVWASNLPEGTSAQKAELIALTQALRLAEGKSINIYTDSRYAFATAHVHGAIYKQRGWLTSAGKDIKNKEEILALLEAIHLPKRVAIIHCPGHQRGTDPVATGNRKADEAAKQAAQSTRILTETTKNAGKRTADGSEFEKRTADGSEFESPKKKAKVE

SEQ ID NO: 1676 - protein, 2122 aa, synthetic construct
MPAAKRVKLDGGDKKYSIGLDIGTNSVGWAVITDEYKVPSKKFKVLGNTDRHSIKKNLIGALLFDSGETAEATRLKRTARRRYTRRKNRICYLQEIFSNEMAKVDDSFFHRLEESFLVEEDKKHERHPIFGNIVDEVAYHEKYPTIYHLRKKLVDSTDKADLRLIYLALAHMIKFRGHFLIEGDLNPDNSDVDKLFIQLVQTYNQLFEENPINASGVDAKAILSARLSKSRRLENLIAQLPGEKKNGLFGNLIALSLGLTPNFKSNFDLAEDAKLQLSKDTYDDDLDNLLAQIGDQYADLFLAAKNLSDAILLSDILRVNTEITKAPLSASMIKRYDEHHQDLTLLKALVRQQLPEKYKEIFFDQSKNGYAGYIDGGASQEEFYKFIKPILEKMDGTEELLVKLNREDLLRKQRTFDNGSIPHQIHLGELHAILRRQEDFYPFLKDNREKIEKILTFRIPYYVGPLARGNSRFAWMTRKSEETITPWNFEEVVDKGASAQSFIERMTNFDKNLPNEKVLPKHSLLYEYFTVYNELTKVKYVTEGMRKPAFLSGEQKKAIVDLLFKTNRKVTVKQLKEDYFKKIECFDSVEISGVEDRFNASLGTYHDLLKIIKDKDFLDNEENEDILEDIVLTLTLFEDREMIEERLKTYAHLFDDKVMKQLKRRRYTGWGRLSRKLINGIRDKQSGKTILDFLKSDGFANRNFMQLIHDDSLTFKEDIQKAQVSGQGDSLHEHIANLAGSPAIKKGILQTVKVVDELVKVMGRHKPENIVIEMARENQTTQKGQKNSRERMKRIEEGIKELGSQILKEHPVENTQLQNEKLYLYYLQNGRDMYVDQELDINRLSDYDVDHIVPQSFLKDDSIDNKVLTRSDKARGKSDNVPSEEVVKKMKNYWRQLLNAKLITQRKFDNLTKAERGGLSELDKAGFIKRQLVETRQITKHVAQILDSRMNTKYDENDKLIREVKVITLKSKLVSDFRKDFQFYKVREINNYHHAHDAYLNAVVGTALIKKYPKLESEFVYGDYKVYDVRKMIAKSEQEIGKATAKYFFYSNIMNFFKTEITLANGEIRKRPLIETNGETGEIVWDKGRDFATVRKVLSMPQVNIVKKTEVQTGGFSKESILPKRNSDKLIARKKDWDPKKYGGFDSPTVAYSVLVVAKVEKGKSKKLKSVKELLGITIMERSSFEKNPIDFLEAKGYKEVKKDLIIKLPKYSLFELENGRKRMLASAGELQKGNELALPSKYVNFLYLASHYEKLKGSPEDNEQKQLFVEQHKHYLDEIIEQISEFSKRVILADANLDKVLSAYNKHRDKPIREQAENIIHLFTLTNLGAPAAFKYFDTTIDRKRYTSTKEVLDATLIHQSITGLYETRIDLSQLGGDGGGGGGSSGGLLGRDLLTKLKAQIQFSTEGPQVTWEDRPAMCLVLNLEEEYRLHEKPVPPSIDPSWLQLFPMVWAEKAGMGLANQVPPVVVELKSDASPVAVRQYPMSKEAREGIRPHIQRFLDLGILVPCQSPWNTPLLPVKKPGTNDYRPVQDLREVNKRVQDIHPTVPNPYNLLSSLPPSHTWYSVLDLKDAFFCLKLHPNSQPLFAFEWRDPEKGNTGQLTWTRLPQGFKNSPTLFNEALHRDLASFRALNPQVVMLQYVDDLLVAAPTYRDCKEGTRRLLQELSKLGYRVSAKKAQLCREEVTYLGYLLKGGKRWLTPARKATVMKIPTPTTPRQVREFLGKAGFCRLFIPGFASLAAPLYPLTRPKVPFTWTEAHQEAFGRIKEALLSAPALALPDLTKPFALYVDEKEGVARGVLTQTLGPWRRPVAYLSKKLDPVASGWPTCLKAIAAVALLLKDADKLTLGQNVLVIAPHNLESIVRQPPDRWMTNARMTHYQSLLLNERVSFAPPAILNPATLLPVESDDTPIHICSEILAEETGTRPDLRDQPLPGVPAWYTDGSSFIMDGRRQAGAAIVDNKRTVWASNLPEGTSAQKAELIALTQALRLAEGKSINIYTDSRYAFATAHVHGAIYKQRGWLTSAGKDIKNKEEILALLEAIHLPKRVAIIHCPGHQRGTDPVATGNRKADEAAKQAAQSTRILTETTKNAGKRTADGSEFEKRTADGSEFESPKKKAKVE

SEQ ID NO: 1677 - protein, 2127 aa, synthetic construct
MPAAKRVKLDGGDKKYSIGLDIGTNSVGWAVITDEYKVPSKKFKVLGNTDRHSIKKNLIGALLFDSGETAEATRLKRTARRRYTRRKNRICYLQEIFSNEMAKVDDSFFHRLEESFLVEEDKKHERHPIFGNIVDEVAYHEKYPTIYHLRKKLVDSTDKADLRLIYLALAHMIKFRGHFLIEGDLNPDNSDVDKLFIQLVQTYNQLFEENPINASGVDAKAILSARLSKSRRLENLIAQLPGEKKNGLFGNLIALSLGLTPNFKSNFDLAEDAKLQLSKDTYDDDLDNLLAQIGDQYADLFLAAKNLSDAILLSDILRVNTEITKAPLSASMIKRYDEHHQDLTLLKALVRQQLPEKYKEIFFDQSKNGYAGYIDGGASQEEFYKFIKPILEKMDGTEELLVKLNREDLLRKQRTFDNGSIPHQIHLGELHAILRRQEDFYPFLKDNREKIEKILTFRIPYYVGPLARGNSRFAWMTRKSEETITPWNFEEVVDKGASAQSFIERMTNFDKNLPNEKVLPKHSLLYEYFTVYNELTKVKYVTEGMRKPAFLSGEQKKAIVDLLFKTNRKVTVKQLKEDYFKKIECFDSVEISGVEDRFNASLGTYHDLLKIIKDKDFLDNEENEDILEDIVLTLTLFEDREMIEERLKTYAHLFDDKVMKQLKRRRYTGWGRLSRKLINGIRDKQSGKTILDFLKSDGFANRNFMQLIHDDSLTFKEDIQKAQVSGQGDSLHEHIANLAGSPAIKKGILQTVKVVDELVKVMGRHKPENIVIEMARENQTTQKGQKNSRERMKRIEEGIKELGSQILKEHPVENTQLQNEKLYLYYLQNGRDMYVDQELDINRLSDYDVDHIVPQSFLKDDSIDNKVLTRSDKARGKSDNVPSEEVVKKMKNYWRQLLNAKLITQRKFDNLTKAERGGLSELDKAGFIKRQLVETRQITKHVAQILDSRMNTKYDENDKLIREVKVITLKSKLVSDFRKDFQFYKVREINNYHHAHDAYLNAVVGTALIKKYPKLESEFVYGDYKVYDVRKMIAKSEQEIGKATAKYFFYSNIMNFFKTEITLANGEIRKRPLIETNGETGEIVWDKGRDFATVRKVLSMPQVNIVKKTEVQTGGFSKESILPKRNSDKLIARKKDWDPKKYGGFDSPTVAYSVLVVAKVEKGKSKKLKSVKELLGITIMERSSFEKNPIDFLEAKGYKEVKKDLIIKLPKYSLFELENGRKRMLASAGELQKGNELALPSKYVNFLYLASHYEKLKGSPEDNEQKQLFVEQHKHYLDEIIEQISEFSKRVILADANLDKVLSAYNKHRDKPIREQAENIIHLFTLTNLGAPAAFKYFDTTIDRKRYTSTKEVLDATLIHQSITGLYETRIDLSQLGGDGGEAAAKGGGGSSGGLLGRDLLTKLKAQIQFSTEGPQVTWEDRPAMCLVLNLEEEYRLHEKPVPPSIDPSWLQLFPMVWAEKAGMGLANQVPPVVVELKSDASPVAVRQYPMSKEAREGIRPHIQRFLDLGILVPCQSPWNTPLLPVKKPGTNDYRPVQDLREVNKRVQDIHPTVPNPYNLLSSLPPSHTWYSVLDLKDAFFCLKLHPNSQPLFAFEWRDPEKGNTGQLTWTRLPQGFKNSPTLFNEALHRDLASFRALNPQVVMLQYVDDLLVAAPTYRDCKEGTRRLLQELSKLGYRVSAKKAQLCREEVTYLGYLLKGGKRWLTPARKATVMKIPTPTTPRQVREFLGKAGFCRLFIPGFASLAAPLYPLTRPKVPFTWTEAHQEAFGRIKEALLSAPALALPDLTKPFALYVDEKEGVARGVLTQTLGPWRRPVAYLSKKLDPVASGWPTCLKAIAAVALLLKDADKLTLGQNVLVIAPHNLESIVRQPPDRWMTNARMTHYQSLLLNERVSFAPPAILNPATLLPVESDDTPIHICSEILAEETGTRPDLRDQPLPGVPAWYTDGSSFIMDGRRQAGAAIVDNKRTVWASNLPEGTSAQKAELIALTQALRLAEGKSINIYTDSRYAFATAHVHGAIYKQRGWLTSAGKDIKNKEEILALLEAIHLPKRVAIIHCPGHQRGTDPVATGNRKADEAAKQAAQSTRILTETTKNAGKRTADGSEFEKRTADGSEFESPKKKAKVE

SEQ ID NO: 1678 - protein, 2128 aa, synthetic construct
MPAAKRVKLDGGDKKYSIGLDIGTNSVGWAVITDEYKVPSKKFKVLGNTDRHSIKKNLIGALLFDSGETAEATRLKRTARRRYTRRKNRICYLQEIFSNEMAKVDDSFFHRLEESFLVEEDKKHERHPIFGNIVDEVAYHEKYPTIYHLRKKLVDSTDKADLRLIYLALAHMIKFRGHFLIEGDLNPDNSDVDKLFIQLVQTYNQLFEENPINASGVDAKAILSARLSKSRRLENLIAQLPGEKKNGLFGNLIALSLGLTPNFKSNFDLAEDAKLQLSKDTYDDDLDNLLAQIGDQYADLFLAAKNLSDAILLSDILRVNTEITKAPLSASMIKRYDEHHQDLTLLKALVRQQLPEKYKEIFFDQSKNGYAGYIDGGASQEEFYKFIKPILEKMDGTEELLVKLNREDLLRKQRTFDNGSIPHQIHLGELHAILRRQEDFYPFLKDNREKIEKILTFRIPYYVGPLARGNSRFAWMTRKSEETITPWNFEEVVDKGASAQSFIERMTNFDKNLPNEKVLPKHSLLYEYFTVYNELTKVKYVTEGMRKPAFLSGEQKKAIVDLLFKTNRKVTVKQLKEDYFKKIECFDSVEISGVEDRFNASLGTYHDLLKIIKDKDFLDNEENEDILEDIVLTLTLFEDREMIEERLKTYAHLFDDKVMKQLKRRRYTGWGRLSRKLINGIRDKQSGKTILDFLKSDGFANRNFMQLIHDDSLTFKEDIQKAQVSGQGDSLHEHIANLAGSPAIKKGILQTVKVVDELVKVMGRHKPENIVIEMARENQTTQKGQKNSRERMKRIEEGIKELGSQILKEHPVENTQLQNEKLYLYYLQNGRDMYVDQELDINRLSDYDVDHIVPQSFLKDDSIDNKVLTRSDKARGKSDNVPSEEVVKKMKNYWRQLLNAKLITQRKFDNLTKAERGGLSELDKAGFIKRQLVETRQITKHVAQILDSRMNTKYDENDKLIREVKVITLKSKLVSDFRKDFQFYKVREINNYHHAHDAYLNAVVGTALIKKYPKLESEFVYGDYKVYDVRKMIAKSEQEIGKATAKYFFYSNIMNFFKTEITLANGEIRKRPLIETNGETGEIVWDKGRDFATVRKVLSMPQVNIVKKTEVQTGGFSKESILPKRNSDKLIARKKDWDPKKYGGFDSPTVAYSVLVVAKVEKGKSKKLKSVKELLGITIMERSSFEKNPIDFLEAKGYKEVKKDLIIKLPKYSLFELENGRKRMLASAGELQKGNELALPSKYVNFLYLASHYEKLKGSPEDNEQKQLFVEQHKHYLDEIIEQISEFSKRVILADANLDKVLSAYNKHRDKPIREQAENIIHLFTLTNLGAPAAFKYFDTTIDRKRYTSTKEVLDATLIHQSITGLYETRIDLSQLGGDGGGGSGGSGGSGGSGGLLGRDLLTKLKAQIQFSTEGPQVTWEDRPAMCLVLNLEEEYRLHEKPVPPSIDPSWLQLFPMVWAEKAGMGLANQVPPVVVELKSDASPVAVRQYPMSKEAREGIRPHIQRFLDLGILVPCQSPWNTPLLPVKKPGTNDYRPVQDLREVNKRVQDIHPTVPNPYNLLSSLPPSHTWYSVLDLKDAFFCLKLHPNSQPLFAFEWRDPEKGNTGQLTWTRLPQGFKNSPTLFNEALHRDLASFRALNPQVVMLQYVDDLLVAAPTYRDCKEGTRRLLQELSKLGYRVSAKKAQLCREEVTYLGYLLKGGKRWLTPARKATVMKIPTPTTPRQVREFLGKAGFCRLFIPGFASLAAPLYPLTRPKVPFTWTEAHQEAFGRIKEALLSAPALALPDLTKPFALYVDEKEGVARGVLTQTLGPWRRPVAYLSKKLDPVASGWPTCLKAIAAVALLLKDADKLTLGQNVLVIAPHNLESIVRQPPDRWMTNARMTHYQSLLLNERVSFAPPAILNPATLLPVESDDTPIHICSEILAEETGTRPDLRDQPLPGVPAWYTDGSSFIMDGRRQAGAAIVDNKRTVWASNLPEGTSAQKAELIALTQALRLAEGKSINIYTDSRYAFATAHVHGAIYKQRGWLTSAGKDIKNKEEILALLEAIHLPKRVAIIHCPGHQRGTDPVATGNRKADEAAKQAAQSTRILTETTKNAGKRTADGSEFEKRTADGSEFESPKKKAKVE

SEQ ID NO: 1679 - protein, 2124 aa, synthetic construct
MPAAKRVKLDGGDKKYSIGLDIGTNSVGWAVITDEYKVPSKKFKVLGNTDRHSIKKNLIGALLFDSGETAEATRLKRTARRRYTRRKNRICYLQEIFSNEMAKVDDSFFHRLEESFLVEEDKKHERHPIFGNIVDEVAYHEKYPTIYHLRKKLVDSTDKADLRLIYLALAHMIKFRGHFLIEGDLNPDNSDVDKLFIQLVQTYNQLFEENPINASGVDAKAILSARLSKSRRLENLIAQLPGEKKNGLFGNLIALSLGLTPNFKSNFDLAEDAKLQLSKDTYDDDLDNLLAQIGDQYADLFLAAKNLSDAILLSDILRVNTEITKAPLSASMIKRYDEHHQDLTLLKALVRQQLPEKYKEIFFDQSKNGYAGYIDGGASQEEFYKFIKPILEKMDGTEELLVKLNREDLLRKQRTFDNGSIPHQIHLGELHAILRRQEDFYPFLKDNREKIEKILTFRIPYYVGPLARGNSRFAWMTRKSEETITPWNFEEVVDKGASAQSFIERMTNFDKNLPNEKVLPKHSLLYEYFTVYNELTKVKYVTEGMRKPAFLSGEQKKAIVDLLFKTNRKVTVKQLKEDYFKKIECFDSVEISGVEDRFNASLGTYHDLLKIIKDKDFLDNEENEDILEDIVLTLTLFEDREMIEERLKTYAHLFDDKVMKQLKRRRYTGWGRLSRKLINGIRDKQSGKTILDFLKSDGFANRNFMQLIHDDSLTFKEDIQKAQVSGQGDSLHEHIANLAGSPAIKKGILQTVKVVDELVKVMGRHKPENIVIEMARENQTTQKGQKNSRERMKRIEEGIKELGSQILKEHPVENTQLQNEKLYLYYLQNGRDMYVDQELDINRLSDYDVDHIVPQSFLKDDSIDNKVLTRSDKARGKSDNVPSEEVVKKMKNYWRQLLNAKLITQRKFDNLTKAERGGLSELDKAGFIKRQLVETRQITKHVAQILDSRMNTKYDENDKLIREVKVITLKSKLVSDFRKDFQFYKVREINNYHHAHDAYLNAVVGTALIKKYPKLESEFVYGDYKVYDVRKMIAKSEQEIGKATAKYFFYSNIMNFFKTEITLANGEIRKRPLIETNGETGEIVWDKGRDFATVRKVLSMPQVNIVKKTEVQTGGFSKESILPKRNSDKLIARKKDWDPKKYGGFDSPTVAYSVLVVAKVEKGKSKKLKSVKELLGITIMERSSFEKNPIDFLEAKGYKEVKKDLIIKLPKYSLFELENGRKRMLASAGELQKGNELALPSKYVNFLYLASHYEKLKGSPEDNEQKQLFVEQHKHYLDEIIEQISEFSKRVILADANLDKVLSAYNKHRDKPIREQAENIIHLFTLTNLGAPAAFKYFDTTIDRKRYTSTKEVLDATLIHQSITGLYETRIDLSQLGGDGGEAAAKGGSGGLLGRDLLTKLKAQIQFSTEGPQVTWEDRPAMCLVLNLEEEYRLHEKPVPPSIDPSWLQLFPMVWAEKAGMGLANQVPPVVVELKSDASPVAVRQYPMSKEAREGIRPHIQRFLDLGILVPCQSPWNTPLLPVKKPGTNDYRPVQDLREVNKRVQDIHPTVPNPYNLLSSLPPSHTWYSVLDLKDAFFCLKLHPNSQPLFAFEWRDPEKGNTGQLTWTRLPQGFKNSPTLFNEALHRDLASFRALNPQVVMLQYVDDLLVAAPTYRDCKEGTRRLLQELSKLGYRVSAKKAQLCREEVTYLGYLLKGGKRWLTPARKATVMKIPTPTTPRQVREFLGKAGFCRLFIPGFASLAAPLYPLTRPKVPFTWTEAHQEAFGRIKEALLSAPALALPDLTKPFALYVDEKEGVARGVLTQTLGPWRRPVAYLSKKLDPVASGWPTCLKAIAAVALLLKDADKLTLGQNVLVIAPHNLESIVRQPPDRWMTNARMTHYQSLLLNERVSFAPPAILNPATLLPVESDDTPIHICSEILAEETGTRPDLRDQPLPGVPAWYTDGSSFIMDGRRQAGAAIVDNKRTVWASNLPEGTSAQKAELIALTQALRLAEGKSINIYTDSRYAFATAHVHGAIYKQRGWLTSAGKDIKNKEEILALLEAIHLPKRVAIIHCPGHQRGTDPVATGNRKADEAAKQAAQSTRILTETTKNAGKRTADGSEFEKRTADGSEFESPKKKAKVE

SEQ ID NO: 1680 - protein, 2123 aa, synthetic construct
MPAAKRVKLDGGDKKYSIGLDIGTNSVGWAVITDEYKVPSKKFKVLGNTDRHSIKKNLIGALLFDSGETAEATRLKRTARRRYTRRKNRICYLQEIFSNEMAKVDDSFFHRLEESFLVEEDKKHERHPIFGNIVDEVAYHEKYPTIYHLRKKLVDSTDKADLRLIYLALAHMIKFRGHFLIEGDLNPDNSDVDKLFIQLVQTYNQLFEENPINASGVDAKAILSARLSKSRRLENLIAQLPGEKKNGLFGNLIALSLGLTPNFKSNFDLAEDAKLQLSKDTYDDDLDNLLAQIGDQYADLFLAAKNLSDAILLSDILRVNTEITKAPLSASMIKRYDEHHQDLTLLKALVRQQLPEKYKEIFFDQSKNGYAGYIDGGASQEEFYKFIKPILEKMDGTEELLVKLNREDLLRKQRTFDNGSIPHQIHLGELHAILRRQEDFYPFLKDNREKIEKILTFRIPYYVGPLARGNSRFAWMTRKSEETITPWNFEEVVDKGASAQSFIERMTNFDKNLPNEKVLPKHSLLYEYFTVYNELTKVKYVTEGMRKPAFLSGEQKKAIVDLLFKTNRKVTVKQLKEDYFKKIECFDSVEISGVEDRFNASLGTYHDLLKIIKDKDFLDNEENEDILEDIVLTLTLFEDREMIEERLKTYAHLFDDKVMKQLKRRRYTGWGRLSRKLINGIRDKQSGKTILDFLKSDGFANRNFMQLIHDDSLTFKEDIQKAQVSGQGDSLHEHIANLAGSPAIKKGILQTVKVVDELVKVMGRHKPENIVIEMARENQTTQKGQKNSRERMKRIEEGIKELGSQILKEHPVENTQLQNEKLYLYYLQNGRDMYVDQELDINRLSDYDVDHIVPQSFLKDDSIDNKVLTRSDKARGKSDNVPSEEVVKKMKNYWRQLLNAKLITQRKFDNLTKAERGGLSELDKAGFIKRQLVETRQITKHVAQILDSRMNTKYDENDKLIREVKVITLKSKLVSDFRKDFQFYKVREINNYHHAHDAYLNAVVGTALIKKYPKLESEFVYGDYKVYDVRKMIAKSEQEIGKATAKYFFYSNIMNFFKTEITLANGEIRKRPLIETNGETGEIVWDKGRDFATVRKVLSMPQVNIVKKTEVQTGGFSKESILPKRNSDKLIARKKDWDPKKYGGFDSPTVAYSVLVVAKVEKGKSKKLKSVKELLGITIMERSSFEKNPIDFLEAKGYKEVKKDLIIKLPKYSLFELENGRKRMLASAGELQKGNELALPSKYVNFLYLASHYEKLKGSPEDNEQKQLFVEQHKHYLDEIIEQISEFSKRVILADANLDKVLSAYNKHRDKPIREQAENIIHLFTLTNLGAPAAFKYFDTTIDRKRYTSTKEVLDATLIHQSITGLYETRIDLSQLGGDGGPAPAPAPGGLLGRDLLTKLKAQIQFSTEGPQVTWEDRPAMCLVLNLEEEYRLHEKPVPPSIDPSWLQLFPMVWAEKAGMGLANQVPPVVVELKSDASPVAVRQYPMSKEAREGIRPHIQRFLDLGILVPCQSPWNTPLLPVKKPGTNDYRPVQDLREVNKRVQDIHPTVPNPYNLLSSLPPSHTWYSVLDLKDAFFCLKLHPNSQPLFAFEWRDPEKGNTGQLTWTRLPQGFKNSPTLFNEALHRDLASFRALNPQVVMLQYVDDLLVAAPTYRDCKEGTRRLLQELSKLGYRVSAKKAQLCREEVTYLGYLLKGGKRWLTPARKATVMKIPTPTTPRQVREFLGKAGFCRLFIPGFASLAAPLYPLTRPKVPFTWTEAHQEAFGRIKEALLSAPALALPDLTKPFALYVDEKEGVARGVLTQTLGPWRRPVAYLSKKLDPVASGWPTCLKAIAAVALLLKDADKLTLGQNVLVIAPHNLESIVRQPPDRWMTNARMTHYQSLLLNERVSFAPPAILNPATLLPVESDDTPIHICSEILAEETGTRPDLRDQPLPGVPAWYTDGSSFIMDGRRQAGAAIVDNKRTVWASNLPEGTSAQKAELIALTQALRLAEGKSINIYTDSRYAFATAHVHGAIYKQRGWLTSAGKDIKNKEEILALLEAIHLPKRVAIIHCPGHQRGTDPVATGNRKADEAAKQAAQSTRILTETTKNAGKRTADGSEFEKRTADGSEFESPKKKAKVE

SEQ ID NO: 1681 - protein, 2131 aa, synthetic construct
MPAAKRVKLDGGDKKYSIGLDIGTNSVGWAVITDEYKVPSKKFKVLGNTDRHSIKKNLIGALLFDSGETAEATRLKRTARRRYTRRKNRICYLQEIFSNEMAKVDDSFFHRLEESFLVEEDKKHERHPIFGNIVDEVAYHEKYPTIYHLRKKLVDSTDKADLRLIYLALAHMIKFRGHFLIEGDLNPDNSDVDKLFIQLVQTYNQLFEENPINASGVDAKAILSARLSKSRRLENLIAQLPGEKKNGLFGNLIALSLGLTPNFKSNFDLAEDAKLQLSKDTYDDDLDNLLAQIGDQYADLFLAAKNLSDAILLSDILRVNTEITKAPLSASMIKRYDEHHQDLTLLKALVRQQLPEKYKEIFFDQSKNGYAGYIDGGASQEEFYKFIKPILEKMDGTEELLVKLNREDLLRKQRTFDNGSIPHQIHLGELHAILRRQEDFYPFLKDNREKIEKILTFRIPYYVGPLARGNSRFAWMTRKSEETITPWNFEEVVDKGASAQSFIERMTNFDKNLPNEKVLPKHSLLYEYFTVYNELTKVKYVTEGMRKPAFLSGEQKKAIVDLLFKTNRKVTVKQLKEDYFKKIECFDSVEISGVEDRFNASLGTYHDLLKIIKDKDFLDNEENEDILEDIVLTLTLFEDREMIEERLKTYAHLFDDKVMKQLKRRRYTGWGRLSRKLINGIRDKQSGKTILDFLKSDGFANRNFMQLIHDDSLTFKEDIQKAQVSGQGDSLHEHIANLAGSPAIKKGILQTVKVVDELVKVMGRHKPENIVIEMARENQTTQKGQKNSRERMKRIEEGIKELGSQILKEHPVENTQLQNEKLYLYYLQNGRDMYVDQELDINRLSDYDVDHIVPQSFLKDDSIDNKVLTRSDKARGKSDNVPSEEVVKKMKNYWRQLLNAKLITQRKFDNLTKAERGGLSELDKAGFIKRQLVETRQITKHVAQILDSRMNTKYDENDKLIREVKVITLKSKLVSDFRKDFQFYKVREINNYHHAHDAYLNAVVGTALIKKYPKLESEFVYGDYKVYDVRKMIAKSEQEIGKATAKYFFYSNIMNFFKTEITLANGEIRKRPLIETNGETGEIVWDKGRDFATVRKVLSMPQVNIVKKTEVQTGGFSKESILPKRNSDKLIARKKDWDPKKYGGFDSPTVAYSVLVVAKVEKGKSKKLKSVKELLGITIMERSSFEKNPIDFLEAKGYKEVKKDLIIKLPKYSLFELENGRKRMLASAGELQKGNELALPSKYVNFLYLASHYEKLKGSPEDNEQKQLFVEQHKHYLDEIIEQISEFSKRVILADANLDKVLSAYNKHRDKPIREQAENIIHLFTLTNLGAPAAFKYFDTTIDRKRYTSTKEVLDATLIHQSITGLYETRIDLSQLGGDGGGSSGSSGSSGSSGSSGGLLGRDLLTKLKAQIQFSTEGPQVTWEDRPAMCLVLNLEEEYRLHEKPVPPSIDPSWLQLFPMVWAEKAGMGLANQVPPVVVELKSDASPVAVRQYPMSKEAREGIRPHIQRFLDLGILVPCQSPWNTPLLPVKKPGTNDYRPVQDLREVNKRVQDIHPTVPNPYNLLSSLPPSHTWYSVLDLKDAFFCLKLHPNSQPLFAFEWRDPEKGNTGQLTWTRLPQGFKNSPTLFNEALHRDLASFRALNPQVVMLQYVDDLLVAAPTYRDCKEGTRRLLQELSKLGYRVSAKKAQLCREEVTYLGYLLKGGKRWLTPARKATVMKIPTPTTPRQVREFLGKAGFCRLFIPGFASLAAPLYPLTRPKVPFTWTEAHQEAFGRIKEALLSAPALALPDLTKPFALYVDEKEGVARGVLTQTLGPWRRPVAYLSKKLDPVASGWPTCLKAIAAVALLLKDADKLTLGQNVLVIAPHNLESIVRQPPDRWMTNARMTHYQSLLLNERVSFAPPAILNPATLLPVESDDTPIHICSEILAEETGTRPDLRDQPLPGVPAWYTDGSSFIMDGRRQAGAAIVDNKRTVWASNLPEGTSAQKAELIALTQALRLAEGKSINIYTDSRYAFATAHVHGAIYKQRGWLTSAGKDIKNKEEILALLEAIHLPKRVAIIHCPGHQRGTDPVATGNRKADEAAKQAAQSTRILTETTKNAGKRTADGSEFEKRTADGSEFESPKKKAKVE

SEQ ID NO: 1682 - protein, 2127 aa, synthetic construct
MPAAKRVKLDGGDKKYSIGLDIGTNSVGWAVITDEYKVPSKKFKVLGNTDRHSIKKNLIGALLFDSGETAEATRLKRTARRRYTRRKNRICYLQEIFSNEMAKVDDSFFHRLEESFLVEEDKKHERHPIFGNIVDEVAYHEKYPTIYHLRKKLVDSTDKADLRLIYLALAHMIKFRGHFLIEGDLNPDNSDVDKLFIQLVQTYNQLFEENPINASGVDAKAILSARLSKSRRLENLIAQLPGEKKNGLFGNLIALSLGLTPNFKSNFDLAEDAKLQLSKDTYDDDLDNLLAQIGDQYADLFLAAKNLSDAILLSDILRVNTEITKAPLSASMIKRYDEHHQDLTLLKALVRQQLPEKYKEIFFDQSKNGYAGYIDGGASQEEFYKFIKPILEKMDGTEELLVKLNREDLLRKQRTFDNGSIPHQIHLGELHAILRRQEDFYPFLKDNREKIEKILTFRIPYYVGPLARGNSRFAWMTRKSEETITPWNFEEVVDKGASAQSFIERMTNFDKNLPNEKVLPKHSLLYEYFTVYNELTKVKYVTEGMRKPAFLSGEQKKAIVDLLFKTNRKVTVKQLKEDYFKKIECFDSVEISGVEDRFNASLGTYHDLLKIIKDKDFLDNEENEDILEDIVLTLTLFEDREMIEERLKTYAHLFDDKVMKQLKRRRYTGWGRLSRKLINGIRDKQSGKTILDFLKSDGFANRNFMQLIHDDSLTFKEDIQKAQVSGQGDSLHEHIANLAGSPAIKKGILQTVKVVDELVKVMGRHKPENIVIEMARENQTTQKGQKNSRERMKRIEEGIKELGSQILKEHPVENTQLQNEKLYLYYLQNGRDMYVDQELDINRLSDYDVDHIVPQSFLKDDSIDNKVLTRSDKARGKSDNVPSEEVVKKMKNYWRQLLNAKLITQRKFDNLTKAERGGLSELDKAGFIKRQLVETRQITKHVAQILDSRMNTKYDENDKLIREVKVITLKSKLVSDFRKDFQFYKVREINNYHHAHDAYLNAVVGTALIKKYPKLESEFVYGDYKVYDVRKMIAKSEQEIGKATAKYFFYSNIMNFFKTEITLANGEIRKRPLIETNGETGEIVWDKGRDFATVRKVLSMPQVNIVKKTEVQTGGFSKESILPKRNSDKLIARKKDWDPKKYGGFDSPTVAYSVLVVAKVEKGKSKKLKSVKELLGITIMERSSFEKNPIDFLEAKGYKEVKKDLIIKLPKYSLFELENGRKRMLASAGELQKGNELALPSKYVNFLYLASHYEKLKGSPEDNEQKQLFVEQHKHYLDEIIEQISEFSKRVILADANLDKVLSAYNKHRDKPIREQAENIIHLFTLTNLGAPAAFKYFDTTIDRKRYTSTKEVLDATLIHQSITGLYETRIDLSQLGGDGGGGGGGSEAAAKGGLLGRDLLTKLKAQIQFSTEGPQVTWEDRPAMCLVLNLEEEYRLHEKPVPPSIDPSWLQLFPMVWAEKAGMGLANQVPPVVVELKSDASPVAVRQYPMSKEAREGIRPHIQRFLDLGILVPCQSPWNTPLLPVKKPGTNDYRPVQDLREVNKRVQDIHPTVPNPYNLLSSLPPSHTWYSVLDLKDAFFCLKLHPNSQPLFAFEWRDPEKGNTGQLTWTRLPQGFKNSPTLFNEALHRDLASFRALNPQVVMLQYVDDLLVAAPTYRDCKEGTRRLLQELSKLGYRVSAKKAQLCREEVTYLGYLLKGGKRWLTPARKATVMKIPTPTTPRQVREFLGKAGFCRLFIPGFASLAAPLYPLTRPKVPFTWTEAHQEAFGRIKEALLSAPALALPDLTKPFALYVDEKEGVARGVLTQTLGPWRRPVAYLSKKLDPVASGWPTCLKAIAAVALLLKDADKLTLGQNVLVIAPHNLESIVRQPPDRWMTNARMTHYQSLLLNERVSFAPPAILNPATLLPVESDDTPIHICSEILAEETGTRPDLRDQPLPGVPAWYTDGSSFIMDGRRQAGAAIVDNKRTVWASNLPEGTSAQKAELIALTQALRLAEGKSINIYTDSRYAFATAHVHGAIYKQRGWLTSAGKDIKNKEEILALLEAIHLPKRVAIIHCPGHQRGTDPVATGNRKADEAAKQAAQSTRILTETTKNAGKRTADGSEFEKRTADGSEFESPKKKAKVE

SEQ ID NO: 1683 - protein, 2125 aa, synthetic construct
MPAAKRVKLDGGDKKYSIGLDIGTNSVGWAVITDEYKVPSKKFKVLGNTDRHSIKKNLIGALLFDSGETAEATRLKRTARRRYTRRKNRICYLQEIFSNEMAKVDDSFFHRLEESFLVEEDKKHERHPIFGNIVDEVAYHEKYPTIYHLRKKLVDSTDKADLRLIYLALAHMIKFRGHFLIEGDLNPDNSDVDKLFIQLVQTYNQLFEENPINASGVDAKAILSARLSKSRRLENLIAQLPGEKKNGLFGNLIALSLGLTPNFKSNFDLAEDAKLQLSKDTYDDDLDNLLAQIGDQYADLFLAAKNLSDAILLSDILRVNTEITKAPLSASMIKRYDEHHQDLTLLKALVRQQLPEKYKEIFFDQSKNGYAGYIDGGASQEEFYKFIKPILEKMDGTEELLVKLNREDLLRKQRTFDNGSIPHQIHLGELHAILRRQEDFYPFLKDNREKIEKILTFRIPYYVGPLARGNSRFAWMTRKSEETITPWNFEEVVDKGASAQSFIERMTNFDKNLPNEKVLPKHSLLYEYFTVYNELTKVKYVTEGMRKPAFLSGEQKKAIVDLLFKTNRKVTVKQLKEDYFKKIECFDSVEISGVEDRFNASLGTYHDLLKIIKDKDFLDNEENEDILEDIVLTLTLFEDREMIEERLKTYAHLFDDKVMKQLKRRRYTGWGRLSRKLINGIRDKQSGKTILDFLKSDGFANRNFMQLIHDDSLTFKEDIQKAQVSGQGDSLHEHIANLAGSPAIKKGILQTVKVVDELVKVMGRHKPENIVIEMARENQTTQKGQKNSRERMKRIEEGIKELGSQILKEHPVENTQLQNEKLYLYYLQNGRDMYVDQELDINRLSDYDVDHIVPQSFLKDDSIDNKVLTRSDKARGKSDNVPSEEVVKKMKNYWRQLLNAKLITQRKFDNLTKAERGGLSELDKAGFIKRQLVETRQITKHVAQILDSRMNTKYDENDKLIREVKVITLKSKLVSDFRKDFQFYKVREINNYHHAHDAYLNAVVGTALIKKYPKLESEFVYGDYKVYDVRKMIAKSEQEIGKATAKYFFYSNIMNFFKTEITLANGEIRKRPLIETNGETGEIVWDKGRDFATVRKVLSMPQVNIVKKTEVQTGGFSKESILPKRNSDKLIARKKDWDPKKYGGFDSPTVAYSVLVVAKVEKGKSKKLKSVKELLGITIMERSSFEKNPIDFLEAKGYKEVKKDLIIKLPKYSLFELENGRKRMLASAGELQKGNELALPSKYVNFLYLASHYEKLKGSPEDNEQKQLFVEQHKHYLDEIIEQISEFSKRVILADANLDKVLSAYNKHRDKPIREQAENIIHLFTLTNLGAPAAFKYFDTTIDRKRYTSTKEVLDATLIHQSITGLYETRIDLSQLGGDGGPAPGGSGSSGGLLGRDLLTKLKAQIQFSTEGPQVTWEDRPAMCLVLNLEEEYRLHEKPVPPSIDPSWLQLFPMVWAEKAGMGLANQVPPVVVELKSDASPVAVRQYPMSKEAREGIRPHIQRFLDLGILVPCQSPWNTPLLPVKKPGTNDYRPVQDLREVNKRVQDIHPTVPNPYNLLSSLPPSHTWYSVLDLKDAFFCLKLHPNSQPLFAFEWRDPEKGNTGQLTWTRLPQGFKNSPTLFNEALHRDLASFRALNPQVVMLQYVDDLLVAAPTYRDCKEGTRRLLQELSKLGYRVSAKKAQLCREEVTYLGYLLKGGKRWLTPARKATVMKIPTPTTPRQVREFLGKAGFCRLFIPGFASLAAPLYPLTRPKVPFTWTEAHQEAFGRIKEALLSAPALALPDLTKPFALYVDEKEGVARGVLTQTLGPWRRPVAYLSKKLDPVASGWPTCLKAIAAVALLLKDADKLTLGQNVLVIAPHNLESIVRQPPDRWMTNARMTHYQSLLLNERVSFAPPAILNPATLLPVESDDTPIHICSEILAEETGTRPDLRDQPLPGVPAWYTDGSSFIMDGRRQAGAAIVDNKRTVWASNLPEGTSAQKAELIALTQALRLAEGKSINIYTDSRYAFATAHVHGAIYKQRGWLTSAGKDIKNKEEILALLEAIHLPKRVAIIHCPGHQRGTDPVATGNRKADEAAKQAAQSTRILTETTKNAGKRTADGSEFEKRTADGSEFESPKKKAKVE

SEQ ID NO: 1684 - protein, 2127 aa, synthetic construct
MPAAKRVKLDGGDKKYSIGLDIGTNSVGWAVITDEYKVPSKKFKVLGNTDRHSIKKNLIGALLFDSGETAEATRLKRTARRRYTRRKNRICYLQEIFSNEMAKVDDSFFHRLEESFLVEEDKKHERHPIFGNIVDEVAYHEKYPTIYHLRKKLVDSTDKADLRLIYLALAHMIKFRGHFLIEGDLNPDNSDVDKLFIQLVQTYNQLFEENPINASGVDAKAILSARLSKSRRLENLIAQLPGEKKNGLFGNLIALSLGLTPNFKSNFDLAEDAKLQLSKDTYDDDLDNLLAQIGDQYADLFLAAKNLSDAILLSDILRVNTEITKAPLSASMIKRYDEHHQDLTLLKALVRQQLPEKYKEIFFDQSKNGYAGYIDGGASQEEFYKFIKPILEKMDGTEELLVKLNREDLLRKQRTFDNGSIPHQIHLGELHAILRRQEDFYPFLKDNREKIEKILTFRIPYYVGPLARGNSRFAWMTRKSEETITPWNFEEVVDKGASAQSFIERMTNFDKNLPNEKVLPKHSLLYEYFTVYNELTKVKYVTEGMRKPAFLSGEQKKAIVDLLFKTNRKVTVKQLKEDYFKKIECFDSVEISGVEDRFNASLGTYHDLLKIIKDKDFLDNEENEDILEDIVLTLTLFEDREMIEERLKTYAHLFDDKVMKQLKRRRYTGWGRLSRKLINGIRDKQSGKTILDFLKSDGFANRNFMQLIHDDSLTFKEDIQKAQVSGQGDSLHEHIANLAGSPAIKKGILQTVKVVDELVKVMGRHKPENIVIEMARENQTTQKGQKNSRERMKRIEEGIKELGSQILKEHPVENTQLQNEKLYLYYLQNGRDMYVDQELDINRLSDYDVDHIVPQSFLKDDSIDNKVLTRSDKARGKSDNVPSEEVVKKMKNYWRQLLNAKLITQRKFDNLTKAERGGLSELDKAGFIKRQLVETRQITKHVAQILDSRMNTKYDENDKLIREVKVITLKSKLVSDFRKDFQFYKVREINNYHHAHDAYLNAVVGTALIKKYPKLESEFVYGDYKVYDVRKMIAKSEQEIGKATAKYFFYSNIMNFFKTEITLANGEIRKRPLIETNGETGEIVWDKGRDFATVRKVLSMPQVNIVKKTEVQTGGFSKESILPKRNSDKLIARKKDWDPKKYGGFDSPTVAYSVLVVAKVEKGKSKKLKSVKELLGITIMERSSFEKNPIDFLEAKGYKEVKKDLIIKLPKYSLFELENGRKRMLASAGELQKGNELALPSKYVNFLYLASHYEKLKGSPEDNEQKQLFVEQHKHYLDEIIEQISEFSKRVILADANLDKVLSAYNKHRDKPIREQAENIIHLFTLTNLGAPAAFKYFDTTIDRKRYTSTKEVLDATLIHQSITGLYETRIDLSQLGGDGGPAPAPAPAPAPGGLLGRDLLTKLKAQIQFSTEGPQVTWEDRPAMCLVLNLEEEYRLHEKPVPPSIDPSWLQLFPMVWAEKAGMGLANQVPPVVVELKSDASPVAVRQYPMSKEAREGIRPHIQRFLDLGILVPCQSPWNTPLLPVKKPGTNDYRPVQDLREVNKRVQDIHPTVPNPYNLLSSLPPSHTWYSVLDLKDAFFCLKLHPNSQPLFAFEWRDPEKGNTGQLTWTRLPQGFKNSPTLFNEALHRDLASFRALNPQVVMLQYVDDLLVAAPTYRDCKEGTRRLLQELSKLGYRVSAKKAQLCREEVTYLGYLLKGGKRWLTPARKATVMKIPTPTTPRQVREFLGKAGFCRLFIPGFASLAAPLYPLTRPKVPFTWTEAHQEAFGRIKEALLSAPALALPDLTKPFALYVDEKEGVARGVLTQTLGPWRRPVAYLSKKLDPVASGWPTCLKAIAAVALLLKDADKLTLGQNVLVIAPHNLESIVRQPPDRWMTNARMTHYQSLLLNERVSFAPPAILNPATLLPVESDDTPIHICSEILAEETGTRPDLRDQPLPGVPAWYTDGSSFIMDGRRQAGAAIVDNKRTVWASNLPEGTSAQKAELIALTQALRLAEGKSINIYTDSRYAFATAHVHGAIYKQRGWLTSAGKDIKNKEEILALLEAIHLPKRVAIIHCPGHQRGTDPVATGNRKADEAAKQAAQSTRILTETTKNAGKRTADGSEFEKRTADGSEFESPKKKAKVE

SEQ ID NO: 1685 - protein, 2127 aa, synthetic construct
MPAAKRVKLDGGDKKYSIGLDIGTNSVGWAVITDEYKVPSKKFKVLGNTDRHSIKKNLIGALLFDSGETAEATRLKRTARRRYTRRKNRICYLQEIFSNEMAKVDDSFFHRLEESFLVEEDKKHERHPIFGNIVDEVAYHEKYPTIYHLRKKLVDSTDKADLRLIYLALAHMIKFRGHFLIEGDLNPDNSDVDKLFIQLVQTYNQLFEENPINASGVDAKAILSARLSKSRRLENLIAQLPGEKKNGLFGNLIALSLGLTPNFKSNFDLAEDAKLQLSKDTYDDDLDNLLAQIGDQYADLFLAAKNLSDAILLSDILRVNTEITKAPLSASMIKRYDEHHQDLTLLKALVRQQLPEKYKEIFFDQSKNGYAGYIDGGASQEEFYKFIKPILEKMDGTEELLVKLNREDLLRKQRTFDNGSIPHQIHLGELHAILRRQEDFYPFLKDNREKIEKILTFRIPYYVGPLARGNSRFAWMTRKSEETITPWNFEEVVDKGASAQSFIERMTNFDKNLPNEKVLPKHSLLYEYFTVYNELTKVKYVTEGMRKPAFLSGEQKKAIVDLLFKTNRKVTVKQLKEDYFKKIECFDSVEISGVEDRFNASLGTYHDLLKIIKDKDFLDNEENEDILEDIVLTLTLFEDREMIEERLKTYAHLFDDKVMKQLKRRRYTGWGRLSRKLINGIRDKQSGKTILDFLKSDGFANRNFMQLIHDDSLTFKEDIQKAQVSGQGDSLHEHIANLAGSPAIKKGILQTVKVVDELVKVMGRHKPENIVIEMARENQTTQKGQKNSRERMKRIEEGIKELGSQILKEHPVENTQLQNEKLYLYYLQNGRDMYVDQELDINRLSDYDVDHIVPQSFLKDDSIDNKVLTRSDKARGKSDNVPSEEVVKKMKNYWRQLLNAKLITQRKFDNLTKAERGGLSELDKAGFIKRQLVETRQITKHVAQILDSRMNTKYDENDKLIREVKVITLKSKLVSDFRKDFQFYKVREINNYHHAHDAYLNAVVGTALIKKYPKLESEFVYGDYKVYDVRKMIAKSEQEIGKATAKYFFYSNIMNFFKTEITLANGEIRKRPLIETNGETGEIVWDKGRDFATVRKVLSMPQVNIVKKTEVQTGGFSKESILPKRNSDKLIARKKDWDPKKYGGFDSPTVAYSVLVVAKVEKGKSKKLKSVKELLGITIMERSSFEKNPIDFLEAKGYKEVKKDLIIKLPKYSLFELENGRKRMLASAGELQKGNELALPSKYVNFLYLASHYEKLKGSPEDNEQKQLFVEQHKHYLDEIIEQISEFSKRVILADANLDKVLSAYNKHRDKPIREQAENIIHLFTLTNLGAPAAFKYFDTTIDRKRYTSTKEVLDATLIHQSITGLYETRIDLSQLGGDGGEAAAKPAPGGGGGLLGRDLLTKLKAQIQFSTEGPQVTWEDRPAMCLVLNLEEEYRLHEKPVPPSIDPSWLQLFPMVWAEKAGMGLANQVPPVVVELKSDASPVAVRQYPMSKEAREGIRPHIQRFLDLGILVPCQSPWNTPLLPVKKPGTNDYRPVQDLREVNKRVQDIHPTVPNPYNLLSSLPPSHTWYSVLDLKDAFFCLKLHPNSQPLFAFEWRDPEKGNTGQLTWTRLPQGFKNSPTLFNEALHRDLASFRALNPQVVMLQYVDDLLVAAPTYRDCKEGTRRLLQELSKLGYRVSAKKAQLCREEVTYLGYLLKGGKRWLTPARKATVMKIPTPTTPRQVREFLGKAGFCRLFIPGFASLAAPLYPLTRPKVPFTWTEAHQEAFGRIKEALLSAPALALPDLTKPFALYVDEKEGVARGVLTQTLGPWRRPVAYLSKKLDPVASGWPTCLKAIAAVALLLKDADKLTLGQNVLVIAPHNLESIVRQPPDRWMTNARMTHYQSLLLNERVSFAPPAILNPATLLPVESDDTPIHICSEILAEETGTRPDLRDQPLPGVPAWYTDGSSFIMDGRRQAGAAIVDNKRTVWASNLPEGTSAQKAELIALTQALRLAEGKSINIYTDSRYAFATAHVHGAIYKQRGWLTSAGKDIKNKEEILALLEAIHLPKRVAIIHCPGHQRGTDPVATGNRKADEAAKQAAQSTRILTETTKNAGKRTADGSEFEKRTADGSEFESPKKKAKVE

SEQ ID NO: 1686 - protein, 2125 aa, synthetic construct
MPAAKRVKLDGGDKKYSIGLDIGTNSVGWAVITDEYKVPSKKFKVLGNTDRHSIKKNLIGALLFDSGETAEATRLKRTARRRYTRRKNRICYLQEIFSNEMAKVDDSFFHRLEESFLVEEDKKHERHPIFGNIVDEVAYHEKYPTIYHLRKKLVDSTDKADLRLIYLALAHMIKFRGHFLIEGDLNPDNSDVDKLFIQLVQTYNQLFEENPINASGVDAKAILSARLSKSRRLENLIAQLPGEKKNGLFGNLIALSLGLTPNFKSNFDLAEDAKLQLSKDTYDDDLDNLLAQIGDQYADLFLAAKNLSDAILLSDILRVNTEITKAPLSASMIKRYDEHHQDLTLLKALVRQQLPEKYKEIFFDQSKNGYAGYIDGGASQEEFYKFIKPILEKMDGTEELLVKLNREDLLRKQRTFDNGSIPHQIHLGELHAILRRQEDFYPFLKDNREKIEKILTFRIPYYVGPLARGNSRFAWMTRKSEETITPWNFEEVVDKGASAQSFIERMTNFDKNLPNEKVLPKHSLLYEYFTVYNELTKVKYVTEGMRKPAFLSGEQKKAIVDLLFKTNRKVTVKQLKEDYFKKIECFDSVEISGVEDRFNASLGTYHDLLKIIKDKDFLDNEENEDILEDIVLTLTLFEDREMIEERLKTYAHLFDDKVMKQLKRRRYTGWGRLSRKLINGIRDKQSGKTILDFLKSDGFANRNFMQLIHDDSLTFKEDIQKAQVSGQGDSLHEHIANLAGSPAIKKGILQTVKVVDELVKVMGRHKPENIVIEMARENQTTQKGQKNSRERMKRIEEGIKELGSQILKEHPVENTQLQNEKLYLYYLQNGRDMYVDQELDINRLSDYDVDHIVPQSFLKDDSIDNKVLTRSDKARGKSDNVPSEEVVKKMKNYWRQLLNAKLITQRKFDNLTKAERGGLSELDKAGFIKRQLVETRQITKHVAQILDSRMNTKYDENDKLIREVKVITLKSKLVSDFRKDFQFYKVREINNYHHAHDAYLNAVVGTALIKKYPKLESEFVYGDYKVYDVRKMIAKSEQEIGKATAKYFFYSNIMNFFKTEITLANGEIRKRPLIETNGETGEIVWDKGRDFATVRKVLSMPQVNIVKKTEVQTGGFSKESILPKRNSDKLIARKKDWDPKKYGGFDSPTVAYSVLVVAKVEKGKSKKLKSVKELLGITIMERSSFEKNPIDFLEAKGYKEVKKDLIIKLPKYSLFELENGRKRMLASAGELQKGNELALPSKYVNFLYLASHYEKLKGSPEDNEQKQLFVEQHKHYLDEIIEQISEFSKRVILADANLDKVLSAYNKHRDKPIREQAENIIHLFTLTNLGAPAAFKYFDTTIDRKRYTSTKEVLDATLIHQSITGLYETRIDLSQLGGDGGGGSGGSGGSGGLLGRDLLTKLKAQIQFSTEGPQVTWEDRPAMCLVLNLEEEYRLHEKPVPPSIDPSWLQLFPMVWAEKAGMGLANQVPPVVVELKSDASPVAVRQYPMSKEAREGIRPHIQRFLDLGILVPCQSPWNTPLLPVKKPGTNDYRPVQDLREVNKRVQDIHPTVPNPYNLLSSLPPSHTWYSVLDLKDAFFCLKLHPNSQPLFAFEWRDPEKGNTGQLTWTRLPQGFKNSPTLFNEALHRDLASFRALNPQVVMLQYVDDLLVAAPTYRDCKEGTRRLLQELSKLGYRVSAKKAQLCREEVTYLGYLLKGGKRWLTPARKATVMKIPTPTTPRQVREFLGKAGFCRLFIPGFASLAAPLYPLTRPKVPFTWTEAHQEAFGRIKEALLSAPALALPDLTKPFALYVDEKEGVARGVLTQTLGPWRRPVAYLSKKLDPVASGWPTCLKAIAAVALLLKDADKLTLGQNVLVIAPHNLESIVRQPPDRWMTNARMTHYQSLLLNERVSFAPPAILNPATLLPVESDDTPIHICSEILAEETGTRPDLRDQPLPGVPAWYTDGSSFIMDGRRQAGAAIVDNKRTVWASNLPEGTSAQKAELIALTQALRLAEGKSINIYTDSRYAFATAHVHGAIYKQRGWLTSAGKDIKNKEEILALLEAIHLPKRVAIIHCPGHQRGTDPVATGNRKADEAAKQAAQSTRILTETTKNAGKRTADGSEFEKRTADGSEFESPKKKAKVE

SEQ ID NO: 1687 - protein, 2127 aa, synthetic construct
MPAAKRVKLDGGDKKYSIGLDIGTNSVGWAVITDEYKVPSKKFKVLGNTDRHSIKKNLIGALLFDSGETAEATRLKRTARRRYTRRKNRICYLQEIFSNEMAKVDDSFFHRLEESFLVEEDKKHERHPIFGNIVDEVAYHEKYPTIYHLRKKLVDSTDKADLRLIYLALAHMIKFRGHFLIEGDLNPDNSDVDKLFIQLVQTYNQLFEENPINASGVDAKAILSARLSKSRRLENLIAQLPGEKKNGLFGNLIALSLGLTPNFKSNFDLAEDAKLQLSKDTYDDDLDNLLAQIGDQYADLFLAAKNLSDAILLSDILRVNTEITKAPLSASMIKRYDEHHQDLTLLKALVRQQLPEKYKEIFFDQSKNGYAGYIDGGASQEEFYKFIKPILEKMDGTEELLVKLNREDLLRKQRTFDNGSIPHQIHLGELHAILRRQEDFYPFLKDNREKIEKILTFRIPYYVGPLARGNSRFAWMTRKSEETITPWNFEEVVDKGASAQSFIERMTNFDKNLPNEKVLPKHSLLYEYFTVYNELTKVKYVTEGMRKPAFLSGEQKKAIVDLLFKTNRKVTVKQLKEDYFKKIECFDSVEISGVEDRFNASLGTYHDLLKIIKDKDFLDNEENEDILEDIVLTLTLFEDREMIEERLKTYAHLFDDKVMKQLKRRRYTGWGRLSRKLINGIRDKQSGKTILDFLKSDGFANRNFMQLIHDDSLTFKEDIQKAQVSGQGDSLHEHIANLAGSPAIKKGILQTVKVVDELVKVMGRHKPENIVIEMARENQTTQKGQKNSRERMKRIEEGIKELGSQILKEHPVENTQLQNEKLYLYYLQNGRDMYVDQELDINRLSDYDVDHIVPQSFLKDDSIDNKVLTRSDKARGKSDNVPSEEVVKKMKNYWRQLLNAKLITQRKFDNLTKAERGGLSELDKAGFIKRQLVETRQITKHVAQILDSRMNTKYDENDKLIREVKVITLKSKLVSDFRKDFQFYKVREINNYHHAHDAYLNAVVGTALIKKYPKLESEFVYGDYKVYDVRKMIAKSEQEIGKATAKYFFYSNIMNFFKTEITLANGEIRKRPLIETNGETGEIVWDKGRDFATVRKVLSMPQVNIVKKTEVQTGGFSKESILPKRNSDKLIARKKDWDPKKYGGFDSPTVAYSVLVVAKVEKGKSKKLKSVKELLGITIMERSSFEKNPIDFLEAKGYKEVKKDLIIKLPKYSLFELENGRKRMLASAGELQKGNELALPSKYVNFLYLASHYEKLKGSPEDNEQKQLFVEQHKHYLDEIIEQISEFSKRVILADANLDKVLSAYNKHRDKPIREQAENIIHLFTLTNLGAPAAFKYFDTTIDRKRYTSTKEVLDATLIHQSITGLYETRIDLSQLGGDGGEAAAKPAPGSSGGLLGRDLLTKLKAQIQFSTEGPQVTWEDRPAMCLVLNLEEEYRLHEKPVPPSIDPSWLQLFPMVWAEKAGMGLANQVPPVVVELKSDASPVAVRQYPMSKEAREGIRPHIQRFLDLGILVPCQSPWNTPLLPVKKPGTNDYRPVQDLREVNKRVQDIHPTVPNPYNLLSSLPPSHTWYSVLDLKDAFFCLKLHPNSQPLFAFEWRDPEKGNTGQLTWTRLPQGFKNSPTLFNEALHRDLASFRALNPQVVMLQYVDDLLVAAPTYRDCKEGTRRLLQELSKLGYRVSAKKAQLCREEVTYLGYLLKGGKRWLTPARKATVMKIPTPTTPRQVREFLGKAGFCRLFIPGFASLAAPLYPLTRPKVPFTWTEAHQEAFGRIKEALLSAPALALPDLTKPFALYVDEKEGVARGVLTQTLGPWRRPVAYLSKKLDPVASGWPTCLKAIAAVALLLKDADKLTLGQNVLVIAPHNLESIVRQPPDRWMTNARMTHYQSLLLNERVSFAPPAILNPATLLPVESDDTPIHICSEILAEETGTRPDLRDQPLPGVPAWYTDGSSFIMDGRRQAGAAIVDNKRTVWASNLPEGTSAQKAELIALTQALRLAEGKSINIYTDSRYAFATAHVHGAIYKQRGWLTSAGKDIKNKEEILALLEAIHLPKRVAIIHCPGHQRGTDPVATGNRKADEAAKQAAQSTRILTETTKNAGKRTADGSEFEKRTADGSEFESPKKKAKVE

SEQ ID NO: 1688 - protein, 2127 aa, synthetic construct
MPAAKRVKLDGGDKKYSIGLDIGTNSVGWAVITDEYKVPSKKFKVLGNTDRHSIKKNLIGALLFDSGETAEATRLKRTARRRYTRRKNRICYLQEIFSNEMAKVDDSFFHRLEESFLVEEDKKHERHPIFGNIVDEVAYHEKYPTIYHLRKKLVDSTDKADLRLIYLALAHMIKFRGHFLIEGDLNPDNSDVDKLFIQLVQTYNQLFEENPINASGVDAKAILSARLSKSRRLENLIAQLPGEKKNGLFGNLIALSLGLTPNFKSNFDLAEDAKLQLSKDTYDDDLDNLLAQIGDQYADLFLAAKNLSDAILLSDILRVNTEITKAPLSASMIKRYDEHHQDLTLLKALVRQQLPEKYKEIFFDQSKNGYAGYIDGGASQEEFYKFIKPILEKMDGTEELLVKLNREDLLRKQRTFDNGSIPHQIHLGELHAILRRQEDFYPFLKDNREKIEKILTFRIPYYVGPLARGNSRFAWMTRKSEETITPWNFEEVVDKGASAQSFIERMTNFDKNLPNEKVLPKHSLLYEYFTVYNELTKVKYVTEGMRKPAFLSGEQKKAIVDLLFKTNRKVTVKQLKEDYFKKIECFDSVEISGVEDRFNASLGTYHDLLKIIKDKDFLDNEENEDILEDIVLTLTLFEDREMIEERLKTYAHLFDDKVMKQLKRRRYTGWGRLSRKLINGIRDKQSGKTILDFLKSDGFANRNFMQLIHDDSLTFKEDIQKAQVSGQGDSLHEHIANLAGSPAIKKGILQTVKVVDELVKVMGRHKPENIVIEMARENQTTQKGQKNSRERMKRIEEGIKELGSQILKEHPVENTQLQNEKLYLYYLQNGRDMYVDQELDINRLSDYDVDHIVPQSFLKDDSIDNKVLTRSDKARGKSDNVPSEEVVKKMKNYWRQLLNAKLITQRKFDNLTKAERGGLSELDKAGFIKRQLVETRQITKHVAQILDSRMNTKYDENDKLIREVKVITLKSKLVSDFRKDFQFYKVREINNYHHAHDAYLNAVVGTALIKKYPKLESEFVYGDYKVYDVRKMIAKSEQEIGKATAKYFFYSNIMNFFKTEITLANGEIRKRPLIETNGETGEIVWDKGRDFATVRKVLSMPQVNIVKKTEVQTGGFSKESILPKRNSDKLIARKKDWDPKKYGGFDSPTVAYSVLVVAKVEKGKSKKLKSVKELLGITIMERSSFEKNPIDFLEAKGYKEVKKDLIIKLPKYSLFELENGRKRMLASAGELQKGNELALPSKYVNFLYLASHYEKLKGSPEDNEQKQLFVEQHKHYLDEIIEQISEFSKRVILADANLDKVLSAYNKHRDKPIREQAENIIHLFTLTNLGAPAAFKYFDTTIDRKRYTSTKEVLDATLIHQSITGLYETRIDLSQLGGDGGGGGEAAAKGSSGGLLGRDLLTKLKAQIQFSTEGPQVTWEDRPAMCLVLNLEEEYRLHEKPVPPSIDPSWLQLFPMVWAEKAGMGLANQVPPVVVELKSDASPVAVRQYPMSKEAREGIRPHIQRFLDLGILVPCQSPWNTPLLPVKKPGTNDYRPVQDLREVNKRVQDIHPTVPNPYNLLSSLPPSHTWYSVLDLKDAFFCLKLHPNSQPLFAFEWRDPEKGNTGQLTWTRLPQGFKNSPTLFNEALHRDLASFRALNPQVVMLQYVDDLLVAAPTYRDCKEGTRRLLQELSKLGYRVSAKKAQLCREEVTYLGYLLKGGKRWLTPARKATVMKIPTPTTPRQVREFLGKAGFCRLFIPGFASLAAPLYPLTRPKVPFTWTEAHQEAFGRIKEALLSAPALALPDLTKPFALYVDEKEGVARGVLTQTLGPWRRPVAYLSKKLDPVASGWPTCLKAIAAVALLLKDADKLTLGQNVLVIAPHNLESIVRQPPDRWMTNARMTHYQSLLLNERVSFAPPAILNPATLLPVESDDTPIHICSEILAEETGTRPDLRDQPLPGVPAWYTDGSSFIMDGRRQAGAAIVDNKRTVWASNLPEGTSAQKAELIALTQALRLAEGKSINIYTDSRYAFATAHVHGAIYKQRGWLTSAGKDIKNKEEILALLEAIHLPKRVAIIHCPGHQRGTDPVATGNRKADEAAKQAAQSTRILTETTKNAGKRTADGSEFEKRTADGSEFESPKKKAKVE

SEQ ID NO: 1689 - protein, 2121 aa, synthetic construct
MPAAKRVKLDGGDKKYSIGLDIGTNSVGWAVITDEYKVPSKKFKVLGNTDRHSIKKNLIGALLFDSGETAEATRLKRTARRRYTRRKNRICYLQEIFSNEMAKVDDSFFHRLEESFLVEEDKKHERHPIFGNIVDEVAYHEKYPTIYHLRKKLVDSTDKADLRLIYLALAHMIKFRGHFLIEGDLNPDNSDVDKLFIQLVQTYNQLFEENPINASGVDAKAILSARLSKSRRLENLIAQLPGEKKNGLFGNLIALSLGLTPNFKSNFDLAEDAKLQLSKDTYDDDLDNLLAQIGDQYADLFLAAKNLSDAILLSDILRVNTEITKAPLSASMIKRYDEHHQDLTLLKALVRQQLPEKYKEIFFDQSKNGYAGYIDGGASQEEFYKFIKPILEKMDGTEELLVKLNREDLLRKQRTFDNGSIPHQIHLGELHAILRRQEDFYPFLKDNREKIEKILTFRIPYYVGPLARGNSRFAWMTRKSEETITPWNFEEVVDKGASAQSFIERMTNFDKNLPNEKVLPKHSLLYEYFTVYNELTKVKYVTEGMRKPAFLSGEQKKAIVDLLFKTNRKVTVKQLKEDYFKKIECFDSVEISGVEDRFNASLGTYHDLLKIIKDKDFLDNEENEDILEDIVLTLTLFEDREMIEERLKTYAHLFDDKVMKQLKRRRYTGWGRLSRKLINGIRDKQSGKTILDFLKSDGFANRNFMQLIHDDSLTFKEDIQKAQVSGQGDSLHEHIANLAGSPAIKKGILQTVKVVDELVKVMGRHKPENIVIEMARENQTTQKGQKNSRERMKRIEEGIKELGSQILKEHPVENTQLQNEKLYLYYLQNGRDMYVDQELDINRLSDYDVDHIVPQSFLKDDSIDNKVLTRSDKARGKSDNVPSEEVVKKMKNYWRQLLNAKLITQRKFDNLTKAERGGLSELDKAGFIKRQLVETRQITKHVAQILDSRMNTKYDENDKLIREVKVITLKSKLVSDFRKDFQFYKVREINNYHHAHDAYLNAVVGTALIKKYPKLESEFVYGDYKVYDVRKMIAKSEQEIGKATAKYFFYSNIMNFFKTEITLANGEIRKRPLIETNGETGEIVWDKGRDFATVRKVLSMPQVNIVKKTEVQTGGFSKESILPKRNSDKLIARKKDWDPKKYGGFDSPTVAYSVLVVAKVEKGKSKKLKSVKELLGITIMERSSFEKNPIDFLEAKGYKEVKKDLIIKLPKYSLFELENGRKRMLASAGELQKGNELALPSKYVNFLYLASHYEKLKGSPEDNEQKQLFVEQHKHYLDEIIEQISEFSKRVILADANLDKVLSAYNKHRDKPIREQAENIIHLFTLTNLGAPAAFKYFDTTIDRKRYTSTKEVLDATLIHQSITGLYETRIDLSQLGGDGGEAAAKGGLLGRDLLTKLKAQIQFSTEGPQVTWEDRPAMCLVLNLEEEYRLHEKPVPPSIDPSWLQLFPMVWAEKAGMGLANQVPPVVVELKSDASPVAVRQYPMSKEAREGIRPHIQRFLDLGILVPCQSPWNTPLLPVKKPGTNDYRPVQDLREVNKRVQDIHPTVPNPYNLLSSLPPSHTWYSVLDLKDAFFCLKLHPNSQPLFAFEWRDPEKGNTGQLTWTRLPQGFKNSPTLFNEALHRDLASFRALNPQVVMLQYVDDLLVAAPTYRDCKEGTRRLLQELSKLGYRVSAKKAQLCREEVTYLGYLLKGGKRWLTPARKATVMKIPTPTTPRQVREFLGKAGFCRLFIPGFASLAAPLYPLTRPKVPFTWTEAHQEAFGRIKEALLSAPALALPDLTKPFALYVDEKEGVARGVLTQTLGPWRRPVAYLSKKLDPVASGWPTCLKAIAAVALLLKDADKLTLGQNVLVIAPHNLESIVRQPPDRWMTNARMTHYQSLLLNERVSFAPPAILNPATLLPVESDDTPIHICSEILAEETGTRPDLRDQPLPGVPAWYTDGSSFIMDGRRQAGAAIVDNKRTVWASNLPEGTSAQKAELIALTQALRLAEGKSINIYTDSRYAFATAHVHGAIYKQRGWLTSAGKDIKNKEEILALLEAIHLPKRVAIIHCPGHQRGTDPVATGNRKADEAAKQAAQSTRILTETTKNAGKRTADGSEFEKRTADGSEFESPKKKAKVE

SEQ ID NO: 1690 - protein, 2127 aa, synthetic construct
MPAAKRVKLDGGDKKYSIGLDIGTNSVGWAVITDEYKVPSKKFKVLGNTDRHSIKKNLIGALLFDSGETAEATRLKRTARRRYTRRKNRICYLQEIFSNEMAKVDDSFFHRLEESFLVEEDKKHERHPIFGNIVDEVAYHEKYPTIYHLRKKLVDSTDKADLRLIYLALAHMIKFRGHFLIEGDLNPDNSDVDKLFIQLVQTYNQLFEENPINASGVDAKAILSARLSKSRRLENLIAQLPGEKKNGLFGNLIALSLGLTPNFKSNFDLAEDAKLQLSKDTYDDDLDNLLAQIGDQYADLFLAAKNLSDAILLSDILRVNTEITKAPLSASMIKRYDEHHQDLTLLKALVRQQLPEKYKEIFFDQSKNGYAGYIDGGASQEEFYKFIKPILEKMDGTEELLVKLNREDLLRKQRTFDNGSIPHQIHLGELHAILRRQEDFYPFLKDNREKIEKILTFRIPYYVGPLARGNSRFAWMTRKSEETITPWNFEEVVDKGASAQSFIERMTNFDKNLPNEKVLPKHSLLYEYFTVYNELTKVKYVTEGMRKPAFLSGEQKKAIVDLLFKTNRKVTVKQLKEDYFKKIECFDSVEISGVEDRFNASLGTYHDLLKIIKDKDFLDNEENEDILEDIVLTLTLFEDREMIEERLKTYAHLFDDKVMKQLKRRRYTGWGRLSRKLINGIRDKQSGKTILDFLKSDGFANRNFMQLIHDDSLTFKEDIQKAQVSGQGDSLHEHIANLAGSPAIKKGILQTVKVVDELVKVMGRHKPENIVIEMARENQTTQKGQKNSRERMKRIEEGIKELGSQILKEHPVENTQLQNEKLYLYYLQNGRDMYVDQELDINRLSDYDVDHIVPQSFLKDDSIDNKVLTRSDKARGKSDNVPSEEVVKKMKNYWRQLLNAKLITQRKFDNLTKAERGGLSELDKAGFIKRQLVETRQITKHVAQILDSRMNTKYDENDKLIREVKVITLKSKLVSDFRKDFQFYKVREINNYHHAHDAYLNAVVGTALIKKYPKLESEFVYGDYKVYDVRKMIAKSEQEIGKATAKYFFYSNIMNFFKTEITLANGEIRKRPLIETNGETGEIVWDKGRDFATVRKVLSMPQVNIVKKTEVQTGGFSKESILPKRNSDKLIARKKDWDPKKYGGFDSPTVAYSVLVVAKVEKGKSKKLKSVKELLGITIMERSSFEKNPIDFLEAKGYKEVKKDLIIKLPKYSLFELENGRKRMLASAGELQKGNELALPSKYVNFLYLASHYEKLKGSPEDNEQKQLFVEQHKHYLDEIIEQISEFSKRVILADANLDKVLSAYNKHRDKPIREQAENIIHLFTLTNLGAPAAFKYFDTTIDRKRYTSTKEVLDATLIHQSITGLYETRIDLSQLGGDGGEAAAKGSSGGSGGLLGRDLLTKLKAQIQFSTEGPQVTWEDRPAMCLVLNLEEEYRLHEKPVPPSIDPSWLQLFPMVWAEKAGMGLANQVPPVVVELKSDASPVAVRQYPMSKEAREGIRPHIQRFLDLGILVPCQSPWNTPLLPVKKPGTNDYRPVQDLREVNKRVQDIHPTVPNPYNLLSSLPPSHTWYSVLDLKDAFFCLKLHPNSQPLFAFEWRDPEKGNTGQLTWTRLPQGFKNSPTLFNEALHRDLASFRALNPQVVMLQYVDDLLVAAPTYRDCKEGTRRLLQELSKLGYRVSAKKAQLCREEVTYLGYLLKGGKRWLTPARKATVMKIPTPTTPRQVREFLGKAGFCRLFIPGFASLAAPLYPLTRPKVPFTWTEAHQEAFGRIKEALLSAPALALPDLTKPFALYVDEKEGVARGVLTQTLGPWRRPVAYLSKKLDPVASGWPTCLKAIAAVALLLKDADKLTLGQNVLVIAPHNLESIVRQPPDRWMTNARMTHYQSLLLNERVSFAPPAILNPATLLPVESDDTPIHICSEILAEETGTRPDLRDQPLPGVPAWYTDGSSFIMDGRRQAGAAIVDNKRTVWASNLPEGTSAQKAELIALTQALRLAEGKSINIYTDSRYAFATAHVHGAIYKQRGWLTSAGKDIKNKEEILALLEAIHLPKRVAIIHCPGHQRGTDPVATGNRKADEAAKQAAQSTRILTETTKNAGKRTADGSEFEKRTADGSEFESPKKKAKVE

SEQ ID NO: 1691 - protein, 2125 aa, synthetic construct
MPAAKRVKLDGGDKKYSIGLDIGTNSVGWAVITDEYKVPSKKFKVLGNTDRHSIKKNLIGALLFDSGETAEATRLKRTARRRYTRRKNRICYLQEIFSNEMAKVDDSFFHRLEESFLVEEDKKHERHPIFGNIVDEVAYHEKYPTIYHLRKKLVDSTDKADLRLIYLALAHMIKFRGHFLIEGDLNPDNSDVDKLFIQLVQTYNQLFEENPINASGVDAKAILSARLSKSRRLENLIAQLPGEKKNGLFGNLIALSLGLTPNFKSNFDLAEDAKLQLSKDTYDDDLDNLLAQIGDQYADLFLAAKNLSDAILLSDILRVNTEITKAPLSASMIKRYDEHHQDLTLLKALVRQQLPEKYKEIFFDQSKNGYAGYIDGGASQEEFYKFIKPILEKMDGTEELLVKLNREDLLRKQRTFDNGSIPHQIHLGELHAILRRQEDFYPFLKDNREKIEKILTFRIPYYVGPLARGNSRFAWMTRKSEETITPWNFEEVVDKGASAQSFIERMTNFDKNLPNEKVLPKHSLLYEYFTVYNELTKVKYVTEGMRKPAFLSGEQKKAIVDLLFKTNRKVTVKQLKEDYFKKIECFDSVEISGVEDRFNASLGTYHDLLKIIKDKDFLDNEENEDILEDIVLTLTLFEDREMIEERLKTYAHLFDDKVMKQLKRRRYTGWGRLSRKLINGIRDKQSGKTILDFLKSDGFANRNFMQLIHDDSLTFKEDIQKAQVSGQGDSLHEHIANLAGSPAIKKGILQTVKVVDELVKVMGRHKPENIVIEMARENQTTQKGQKNSRERMKRIEEGIKELGSQILKEHPVENTQLQNEKLYLYYLQNGRDMYVDQELDINRLSDYDVDHIVPQSFLKDDSIDNKVLTRSDKARGKSDNVPSEEVVKKMKNYWRQLLNAKLITQRKFDNLTKAERGGLSELDKAGFIKRQLVETRQITKHVAQILDSRMNTKYDENDKLIREVKVITLKSKLVSDFRKDFQFYKVREINNYHHAHDAYLNAVVGTALIKKYPKLESEFVYGDYKVYDVRKMIAKSEQEIGKATAKYFFYSNIMNFFKTEITLANGEIRKRPLIETNGETGEIVWDKGRDFATVRKVLSMPQVNIVKKTEVQTGGFSKESILPKRNSDKLIARKKDWDPKKYGGFDSPTVAYSVLVVAKVEKGKSKKLKSVKELLGITIMERSSFEKNPIDFLEAKGYKEVKKDLIIKLPKYSLFELENGRKRMLASAGELQKGNELALPSKYVNFLYLASHYEKLKGSPEDNEQKQLFVEQHKHYLDEIIEQISEFSKRVILADANLDKVLSAYNKHRDKPIREQAENIIHLFTLTNLGAPAAFKYFDTTIDRKRYTSTKEVLDATLIHQSITGLYETRIDLSQLGGDGGPAPGGGGSSGGLLGRDLLTKLKAQIQFSTEGPQVTWEDRPAMCLVLNLEEEYRLHEKPVPPSIDPSWLQLFPMVWAEKAGMGLANQVPPVVVELKSDASPVAVRQYPMSKEAREGIRPHIQRFLDLGILVPCQSPWNTPLLPVKKPGTNDYRPVQDLREVNKRVQDIHPTVPNPYNLLSSLPPSHTWYSVLDLKDAFFCLKLHPNSQPLFAFEWRDPEKGNTGQLTWTRLPQGFKNSPTLFNEALHRDLASFRALNPQVVMLQYVDDLLVAAPTYRDCKEGTRRLLQELSKLGYRVSAKKAQLCREEVTYLGYLLKGGKRWLTPARKATVMKIPTPTTPRQVREFLGKAGFCRLFIPGFASLAAPLYPLTRPKVPFTWTEAHQEAFGRIKEALLSAPALALPDLTKPFALYVDEKEGVARGVLTQTLGPWRRPVAYLSKKLDPVASGWPTCLKAIAAVALLLKDADKLTLGQNVLVIAPHNLESIVRQPPDRWMTNARMTHYQSLLLNERVSFAPPAILNPATLLPVESDDTPIHICSEILAEETGTRPDLRDQPLPGVPAWYTDGSSFIMDGRRQAGAAIVDNKRTVWASNLPEGTSAQKAELIALTQALRLAEGKSINIYTDSRYAFATAHVHGAIYKQRGWLTSAGKDIKNKEEILALLEAIHLPKRVAIIHCPGHQRGTDPVATGNRKADEAAKQAAQSTRILTETTKNAGKRTADGSEFEKRTADGSEFESPKKKAKVE

SEQ ID NO: 1692 - protein, 2119 aa, synthetic construct
MPAAKRVKLDGGDKKYSIGLDIGTNSVGWAVITDEYKVPSKKFKVLGNTDRHSIKKNLIGALLFDSGETAEATRLKRTARRRYTRRKNRICYLQEIFSNEMAKVDDSFFHRLEESFLVEEDKKHERHPIFGNIVDEVAYHEKYPTIYHLRKKLVDSTDKADLRLIYLALAHMIKFRGHFLIEGDLNPDNSDVDKLFIQLVQTYNQLFEENPINASGVDAKAILSARLSKSRRLENLIAQLPGEKKNGLFGNLIALSLGLTPNFKSNFDLAEDAKLQLSKDTYDDDLDNLLAQIGDQYADLFLAAKNLSDAILLSDILRVNTEITKAPLSASMIKRYDEHHQDLTLLKALVRQQLPEKYKEIFFDQSKNGYAGYIDGGASQEEFYKFIKPILEKMDGTEELLVKLNREDLLRKQRTFDNGSIPHQIHLGELHAILRRQEDFYPFLKDNREKIEKILTFRIPYYVGPLARGNSRFAWMTRKSEETITPWNFEEVVDKGASAQSFIERMTNFDKNLPNEKVLPKHSLLYEYFTVYNELTKVKYVTEGMRKPAFLSGEQKKAIVDLLFKTNRKVTVKQLKEDYFKKIECFDSVEISGVEDRFNASLGTYHDLLKIIKDKDFLDNEENEDILEDIVLTLTLFEDREMIEERLKTYAHLFDDKVMKQLKRRRYTGWGRLSRKLINGIRDKQSGKTILDFLKSDGFANRNFMQLIHDDSLTFKEDIQKAQVSGQGDSLHEHIANLAGSPAIKKGILQTVKVVDELVKVMGRHKPENIVIEMARENQTTQKGQKNSRERMKRIEEGIKELGSQILKEHPVENTQLQNEKLYLYYLQNGRDMYVDQELDINRLSDYDVDHIVPQSFLKDDSIDNKVLTRSDKARGKSDNVPSEEVVKKMKNYWRQLLNAKLITQRKFDNLTKAERGGLSELDKAGFIKRQLVETRQITKHVAQILDSRMNTKYDENDKLIREVKVITLKSKLVSDFRKDFQFYKVREINNYHHAHDAYLNAVVGTALIKKYPKLESEFVYGDYKVYDVRKMIAKSEQEIGKATAKYFFYSNIMNFFKTEITLANGEIRKRPLIETNGETGEIVWDKGRDFATVRKVLSMPQVNIVKKTEVQTGGFSKESILPKRNSDKLIARKKDWDPKKYGGFDSPTVAYSVLVVAKVEKGKSKKLKSVKELLGITIMERSSFEKNPIDFLEAKGYKEVKKDLIIKLPKYSLFELENGRKRMLASAGELQKGNELALPSKYVNFLYLASHYEKLKGSPEDNEQKQLFVEQHKHYLDEIIEQISEFSKRVILADANLDKVLSAYNKHRDKPIREQAENIIHLFTLTNLGAPAAFKYFDTTIDRKRYTSTKEVLDATLIHQSITGLYETRIDLSQLGGDGGPAPGGLLGRDLLTKLKAQIQFSTEGPQVTWEDRPAMCLVLNLEEEYRLHEKPVPPSIDPSWLQLFPMVWAEKAGMGLANQVPPVVVELKSDASPVAVRQYPMSKEAREGIRPHIQRFLDLGILVPCQSPWNTPLLPVKKPGTNDYRPVQDLREVNKRVQDIHPTVPNPYNLLSSLPPSHTWYSVLDLKDAFFCLKLHPNSQPLFAFEWRDPEKGNTGQLTWTRLPQGFKNSPTLFNEALHRDLASFRALNPQVVMLQYVDDLLVAAPTYRDCKEGTRRLLQELSKLGYRVSAKKAQLCREEVTYLGYLLKGGKRWLTPARKATVMKIPTPTTPRQVREFLGKAGFCRLFIPGFASLAAPLYPLTRPKVPFTWTEAHQEAFGRIKEALLSAPALALPDLTKPFALYVDEKEGVARGVLTQTLGPWRRPVAYLSKKLDPVASGWPTCLKAIAAVALLLKDADKLTLGQNVLVIAPHNLESIVRQPPDRWMTNARMTHYQSLLLNERVSFAPPAILNPATLLPVESDDTPIHICSEILAEETGTRPDLRDQPLPGVPAWYTDGSSFIMDGRRQAGAAIVDNKRTVWASNLPEGTSAQKAELIALTQALRLAEGKSINIYTDSRYAFATAHVHGAIYKQRGWLTSAGKDIKNKEEILALLEAIHLPKRVAIIHCPGHQRGTDPVATGNRKADEAAKQAAQSTRILTETTKNAGKRTADGSEFEKRTADGSEFESPKKKAKVE

SEQ ID NO: 1693 - protein, 2128 aa, synthetic construct
MPAAKRVKLDGGDKKYSIGLDIGTNSVGWAVITDEYKVPSKKFKVLGNTDRHSIKKNLIGALLFDSGETAEATRLKRTARRRYTRRKNRICYLQEIFSNEMAKVDDSFFHRLEESFLVEEDKKHERHPIFGNIVDEVAYHEKYPTIYHLRKKLVDSTDKADLRLIYLALAHMIKFRGHFLIEGDLNPDNSDVDKLFIQLVQTYNQLFEENPINASGVDAKAILSARLSKSRRLENLIAQLPGEKKNGLFGNLIALSLGLTPNFKSNFDLAEDAKLQLSKDTYDDDLDNLLAQIGDQYADLFLAAKNLSDAILLSDILRVNTEITKAPLSASMIKRYDEHHQDLTLLKALVRQQLPEKYKEIFFDQSKNGYAGYIDGGASQEEFYKFIKPILEKMDGTEELLVKLNREDLLRKQRTFDNGSIPHQIHLGELHAILRRQEDFYPFLKDNREKIEKILTFRIPYYVGPLARGNSRFAWMTRKSEETITPWNFEEVVDKGASAQSFIERMTNFDKNLPNEKVLPKHSLLYEYFTVYNELTKVKYVTEGMRKPAFLSGEQKKAIVDLLFKTNRKVTVKQLKEDYFKKIECFDSVEISGVEDRFNASLGTYHDLLKIIKDKDFLDNEENEDILEDIVLTLTLFEDREMIEERLKTYAHLFDDKVMKQLKRRRYTGWGRLSRKLINGIRDKQSGKTILDFLKSDGFANRNFMQLIHDDSLTFKEDIQKAQVSGQGDSLHEHIANLAGSPAIKKGILQTVKVVDELVKVMGRHKPENIVIEMARENQTTQKGQKNSRERMKRIEEGIKELGSQILKEHPVENTQLQNEKLYLYYLQNGRDMYVDQELDINRLSDYDVDHIVPQSFLKDDSIDNKVLTRSDKARGKSDNVPSEEVVKKMKNYWRQLLNAKLITQRKFDNLTKAERGGLSELDKAGFIKRQLVETRQITKHVAQILDSRMNTKYDENDKLIREVKVITLKSKLVSDFRKDFQFYKVREINNYHHAHDAYLNAVVGTALIKKYPKLESEFVYGDYKVYDVRKMIAKSEQEIGKATAKYFFYSNIMNFFKTEITLANGEIRKRPLIETNGETGEIVWDKGRDFATVRKVLSMPQVNIVKKTEVQTGGFSKESILPKRNSDKLIARKKDWDPKKYGGFDSPTVAYSVLVVAKVEKGKSKKLKSVKELLGITIMERSSFEKNPIDFLEAKGYKEVKKDLIIKLPKYSLFELENGRKRMLASAGELQKGNELALPSKYVNFLYLASHYEKLKGSPEDNEQKQLFVEQHKHYLDEIIEQISEFSKRVILADANLDKVLSAYNKHRDKPIREQAENIIHLFTLTNLGAPAAFKYFDTTIDRKRYTSTKEVLDATLIHQSITGLYETRIDLSQLGGDGGGSAGSAAGSGEFGGLLGRDLLTKLKAQIQFSTEGPQVTWEDRPAMCLVLNLEEEYRLHEKPVPPSIDPSWLQLFPMVWAEKAGMGLANQVPPVVVELKSDASPVAVRQYPMSKEAREGIRPHIQRFLDLGILVPCQSPWNTPLLPVKKPGTNDYRPVQDLREVNKRVQDIHPTVPNPYNLLSSLPPSHTWYSVLDLKDAFFCLKLHPNSQPLFAFEWRDPEKGNTGQLTWTRLPQGFKNSPTLFNEALHRDLASFRALNPQVVMLQYVDDLLVAAPTYRDCKEGTRRLLQELSKLGYRVSAKKAQLCREEVTYLGYLLKGGKRWLTPARKATVMKIPTPTTPRQVREFLGKAGFCRLFIPGFASLAAPLYPLTRPKVPFTWTEAHQEAFGRIKEALLSAPALALPDLTKPFALYVDEKEGVARGVLTQTLGPWRRPVAYLSKKLDPVASGWPTCLKAIAAVALLLKDADKLTLGQNVLVIAPHNLESIVRQPPDRWMTNARMTHYQSLLLNERVSFAPPAILNPATLLPVESDDTPIHICSEILAEETGTRPDLRDQPLPGVPAWYTDGSSFIMDGRRQAGAAIVDNKRTVWASNLPEGTSAQKAELIALTQALRLAEGKSINIYTDSRYAFATAHVHGAIYKQRGWLTSAGKDIKNKEEILALLEAIHLPKRVAIIHCPGHQRGTDPVATGNRKADEAAKQAAQSTRILTETTKNAGKRTADGSEFEKRTADGSEFESPKKKAKVE

SEQ ID NO: 1694 - protein, 2125 aa, synthetic construct
MPAAKRVKLDGGDKKYSIGLDIGTNSVGWAVITDEYKVPSKKFKVLGNTDRHSIKKNLIGALLFDSGETAEATRLKRTARRRYTRRKNRICYLQEIFSNEMAKVDDSFFHRLEESFLVEEDKKHERHPIFGNIVDEVAYHEKYPTIYHLRKKLVDSTDKADLRLIYLALAHMIKFRGHFLIEGDLNPDNSDVDKLFIQLVQTYNQLFEENPINASGVDAKAILSARLSKSRRLENLIAQLPGEKKNGLFGNLIALSLGLTPNFKSNFDLAEDAKLQLSKDTYDDDLDNLLAQIGDQYADLFLAAKNLSDAILLSDILRVNTEITKAPLSASMIKRYDEHHQDLTLLKALVRQQLPEKYKEIFFDQSKNGYAGYIDGGASQEEFYKFIKPILEKMDGTEELLVKLNREDLLRKQRTFDNGSIPHQIHLGELHAILRRQEDFYPFLKDNREKIEKILTFRIPYYVGPLARGNSRFAWMTRKSEETITPWNFEEVVDKGASAQSFIERMTNFDKNLPNEKVLPKHSLLYEYFTVYNELTKVKYVTEGMRKPAFLSGEQKKAIVDLLFKTNRKVTVKQLKEDYFKKIECFDSVEISGVEDRFNASLGTYHDLLKIIKDKDFLDNEENEDILEDIVLTLTLFEDREMIEERLKTYAHLFDDKVMKQLKRRRYTGWGRLSRKLINGIRDKQSGKTILDFLKSDGFANRNFMQLIHDDSLTFKEDIQKAQVSGQGDSLHEHIANLAGSPAIKKGILQTVKVVDELVKVMGRHKPENIVIEMARENQTTQKGQKNSRERMKRIEEGIKELGSQILKEHPVENTQLQNEKLYLYYLQNGRDMYVDQELDINRLSDYDVDHIVPQSFLKDDSIDNKVLTRSDKARGKSDNVPSEEVVKKMKNYWRQLLNAKLITQRKFDNLTKAERGGLSELDKAGFIKRQLVETRQITKHVAQILDSRMNTKYDENDKLIREVKVITLKSKLVSDFRKDFQFYKVREINNYHHAHDAYLNAVVGTALIKKYPKLESEFVYGDYKVYDVRKMIAKSEQEIGKATAKYFFYSNIMNFFKTEITLANGEIRKRPLIETNGETGEIVWDKGRDFATVRKVLSMPQVNIVKKTEVQTGGFSKESILPKRNSDKLIARKKDWDPKKYGGFDSPTVAYSVLVVAKVEKGKSKKLKSVKELLGITIMERSSFEKNPIDFLEAKGYKEVKKDLIIKLPKYSLFELENGRKRMLASAGELQKGNELALPSKYVNFLYLASHYEKLKGSPEDNEQKQLFVEQHKHYLDEIIEQISEFSKRVILADANLDKVLSAYNKHRDKPIREQAENIIHLFTLTNLGAPAAFKYFDTTIDRKRYTSTKEVLDATLIHQSITGLYETRIDLSQLGGDGGGSSPAPGGGGGLLGRDLLTKLKAQIQFSTEGPQVTWEDRPAMCLVLNLEEEYRLHEKPVPPSIDPSWLQLFPMVWAEKAGMGLANQVPPVVVELKSDASPVAVRQYPMSKEAREGIRPHIQRFLDLGILVPCQSPWNTPLLPVKKPGTNDYRPVQDLREVNKRVQDIHPTVPNPYNLLSSLPPSHTWYSVLDLKDAFFCLKLHPNSQPLFAFEWRDPEKGNTGQLTWTRLPQGFKNSPTLFNEALHRDLASFRALNPQVVMLQYVDDLLVAAPTYRDCKEGTRRLLQELSKLGYRVSAKKAQLCREEVTYLGYLLKGGKRWLTPARKATVMKIPTPTTPRQVREFLGKAGFCRLFIPGFASLAAPLYPLTRPKVPFTWTEAHQEAFGRIKEALLSAPALALPDLTKPFALYVDEKEGVARGVLTQTLGPWRRPVAYLSKKLDPVASGWPTCLKAIAAVALLLKDADKLTLGQNVLVIAPHNLESIVRQPPDRWMTNARMTHYQSLLLNERVSFAPPAILNPATLLPVESDDTPIHICSEILAEETGTRPDLRDQPLPGVPAWYTDGSSFIMDGRRQAGAAIVDNKRTVWASNLPEGTSAQKAELIALTQALRLAEGKSINIYTDSRYAFATAHVHGAIYKQRGWLTSAGKDIKNKEEILALLEAIHLPKRVAIIHCPGHQRGTDPVATGNRKADEAAKQAAQSTRILTETTKNAGKRTADGSEFEKRTADGSEFESPKKKAKVE

SEQ ID NO: 1695 - protein, 2122 aa, synthetic construct
MPAAKRVKLDGGDKKYSIGLDIGTNSVGWAVITDEYKVPSKKFKVLGNTDRHSIKKNLIGALLFDSGETAEATRLKRTARRRYTRRKNRICYLQEIFSNEMAKVDDSFFHRLEESFLVEEDKKHERHPIFGNIVDEVAYHEKYPTIYHLRKKLVDSTDKADLRLIYLALAHMIKFRGHFLIEGDLNPDNSDVDKLFIQLVQTYNQLFEENPINASGVDAKAILSARLSKSRRLENLIAQLPGEKKNGLFGNLIALSLGLTPNFKSNFDLAEDAKLQLSKDTYDDDLDNLLAQIGDQYADLFLAAKNLSDAILLSDILRVNTEITKAPLSASMIKRYDEHHQDLTLLKALVRQQLPEKYKEIFFDQSKNGYAGYIDGGASQEEFYKFIKPILEKMDGTEELLVKLNREDLLRKQRTFDNGSIPHQIHLGELHAILRRQEDFYPFLKDNREKIEKILTFRIPYYVGPLARGNSRFAWMTRKSEETITPWNFEEVVDKGASAQSFIERMTNFDKNLPNEKVLPKHSLLYEYFTVYNELTKVKYVTEGMRKPAFLSGEQKKAIVDLLFKTNRKVTVKQLKEDYFKKIECFDSVEISGVEDRFNASLGTYHDLLKIIKDKDFLDNEENEDILEDIVLTLTLFEDREMIEERLKTYAHLFDDKVMKQLKRRRYTGWGRLSRKLINGIRDKQSGKTILDFLKSDGFANRNFMQLIHDDSLTFKEDIQKAQVSGQGDSLHEHIANLAGSPAIKKGILQTVKVVDELVKVMGRHKPENIVIEMARENQTTQKGQKNSRERMKRIEEGIKELGSQILKEHPVENTQLQNEKLYLYYLQNGRDMYVDQELDINRLSDYDVDHIVPQSFLKDDSIDNKVLTRSDKARGKSDNVPSEEVVKKMKNYWRQLLNAKLITQRKFDNLTKAERGGLSELDKAGFIKRQLVETRQITKHVAQILDSRMNTKYDENDKLIREVKVITLKSKLVSDFRKDFQFYKVREINNYHHAHDAYLNAVVGTALIKKYPKLESEFVYGDYKVYDVRKMIAKSEQEIGKATAKYFFYSNIMNFFKTEITLANGEIRKRPLIETNGETGEIVWDKGRDFATVRKVLSMPQVNIVKKTEVQTGGFSKESILPKRNSDKLIARKKDWDPKKYGGFDSPTVAYSVLVVAKVEKGKSKKLKSVKELLGITIMERSSFEKNPIDFLEAKGYKEVKKDLIIKLPKYSLFELENGRKRMLASAGELQKGNELALPSKYVNFLYLASHYEKLKGSPEDNEQKQLFVEQHKHYLDEIIEQISEFSKRVILADANLDKVLSAYNKHRDKPIREQAENIIHLFTLTNLGAPAAFKYFDTTIDRKRYTSTKEVLDATLIHQSITGLYETRIDLSQLGGDGGPAPGSSGGLLGRDLLTKLKAQIQFSTEGPQVTWEDRPAMCLVLNLEEEYRLHEKPVPPSIDPSWLQLFPMVWAEKAGMGLANQVPPVVVELKSDASPVAVRQYPMSKEAREGIRPHIQRFLDLGILVPCQSPWNTPLLPVKKPGTNDYRPVQDLREVNKRVQDIHPTVPNPYNLLSSLPPSHTWYSVLDLKDAFFCLKLHPNSQPLFAFEWRDPEKGNTGQLTWTRLPQGFKNSPTLFNEALHRDLASFRALNPQVVMLQYVDDLLVAAPTYRDCKEGTRRLLQELSKLGYRVSAKKAQLCREEVTYLGYLLKGGKRWLTPARKATVMKIPTPTTPRQVREFLGKAGFCRLFIPGFASLAAPLYPLTRPKVPFTWTEAHQEAFGRIKEALLSAPALALPDLTKPFALYVDEKEGVARGVLTQTLGPWRRPVAYLSKKLDPVASGWPTCLKAIAAVALLLKDADKLTLGQNVLVIAPHNLESIVRQPPDRWMTNARMTHYQSLLLNERVSFAPPAILNPATLLPVESDDTPIHICSEILAEETGTRPDLRDQPLPGVPAWYTDGSSFIMDGRRQAGAAIVDNKRTVWASNLPEGTSAQKAELIALTQALRLAEGKSINIYTDSRYAFATAHVHGAIYKQRGWLTSAGKDIKNKEEILALLEAIHLPKRVAIIHCPGHQRGTDPVATGNRKADEAAKQAAQSTRILTETTKNAGKRTADGSEFEKRTADGSEFESPKKKAKVE

SEQ ID NO: 1696 - protein, 2125 aa, synthetic construct
MPAAKRVKLDGGDKKYSIGLDIGTNSVGWAVITDEYKVPSKKFKVLGNTDRHSIKKNLIGALLFDSGETAEATRLKRTARRRYTRRKNRICYLQEIFSNEMAKVDDSFFHRLEESFLVEEDKKHERHPIFGNIVDEVAYHEKYPTIYHLRKKLVDSTDKADLRLIYLALAHMIKFRGHFLIEGDLNPDNSDVDKLFIQLVQTYNQLFEENPINASGVDAKAILSARLSKSRRLENLIAQLPGEKKNGLFGNLIALSLGLTPNFKSNFDLAEDAKLQLSKDTYDDDLDNLLAQIGDQYADLFLAAKNLSDAILLSDILRVNTEITKAPLSASMIKRYDEHHQDLTLLKALVRQQLPEKYKEIFFDQSKNGYAGYIDGGASQEEFYKFIKPILEKMDGTEELLVKLNREDLLRKQRTFDNGSIPHQIHLGELHAILRRQEDFYPFLKDNREKIEKILTFRIPYYVGPLARGNSRFAWMTRKSEETITPWNFEEVVDKGASAQSFIERMTNFDKNLPNEKVLPKHSLLYEYFTVYNELTKVKYVTEGMRKPAFLSGEQKKAIVDLLFKTNRKVTVKQLKEDYFKKIECFDSVEISGVEDRFNASLGTYHDLLKIIKDKDFLDNEENEDILEDIVLTLTLFEDREMIEERLKTYAHLFDDKVMKQLKRRRYTGWGRLSRKLINGIRDKQSGKTILDFLKSDGFANRNFMQLIHDDSLTFKEDIQKAQVSGQGDSLHEHIANLAGSPAIKKGILQTVKVVDELVKVMGRHKPENIVIEMARENQTTQKGQKNSRERMKRIEEGIKELGSQILKEHPVENTQLQNEKLYLYYLQNGRDMYVDQELDINRLSDYDVDHIVPQSFLKDDSIDNKVLTRSDKARGKSDNVPSEEVVKKMKNYWRQLLNAKLITQRKFDNLTKAERGGLSELDKAGFIKRQLVETRQITKHVAQILDSRMNTKYDENDKLIREVKVITLKSKLVSDFRKDFQFYKVREINNYHHAHDAYLNAVVGTALIKKYPKLESEFVYGDYKVYDVRKMIAKSEQEIGKATAKYFFYSNIMNFFKTEITLANGEIRKRPLIETNGETGEIVWDKGRDFATVRKVLSMPQVNIVKKTEVQTGGFSKESILPKRNSDKLIARKKDWDPKKYGGFDSPTVAYSVLVVAKVEKGKSKKLKSVKELLGITIMERSSFEKNPIDFLEAKGYKEVKKDLIIKLPKYSLFELENGRKRMLASAGELQKGNELALPSKYVNFLYLASHYEKLKGSPEDNEQKQLFVEQHKHYLDEIIEQISEFSKRVILADANLDKVLSAYNKHRDKPIREQAENIIHLFTLTNLGAPAAFKYFDTTIDRKRYTSTKEVLDATLIHQSITGLYETRIDLSQLGGDGGPAPAPAPAPGGLLGRDLLTKLKAQIQFSTEGPQVTWEDRPAMCLVLNLEEEYRLHEKPVPPSIDPSWLQLFPMVWAEKAGMGLANQVPPVVVELKSDASPVAVRQYPMSKEAREGIRPHIQRFLDLGILVPCQSPWNTPLLPVKKPGTNDYRPVQDLREVNKRVQDIHPTVPNPYNLLSSLPPSHTWYSVLDLKDAFFCLKLHPNSQPLFAFEWRDPEKGNTGQLTWTRLPQGFKNSPTLFNEALHRDLASFRALNPQVVMLQYVDDLLVAAPTYRDCKEGTRRLLQELSKLGYRVSAKKAQLCREEVTYLGYLLKGGKRWLTPARKATVMKIPTPTTPRQVREFLGKAGFCRLFIPGFASLAAPLYPLTRPKVPFTWTEAHQEAFGRIKEALLSAPALALPDLTKPFALYVDEKEGVARGVLTQTLGPWRRPVAYLSKKLDPVASGWPTCLKAIAAVALLLKDADKLTLGQNVLVIAPHNLESIVRQPPDRWMTNARMTHYQSLLLNERVSFAPPAILNPATLLPVESDDTPIHICSEILAEETGTRPDLRDQPLPGVPAWYTDGSSFIMDGRRQAGAAIVDNKRTVWASNLPEGTSAQKAELIALTQALRLAEGKSINIYTDSRYAFATAHVHGAIYKQRGWLTSAGKDIKNKEEILALLEAIHLPKRVAIIHCPGHQRGTDPVATGNRKADEAAKQAAQSTRILTETTKNAGKRTADGSEFEKRTADGSEFESPKKKAKVE

SEQ ID NO: 1697 - protein, 2119 aa, synthetic construct
MPAAKRVKLDGGDKKYSIGLDIGTNSVGWAVITDEYKVPSKKFKVLGNTDRHSIKKNLIGALLFDSGETAEATRLKRTARRRYTRRKNRICYLQEIFSNEMAKVDDSFFHRLEESFLVEEDKKHERHPIFGNIVDEVAYHEKYPTIYHLRKKLVDSTDKADLRLIYLALAHMIKFRGHFLIEGDLNPDNSDVDKLFIQLVQTYNQLFEENPINASGVDAKAILSARLSKSRRLENLIAQLPGEKKNGLFGNLIALSLGLTPNFKSNFDLAEDAKLQLSKDTYDDDLDNLLAQIGDQYADLFLAAKNLSDAILLSDILRVNTEITKAPLSASMIKRYDEHHQDLTLLKALVRQQLPEKYKEIFFDQSKNGYAGYIDGGASQEEFYKFIKPILEKMDGTEELLVKLNREDLLRKQRTFDNGSIPHQIHLGELHAILRRQEDFYPFLKDNREKIEKILTFRIPYYVGPLARGNSRFAWMTRKSEETITPWNFEEVVDKGASAQSFIERMTNFDKNLPNEKVLPKHSLLYEYFTVYNELTKVKYVTEGMRKPAFLSGEQKKAIVDLLFKTNRKVTVKQLKEDYFKKIECFDSVEISGVEDRFNASLGTYHDLLKIIKDKDFLDNEENEDILEDIVLTLTLFEDREMIEERLKTYAHLFDDKVMKQLKRRRYTGWGRLSRKLINGIRDKQSGKTILDFLKSDGFANRNFMQLIHDDSLTFKEDIQKAQVSGQGDSLHEHIANLAGSPAIKKGILQTVKVVDELVKVMGRHKPENIVIEMARENQTTQKGQKNSRERMKRIEEGIKELGSQILKEHPVENTQLQNEKLYLYYLQNGRDMYVDQELDINRLSDYDVDHIVPQSFLKDDSIDNKVLTRSDKARGKSDNVPSEEVVKKMKNYWRQLLNAKLITQRKFDNLTKAERGGLSELDKAGFIKRQLVETRQITKHVAQILDSRMNTKYDENDKLIREVKVITLKSKLVSDFRKDFQFYKVREINNYHHAHDAYLNAVVGTALIKKYPKLESEFVYGDYKVYDVRKMIAKSEQEIGKATAKYFFYSNIMNFFKTEITLANGEIRKRPLIETNGETGEIVWDKGRDFATVRKVLSMPQVNIVKKTEVQTGGFSKESILPKRNSDKLIARKKDWDPKKYGGFDSPTVAYSVLVVAKVEKGKSKKLKSVKELLGITIMERSSFEKNPIDFLEAKGYKEVKKDLIIKLPKYSLFELENGRKRMLASAGELQKGNELALPSKYVNFLYLASHYEKLKGSPEDNEQKQLFVEQHKHYLDEIIEQISEFSKRVILADANLDKVLSAYNKHRDKPIREQAENIIHLFTLTNLGAPAAFKYFDTTIDRKRYTSTKEVLDATLIHQSITGLYETRIDLSQLGGDGGGSSGGLLGRDLLTKLKAQIQFSTEGPQVTWEDRPAMCLVLNLEEEYRLHEKPVPPSIDPSWLQLFPMVWAEKAGMGLANQVPPVVVELKSDASPVAVRQYPMSKEAREGIRPHIQRFLDLGILVPCQSPWNTPLLPVKKPGTNDYRPVQDLREVNKRVQDIHPTVPNPYNLLSSLPPSHTWYSVLDLKDAFFCLKLHPNSQPLFAFEWRDPEKGNTGQLTWTRLPQGFKNSPTLFNEALHRDLASFRALNPQVVMLQYVDDLLVAAPTYRDCKEGTRRLLQELSKLGYRVSAKKAQLCREEVTYLGYLLKGGKRWLTPARKATVMKIPTPTTPRQVREFLGKAGFCRLFIPGFASLAAPLYPLTRPKVPFTWTEAHQEAFGRIKEALLSAPALALPDLTKPFALYVDEKEGVARGVLTQTLGPWRRPVAYLSKKLDPVASGWPTCLKAIAAVALLLKDADKLTLGQNVLVIAPHNLESIVRQPPDRWMTNARMTHYQSLLLNERVSFAPPAILNPATLLPVESDDTPIHICSEILAEETGTRPDLRDQPLPGVPAWYTDGSSFIMDGRRQAGAAIVDNKRTVWASNLPEGTSAQKAELIALTQALRLAEGKSINIYTDSRYAFATAHVHGAIYKQRGWLTSAGKDIKNKEEILALLEAIHLPKRVAIIHCPGHQRGTDPVATGNRKADEAAKQAAQSTRILTETTKNAGKRTADGSEFEKRTADGSEFESPKKKAKVE

SEQ ID NO: 1698 - protein, 2122 aa, synthetic construct
MPAAKRVKLDGGDKKYSIGLDIGTNSVGWAVITDEYKVPSKKFKVLGNTDRHSIKKNLIGALLFDSGETAEATRLKRTARRRYTRRKNRICYLQEIFSNEMAKVDDSFFHRLEESFLVEEDKKHERHPIFGNIVDEVAYHEKYPTIYHLRKKLVDSTDKADLRLIYLALAHMIKFRGHFLIEGDLNPDNSDVDKLFIQLVQTYNQLFEENPINASGVDAKAILSARLSKSRRLENLIAQLPGEKKNGLFGNLIALSLGLTPNFKSNFDLAEDAKLQLSKDTYDDDLDNLLAQIGDQYADLFLAAKNLSDAILLSDILRVNTEITKAPLSASMIKRYDEHHQDLTLLKALVRQQLPEKYKEIFFDQSKNGYAGYIDGGASQEEFYKFIKPILEKMDGTEELLVKLNREDLLRKQRTFDNGSIPHQIHLGELHAILRRQEDFYPFLKDNREKIEKILTFRIPYYVGPLARGNSRFAWMTRKSEETITPWNFEEVVDKGASAQSFIERMTNFDKNLPNEKVLPKHSLLYEYFTVYNELTKVKYVTEGMRKPAFLSGEQKKAIVDLLFKTNRKVTVKQLKEDYFKKIECFDSVEISGVEDRFNASLGTYHDLLKIIKDKDFLDNEENEDILEDIVLTLTLFEDREMIEERLKTYAHLFDDKVMKQLKRRRYTGWGRLSRKLINGIRDKQSGKTILDFLKSDGFANRNFMQLIHDDSLTFKEDIQKAQVSGQGDSLHEHIANLAGSPAIKKGILQTVKVVDELVKVMGRHKPENIVIEMARENQTTQKGQKNSRERMKRIEEGIKELGSQILKEHPVENTQLQNEKLYLYYLQNGRDMYVDQELDINRLSDYDVDHIVPQSFLKDDSIDNKVLTRSDKARGKSDNVPSEEVVKKMKNYWRQLLNAKLITQRKFDNLTKAERGGLSELDKAGFIKRQLVETRQITKHVAQILDSRMNTKYDENDKLIREVKVITLKSKLVSDFRKDFQFYKVREINNYHHAHDAYLNAVVGTALIKKYPKLESEFVYGDYKVYDVRKMIAKSEQEIGKATAKYFFYSNIMNFFKTEITLANGEIRKRPLIETNGETGEIVWDKGRDFATVRKVLSMPQVNIVKKTEVQTGGFSKESILPKRNSDKLIARKKDWDPKKYGGFDSPTVAYSVLVVAKVEKGKSKKLKSVKELLGITIMERSSFEKNPIDFLEAKGYKEVKKDLIIKLPKYSLFELENGRKRMLASAGELQKGNELALPSKYVNFLYLASHYEKLKGSPEDNEQKQLFVEQHKHYLDEIIEQISEFSKRVILADANLDKVLSAYNKHRDKPIREQAENIIHLFTLTNLGAPAAFKYFDTTIDRKRYTSTKEVLDATLIHQSITGLYETRIDLSQLGGDGGGSSGGGGGLLGRDLLTKLKAQIQFSTEGPQVTWEDRPAMCLVLNLEEEYRLHEKPVPPSIDPSWLQLFPMVWAEKAGMGLANQVPPVVVELKSDASPVAVRQYPMSKEAREGIRPHIQRFLDLGILVPCQSPWNTPLLPVKKPGTNDYRPVQDLREVNKRVQDIHPTVPNPYNLLSSLPPSHTWYSVLDLKDAFFCLKLHPNSQPLFAFEWRDPEKGNTGQLTWTRLPQGFKNSPTLFNEALHRDLASFRALNPQVVMLQYVDDLLVAAPTYRDCKEGTRRLLQELSKLGYRVSAKKAQLCREEVTYLGYLLKGGKRWLTPARKATVMKIPTPTTPRQVREFLGKAGFCRLFIPGFASLAAPLYPLTRPKVPFTWTEAHQEAFGRIKEALLSAPALALPDLTKPFALYVDEKEGVARGVLTQTLGPWRRPVAYLSKKLDPVASGWPTCLKAIAAVALLLKDADKLTLGQNVLVIAPHNLESIVRQPPDRWMTNARMTHYQSLLLNERVSFAPPAILNPATLLPVESDDTPIHICSEILAEETGTRPDLRDQPLPGVPAWYTDGSSFIMDGRRQAGAAIVDNKRTVWASNLPEGTSAQKAELIALTQALRLAEGKSINIYTDSRYAFATAHVHGAIYKQRGWLTSAGKDIKNKEEILALLEAIHLPKRVAIIHCPGHQRGTDPVATGNRKADEAAKQAAQSTRILTETTKNAGKRTADGSEFEKRTADGSEFESPKKKAKVE

SEQ ID NO: 1699 - protein, 2127 aa, synthetic construct
MPAAKRVKLDGGDKKYSIGLDIGTNSVGWAVITDEYKVPSKKFKVLGNTDRHSIKKNLIGALLFDSGETAEATRLKRTARRRYTRRKNRICYLQEIFSNEMAKVDDSFFHRLEESFLVEEDKKHERHPIFGNIVDEVAYHEKYPTIYHLRKKLVDSTDKADLRLIYLALAHMIKFRGHFLIEGDLNPDNSDVDKLFIQLVQTYNQLFEENPINASGVDAKAILSARLSKSRRLENLIAQLPGEKKNGLFGNLIALSLGLTPNFKSNFDLAEDAKLQLSKDTYDDDLDNLLAQIGDQYADLFLAAKNLSDAILLSDILRVNTEITKAPLSASMIKRYDEHHQDLTLLKALVRQQLPEKYKEIFFDQSKNGYAGYIDGGASQEEFYKFIKPILEKMDGTEELLVKLNREDLLRKQRTFDNGSIPHQIHLGELHAILRRQEDFYPFLKDNREKIEKILTFRIPYYVGPLARGNSRFAWMTRKSEETITPWNFEEVVDKGASAQSFIERMTNFDKNLPNEKVLPKHSLLYEYFTVYNELTKVKYVTEGMRKPAFLSGEQKKAIVDLLFKTNRKVTVKQLKEDYFKKIECFDSVEISGVEDRFNASLGTYHDLLKIIKDKDFLDNEENEDILEDIVLTLTLFEDREMIEERLKTYAHLFDDKVMKQLKRRRYTGWGRLSRKLINGIRDKQSGKTILDFLKSDGFANRNFMQLIHDDSLTFKEDIQKAQVSGQGDSLHEHIANLAGSPAIKKGILQTVKVVDELVKVMGRHKPENIVIEMARENQTTQKGQKNSRERMKRIEEGIKELGSQILKEHPVENTQLQNEKLYLYYLQNGRDMYVDQELDINRLSDYDVDHIVPQSFLKDDSIDNKVLTRSDKARGKSDNVPSEEVVKKMKNYWRQLLNAKLITQRKFDNLTKAERGGLSELDKAGFIKRQLVETRQITKHVAQILDSRMNTKYDENDKLIREVKVITLKSKLVSDFRKDFQFYKVREINNYHHAHDAYLNAVVGTALIKKYPKLESEFVYGDYKVYDVRKMIAKSEQEIGKATAKYFFYSNIMNFFKTEITLANGEIRKRPLIETNGETGEIVWDKGRDFATVRKVLSMPQVNIVKKTEVQTGGFSKESILPKRNSDKLIARKKDWDPKKYGGFDSPTVAYSVLVVAKVEKGKSKKLKSVKELLGITIMERSSFEKNPIDFLEAKGYKEVKKDLIIKLPKYSLFELENGRKRMLASAGELQKGNELALPSKYVNFLYLASHYEKLKGSPEDNEQKQLFVEQHKHYLDEIIEQISEFSKRVILADANLDKVLSAYNKHRDKPIREQAENIIHLFTLTNLGAPAAFKYFDTTIDRKRYTSTKEVLDATLIHQSITGLYETRIDLSQLGGDGGPAPEAAAKGSSGGLLGRDLLTKLKAQIQFSTEGPQVTWEDRPAMCLVLNLEEEYRLHEKPVPPSIDPSWLQLFPMVWAEKAGMGLANQVPPVVVELKSDASPVAVRQYPMSKEAREGIRPHIQRFLDLGILVPCQSPWNTPLLPVKKPGTNDYRPVQDLREVNKRVQDIHPTVPNPYNLLSSLPPSHTWYSVLDLKDAFFCLKLHPNSQPLFAFEWRDPEKGNTGQLTWTRLPQGFKNSPTLFNEALHRDLASFRALNPQVVMLQYVDDLLVAAPTYRDCKEGTRRLLQELSKLGYRVSAKKAQLCREEVTYLGYLLKGGKRWLTPARKATVMKIPTPTTPRQVREFLGKAGFCRLFIPGFASLAAPLYPLTRPKVPFTWTEAHQEAFGRIKEALLSAPALALPDLTKPFALYVDEKEGVARGVLTQTLGPWRRPVAYLSKKLDPVASGWPTCLKAIAAVALLLKDADKLTLGQNVLVIAPHNLESIVRQPPDRWMTNARMTHYQSLLLNERVSFAPPAILNPATLLPVESDDTPIHICSEILAEETGTRPDLRDQPLPGVPAWYTDGSSFIMDGRRQAGAAIVDNKRTVWASNLPEGTSAQKAELIALTQALRLAEGKSINIYTDSRYAFATAHVHGAIYKQRGWLTSAGKDIKNKEEILALLEAIHLPKRVAIIHCPGHQRGTDPVATGNRKADEAAKQAAQSTRILTETTKNAGKRTADGSEFEKRTADGSEFESPKKKAKVE

SEQ ID NO: 1700 - protein, 2127 aa, synthetic construct
MPAAKRVKLDGGDKKYSIGLDIGTNSVGWAVITDEYKVPSKKFKVLGNTDRHSIKKNLIGALLFDSGETAEATRLKRTARRRYTRRKNRICYLQEIFSNEMAKVDDSFFHRLEESFLVEEDKKHERHPIFGNIVDEVAYHEKYPTIYHLRKKLVDSTDKADLRLIYLALAHMIKFRGHFLIEGDLNPDNSDVDKLFIQLVQTYNQLFEENPINASGVDAKAILSARLSKSRRLENLIAQLPGEKKNGLFGNLIALSLGLTPNFKSNFDLAEDAKLQLSKDTYDDDLDNLLAQIGDQYADLFLAAKNLSDAILLSDILRVNTEITKAPLSASMIKRYDEHHQDLTLLKALVRQQLPEKYKEIFFDQSKNGYAGYIDGGASQEEFYKFIKPILEKMDGTEELLVKLNREDLLRKQRTFDNGSIPHQIHLGELHAILRRQEDFYPFLKDNREKIEKILTFRIPYYVGPLARGNSRFAWMTRKSEETITPWNFEEVVDKGASAQSFIERMTNFDKNLPNEKVLPKHSLLYEYFTVYNELTKVKYVTEGMRKPAFLSGEQKKAIVDLLFKTNRKVTVKQLKEDYFKKIECFDSVEISGVEDRFNASLGTYHDLLKIIKDKDFLDNEENEDILEDIVLTLTLFEDREMIEERLKTYAHLFDDKVMKQLKRRRYTGWGRLSRKLINGIRDKQSGKTILDFLKSDGFANRNFMQLIHDDSLTFKEDIQKAQVSGQGDSLHEHIANLAGSPAIKKGILQTVKVVDELVKVMGRHKPENIVIEMARENQTTQKGQKNSRERMKRIEEGIKELGSQILKEHPVENTQLQNEKLYLYYLQNGRDMYVDQELDINRLSDYDVDHIVPQSFLKDDSIDNKVLTRSDKARGKSDNVPSEEVVKKMKNYWRQLLNAKLITQRKFDNLTKAERGGLSELDKAGFIKRQLVETRQITKHVAQILDSRMNTKYDENDKLIREVKVITLKSKLVSDFRKDFQFYKVREINNYHHAHDAYLNAVVGTALIKKYPKLESEFVYGDYKVYDVRKMIAKSEQEIGKATAKYFFYSNIMNFFKTEITLANGEIRKRPLIETNGETGEIVWDKGRDFATVRKVLSMPQVNIVKKTEVQTGGFSKESILPKRNSDKLIARKKDWDPKKYGGFDSPTVAYSVLVVAKVEKGKSKKLKSVKELLGITIMERSSFEKNPIDFLEAKGYKEVKKDLIIKLPKYSLFELENGRKRMLASAGELQKGNELALPSKYVNFLYLASHYEKLKGSPEDNEQKQLFVEQHKHYLDEIIEQISEFSKRVILADANLDKVLSAYNKHRDKPIREQAENIIHLFTLTNLGAPAAFKYFDTTIDRKRYTSTKEVLDATLIHQSITGLYETRIDLSQLGGDGGEAAAKGSSGGGGGLLGRDLLTKLKAQIQFSTEGPQVTWEDRPAMCLVLNLEEEYRLHEKPVPPSIDPSWLQLFPMVWAEKAGMGLANQVPPVVVELKSDASPVAVRQYPMSKEAREGIRPHIQRFLDLGILVPCQSPWNTPLLPVKKPGTNDYRPVQDLREVNKRVQDIHPTVPNPYNLLSSLPPSHTWYSVLDLKDAFFCLKLHPNSQPLFAFEWRDPEKGNTGQLTWTRLPQGFKNSPTLFNEALHRDLASFRALNPQVVMLQYVDDLLVAAPTYRDCKEGTRRLLQELSKLGYRVSAKKAQLCREEVTYLGYLLKGGKRWLTPARKATVMKIPTPTTPRQVREFLGKAGFCRLFIPGFASLAAPLYPLTRPKVPFTWTEAHQEAFGRIKEALLSAPALALPDLTKPFALYVDEKEGVARGVLTQTLGPWRRPVAYLSKKLDPVASGWPTCLKAIAAVALLLKDADKLTLGQNVLVIAPHNLESIVRQPPDRWMTNARMTHYQSLLLNERVSFAPPAILNPATLLPVESDDTPIHICSEILAEETGTRPDLRDQPLPGVPAWYTDGSSFIMDGRRQAGAAIVDNKRTVWASNLPEGTSAQKAELIALTQALRLAEGKSINIYTDSRYAFATAHVHGAIYKQRGWLTSAGKDIKNKEEILALLEAIHLPKRVAIIHCPGHQRGTDPVATGNRKADEAAKQAAQSTRILTETTKNAGKRTADGSEFEKRTADGSEFESPKKKAKVE

SEQ ID NO: 1701 - protein, 2129 aa, synthetic construct
MPAAKRVKLDGGDKKYSIGLDIGTNSVGWAVITDEYKVPSKKFKVLGNTDRHSIKKNLIGALLFDSGETAEATRLKRTARRRYTRRKNRICYLQEIFSNEMAKVDDSFFHRLEESFLVEEDKKHERHPIFGNIVDEVAYHEKYPTIYHLRKKLVDSTDKADLRLIYLALAHMIKFRGHFLIEGDLNPDNSDVDKLFIQLVQTYNQLFEENPINASGVDAKAILSARLSKSRRLENLIAQLPGEKKNGLFGNLIALSLGLTPNFKSNFDLAEDAKLQLSKDTYDDDLDNLLAQIGDQYADLFLAAKNLSDAILLSDILRVNTEITKAPLSASMIKRYDEHHQDLTLLKALVRQQLPEKYKEIFFDQSKNGYAGYIDGGASQEEFYKFIKPILEKMDGTEELLVKLNREDLLRKQRTFDNGSIPHQIHLGELHAILRRQEDFYPFLKDNREKIEKILTFRIPYYVGPLARGNSRFAWMTRKSEETITPWNFEEVVDKGASAQSFIERMTNFDKNLPNEKVLPKHSLLYEYFTVYNELTKVKYVTEGMRKPAFLSGEQKKAIVDLLFKTNRKVTVKQLKEDYFKKIECFDSVEISGVEDRFNASLGTYHDLLKIIKDKDFLDNEENEDILEDIVLTLTLFEDREMIEERLKTYAHLFDDKVMKQLKRRRYTGWGRLSRKLINGIRDKQSGKTILDFLKSDGFANRNFMQLIHDDSLTFKEDIQKAQVSGQGDSLHEHIANLAGSPAIKKGILQTVKVVDELVKVMGRHKPENIVIEMARENQTTQKGQKNSRERMKRIEEGIKELGSQILKEHPVENTQLQNEKLYLYYLQNGRDMYVDQELDINRLSDYDVDHIVPQSFLKDDSIDNKVLTRSDKARGKSDNVPSEEVVKKMKNYWRQLLNAKLITQRKFDNLTKAERGGLSELDKAGFIKRQLVETRQITKHVAQILDSRMNTKYDENDKLIREVKVITLKSKLVSDFRKDFQFYKVREINNYHHAHDAYLNAVVGTALIKKYPKLESEFVYGDYKVYDVRKMIAKSEQEIGKATAKYFFYSNIMNFFKTEITLANGEIRKRPLIETNGETGEIVWDKGRDFATVRKVLSMPQVNIVKKTEVQTGGFSKESILPKRNSDKLIARKKDWDPKKYGGFDSPTVAYSVLVVAKVEKGKSKKLKSVKELLGITIMERSSFEKNPIDFLEAKGYKEVKKDLIIKLPKYSLFELENGRKRMLASAGELQKGNELALPSKYVNFLYLASHYEKLKGSPEDNEQKQLFVEQHKHYLDEIIEQISEFSKRVILADANLDKVLSAYNKHRDKPIREQAENIIHLFTLTNLGAPAAFKYFDTTIDRKRYTSTKEVLDATLIHQSITGLYETRIDLSQLGGDGGPAPAPAPAPAPAPGGLLGRDLLTKLKAQIQFSTEGPQVTWEDRPAMCLVLNLEEEYRLHEKPVPPSIDPSWLQLFPMVWAEKAGMGLANQVPPVVVELKSDASPVAVRQYPMSKEAREGIRPHIQRFLDLGILVPCQSPWNTPLLPVKKPGTNDYRPVQDLREVNKRVQDIHPTVPNPYNLLSSLPPSHTWYSVLDLKDAFFCLKLHPNSQPLFAFEWRDPEKGNTGQLTWTRLPQGFKNSPTLFNEALHRDLASFRALNPQVVMLQYVDDLLVAAPTYRDCKEGTRRLLQELSKLGYRVSAKKAQLCREEVTYLGYLLKGGKRWLTPARKATVMKIPTPTTPRQVREFLGKAGFCRLFIPGFASLAAPLYPLTRPKVPFTWTEAHQEAFGRIKEALLSAPALALPDLTKPFALYVDEKEGVARGVLTQTLGPWRRPVAYLSKKLDPVASGWPTCLKAIAAVALLLKDADKLTLGQNVLVIAPHNLESIVRQPPDRWMTNARMTHYQSLLLNERVSFAPPAILNPATLLPVESDDTPIHICSEILAEETGTRPDLRDQPLPGVPAWYTDGSSFIMDGRRQAGAAIVDNKRTVWASNLPEGTSAQKAELIALTQALRLAEGKSINIYTDSRYAFATAHVHGAIYKQRGWLTSAGKDIKNKEEILALLEAIHLPKRVAIIHCPGHQRGTDPVATGNRKADEAAKQAAQSTRILTETTKNAGKRTADGSEFEKRTADGSEFESPKKKAKVE

SEQ ID NO: 1702 - protein, 2127 aa, synthetic construct
MPAAKRVKLDGGDKKYSIGLDIGTNSVGWAVITDEYKVPSKKFKVLGNTDRHSIKKNLIGALLFDSGETAEATRLKRTARRRYTRRKNRICYLQEIFSNEMAKVDDSFFHRLEESFLVEEDKKHERHPIFGNIVDEVAYHEKYPTIYHLRKKLVDSTDKADLRLIYLALAHMIKFRGHFLIEGDLNPDNSDVDKLFIQLVQTYNQLFEENPINASGVDAKAILSARLSKSRRLENLIAQLPGEKKNGLFGNLIALSLGLTPNFKSNFDLAEDAKLQLSKDTYDDDLDNLLAQIGDQYADLFLAAKNLSDAILLSDILRVNTEITKAPLSASMIKRYDEHHQDLTLLKALVRQQLPEKYKEIFFDQSKNGYAGYIDGGASQEEFYKFIKPILEKMDGTEELLVKLNREDLLRKQRTFDNGSIPHQIHLGELHAILRRQEDFYPFLKDNREKIEKILTFRIPYYVGPLARGNSRFAWMTRKSEETITPWNFEEVVDKGASAQSFIERMTNFDKNLPNEKVLPKHSLLYEYFTVYNELTKVKYVTEGMRKPAFLSGEQKKAIVDLLFKTNRKVTVKQLKEDYFKKIECFDSVEISGVEDRFNASLGTYHDLLKIIKDKDFLDNEENEDILEDIVLTLTLFEDREMIEERLKTYAHLFDDKVMKQLKRRRYTGWGRLSRKLINGIRDKQSGKTILDFLKSDGFANRNFMQLIHDDSLTFKEDIQKAQVSGQGDSLHEHIANLAGSPAIKKGILQTVKVVDELVKVMGRHKPENIVIEMARENQTTQKGQKNSRERMKRIEEGIKELGSQILKEHPVENTQLQNEKLYLYYLQNGRDMYVDQELDINRLSDYDVDHIVPQSFLKDDSIDNKVLTRSDKARGKSDNVPSEEVVKKMKNYWRQLLNAKLITQRKFDNLTKAERGGLSELDKAGFIKRQLVETRQITKHVAQILDSRMNTKYDENDKLIREVKVITLKSKLVSDFRKDFQFYKVREINNYHHAHDAYLNAVVGTALIKKYPKLESEFVYGDYKVYDVRKMIAKSEQEIGKATAKYFFYSNIMNFFKTEITLANGEIRKRPLIETNGETGEIVWDKGRDFATVRKVLSMPQVNIVKKTEVQTGGFSKESILPKRNSDKLIARKKDWDPKKYGGFDSPTVAYSVLVVAKVEKGKSKKLKSVKELLGITIMERSSFEKNPIDFLEAKGYKEVKKDLIIKLPKYSLFELENGRKRMLASAGELQKGNELALPSKYVNFLYLASHYEKLKGSPEDNEQKQLFVEQHKHYLDEIIEQISEFSKRVILADANLDKVLSAYNKHRDKPIREQAENIIHLFTLTNLGAPAAFKYFDTTIDRKRYTSTKEVLDATLIHQSITGLYETRIDLSQLGGDGGGGGEAAAKGGSGGLLGRDLLTKLKAQIQFSTEGPQVTWEDRPAMCLVLNLEEEYRLHEKPVPPSIDPSWLQLFPMVWAEKAGMGLANQVPPVVVELKSDASPVAVRQYPMSKEAREGIRPHIQRFLDLGILVPCQSPWNTPLLPVKKPGTNDYRPVQDLREVNKRVQDIHPTVPNPYNLLSSLPPSHTWYSVLDLKDAFFCLKLHPNSQPLFAFEWRDPEKGNTGQLTWTRLPQGFKNSPTLFNEALHRDLASFRALNPQVVMLQYVDDLLVAAPTYRDCKEGTRRLLQELSKLGYRVSAKKAQLCREEVTYLGYLLKGGKRWLTPARKATVMKIPTPTTPRQVREFLGKAGFCRLFIPGFASLAAPLYPLTRPKVPFTWTEAHQEAFGRIKEALLSAPALALPDLTKPFALYVDEKEGVARGVLTQTLGPWRRPVAYLSKKLDPVASGWPTCLKAIAAVALLLKDADKLTLGQNVLVIAPHNLESIVRQPPDRWMTNARMTHYQSLLLNERVSFAPPAILNPATLLPVESDDTPIHICSEILAEETGTRPDLRDQPLPGVPAWYTDGSSFIMDGRRQAGAAIVDNKRTVWASNLPEGTSAQKAELIALTQALRLAEGKSINIYTDSRYAFATAHVHGAIYKQRGWLTSAGKDIKNKEEILALLEAIHLPKRVAIIHCPGHQRGTDPVATGNRKADEAAKQAAQSTRILTETTKNAGKRTADGSEFEKRTADGSEFESPKKKAKVE

SEQ ID NO: 1703 - protein, 2122 aa, synthetic construct
MPAAKRVKLDGGDKKYSIGLDIGTNSVGWAVITDEYKVPSKKFKVLGNTDRHSIKKNLIGALLFDSGETAEATRLKRTARRRYTRRKNRICYLQEIFSNEMAKVDDSFFHRLEESFLVEEDKKHERHPIFGNIVDEVAYHEKYPTIYHLRKKLVDSTDKADLRLIYLALAHMIKFRGHFLIEGDLNPDNSDVDKLFIQLVQTYNQLFEENPINASGVDAKAILSARLSKSRRLENLIAQLPGEKKNGLFGNLIALSLGLTPNFKSNFDLAEDAKLQLSKDTYDDDLDNLLAQIGDQYADLFLAAKNLSDAILLSDILRVNTEITKAPLSASMIKRYDEHHQDLTLLKALVRQQLPEKYKEIFFDQSKNGYAGYIDGGASQEEFYKFIKPILEKMDGTEELLVKLNREDLLRKQRTFDNGSIPHQIHLGELHAILRRQEDFYPFLKDNREKIEKILTFRIPYYVGPLARGNSRFAWMTRKSEETITPWNFEEVVDKGASAQSFIERMTNFDKNLPNEKVLPKHSLLYEYFTVYNELTKVKYVTEGMRKPAFLSGEQKKAIVDLLFKTNRKVTVKQLKEDYFKKIECFDSVEISGVEDRFNASLGTYHDLLKIIKDKDFLDNEENEDILEDIVLTLTLFEDREMIEERLKTYAHLFDDKVMKQLKRRRYTGWGRLSRKLINGIRDKQSGKTILDFLKSDGFANRNFMQLIHDDSLTFKEDIQKAQVSGQGDSLHEHIANLAGSPAIKKGILQTVKVVDELVKVMGRHKPENIVIEMARENQTTQKGQKNSRERMKRIEEGIKELGSQILKEHPVENTQLQNEKLYLYYLQNGRDMYVDQELDINRLSDYDVDHIVPQSFLKDDSIDNKVLTRSDKARGKSDNVPSEEVVKKMKNYWRQLLNAKLITQRKFDNLTKAERGGLSELDKAGFIKRQLVETRQITKHVAQILDSRMNTKYDENDKLIREVKVITLKSKLVSDFRKDFQFYKVREINNYHHAHDAYLNAVVGTALIKKYPKLESEFVYGDYKVYDVRKMIAKSEQEIGKATAKYFFYSNIMNFFKTEITLANGEIRKRPLIETNGETGEIVWDKGRDFATVRKVLSMPQVNIVKKTEVQTGGFSKESILPKRNSDKLIARKKDWDPKKYGGFDSPTVAYSVLVVAKVEKGKSKKLKSVKELLGITIMERSSFEKNPIDFLEAKGYKEVKKDLIIKLPKYSLFELENGRKRMLASAGELQKGNELALPSKYVNFLYLASHYEKLKGSPEDNEQKQLFVEQHKHYLDEIIEQISEFSKRVILADANLDKVLSAYNKHRDKPIREQAENIIHLFTLTNLGAPAAFKYFDTTIDRKRYTSTKEVLDATLIHQSITGLYETRIDLSQLGGDGGGGSPAPGGLLGRDLLTKLKAQIQFSTEGPQVTWEDRPAMCLVLNLEEEYRLHEKPVPPSIDPSWLQLFPMVWAEKAGMGLANQVPPVVVELKSDASPVAVRQYPMSKEAREGIRPHIQRFLDLGILVPCQSPWNTPLLPVKKPGTNDYRPVQDLREVNKRVQDIHPTVPNPYNLLSSLPPSHTWYSVLDLKDAFFCLKLHPNSQPLFAFEWRDPEKGNTGQLTWTRLPQGFKNSPTLFNEALHRDLASFRALNPQVVMLQYVDDLLVAAPTYRDCKEGTRRLLQELSKLGYRVSAKKAQLCREEVTYLGYLLKGGKRWLTPARKATVMKIPTPTTPRQVREFLGKAGFCRLFIPGFASLAAPLYPLTRPKVPFTWTEAHQEAFGRIKEALLSAPALALPDLTKPFALYVDEKEGVARGVLTQTLGPWRRPVAYLSKKLDPVASGWPTCLKAIAAVALLLKDADKLTLGQNVLVIAPHNLESIVRQPPDRWMTNARMTHYQSLLLNERVSFAPPAILNPATLLPVESDDTPIHICSEILAEETGTRPDLRDQPLPGVPAWYTDGSSFIMDGRRQAGAAIVDNKRTVWASNLPEGTSAQKAELIALTQALRLAEGKSINIYTDSRYAFATAHVHGAIYKQRGWLTSAGKDIKNKEEILALLEAIHLPKRVAIIHCPGHQRGTDPVATGNRKADEAAKQAAQSTRILTETTKNAGKRTADGSEFEKRTADGSEFESPKKKAKVE

SEQ ID NO: 1704 - protein, 2127 aa, synthetic construct
MPAAKRVKLDGGDKKYSIGLDIGTNSVGWAVITDEYKVPSKKFKVLGNTDRHSIKKNLIGALLFDSGETAEATRLKRTARRRYTRRKNRICYLQEIFSNEMAKVDDSFFHRLEESFLVEEDKKHERHPIFGNIVDEVAYHEKYPTIYHLRKKLVDSTDKADLRLIYLALAHMIKFRGHFLIEGDLNPDNSDVDKLFIQLVQTYNQLFEENPINASGVDAKAILSARLSKSRRLENLIAQLPGEKKNGLFGNLIALSLGLTPNFKSNFDLAEDAKLQLSKDTYDDDLDNLLAQIGDQYADLFLAAKNLSDAILLSDILRVNTEITKAPLSASMIKRYDEHHQDLTLLKALVRQQLPEKYKEIFFDQSKNGYAGYIDGGASQEEFYKFIKPILEKMDGTEELLVKLNREDLLRKQRTFDNGSIPHQIHLGELHAILRRQEDFYPFLKDNREKIEKILTFRIPYYVGPLARGNSRFAWMTRKSEETITPWNFEEVVDKGASAQSFIERMTNFDKNLPNEKVLPKHSLLYEYFTVYNELTKVKYVTEGMRKPAFLSGEQKKAIVDLLFKTNRKVTVKQLKEDYFKKIECFDSVEISGVEDRFNASLGTYHDLLKIIKDKDFLDNEENEDILEDIVLTLTLFEDREMIEERLKTYAHLFDDKVMKQLKRRRYTGWGRLSRKLINGIRDKQSGKTILDFLKSDGFANRNFMQLIHDDSLTFKEDIQKAQVSGQGDSLHEHIANLAGSPAIKKGILQTVKVVDELVKVMGRHKPENIVIEMARENQTTQKGQKNSRERMKRIEEGIKELGSQILKEHPVENTQLQNEKLYLYYLQNGRDMYVDQELDINRLSDYDVDHIVPQSFLKDDSIDNKVLTRSDKARGKSDNVPSEEVVKKMKNYWRQLLNAKLITQRKFDNLTKAERGGLSELDKAGFIKRQLVETRQITKHVAQILDSRMNTKYDENDKLIREVKVITLKSKLVSDFRKDFQFYKVREINNYHHAHDAYLNAVVGTALIKKYPKLESEFVYGDYKVYDVRKMIAKSEQEIGKATAKYFFYSNIMNFFKTEITLANGEIRKRPLIETNGETGEIVWDKGRDFATVRKVLSMPQVNIVKKTEVQTGGFSKESILPKRNSDKLIARKKDWDPKKYGGFDSPTVAYSVLVVAKVEKGKSKKLKSVKELLGITIMERSSFEKNPIDFLEAKGYKEVKKDLIIKLPKYSLFELENGRKRMLASAGELQKGNELALPSKYVNFLYLASHYEKLKGSPEDNEQKQLFVEQHKHYLDEIIEQISEFSKRVILADANLDKVLSAYNKHRDKPIREQAENIIHLFTLTNLGAPAAFKYFDTTIDRKRYTSTKEVLDATLIHQSITGLYETRIDLSQLGGDGGGGSEAAAKPAPGGLLGRDLLTKLKAQIQFSTEGPQVTWEDRPAMCLVLNLEEEYRLHEKPVPPSIDPSWLQLFPMVWAEKAGMGLANQVPPVVVELKSDASPVAVRQYPMSKEAREGIRPHIQRFLDLGILVPCQSPWNTPLLPVKKPGTNDYRPVQDLREVNKRVQDIHPTVPNPYNLLSSLPPSHTWYSVLDLKDAFFCLKLHPNSQPLFAFEWRDPEKGNTGQLTWTRLPQGFKNSPTLFNEALHRDLASFRALNPQVVMLQYVDDLLVAAPTYRDCKEGTRRLLQELSKLGYRVSAKKAQLCREEVTYLGYLLKGGKRWLTPARKATVMKIPTPTTPRQVREFLGKAGFCRLFIPGFASLAAPLYPLTRPKVPFTWTEAHQEAFGRIKEALLSAPALALPDLTKPFALYVDEKEGVARGVLTQTLGPWRRPVAYLSKKLDPVASGWPTCLKAIAAVALLLKDADKLTLGQNVLVIAPHNLESIVRQPPDRWMTNARMTHYQSLLLNERVSFAPPAILNPATLLPVESDDTPIHICSEILAEETGTRPDLRDQPLPGVPAWYTDGSSFIMDGRRQAGAAIVDNKRTVWASNLPEGTSAQKAELIALTQALRLAEGKSINIYTDSRYAFATAHVHGAIYKQRGWLTSAGKDIKNKEEILALLEAIHLPKRVAIIHCPGHQRGTDPVATGNRKADEAAKQAAQSTRILTETTKNAGKRTADGSEFEKRTADGSEFESPKKKAKVE

SEQ ID NO: 1705 - protein, 2121 aa, synthetic construct
MPAAKRVKLDGGDKKYSIGLDIGTNSVGWAVITDEYKVPSKKFKVLGNTDRHSIKKNLIGALLFDSGETAEATRLKRTARRRYTRRKNRICYLQEIFSNEMAKVDDSFFHRLEESFLVEEDKKHERHPIFGNIVDEVAYHEKYPTIYHLRKKLVDSTDKADLRLIYLALAHMIKFRGHFLIEGDLNPDNSDVDKLFIQLVQTYNQLFEENPINASGVDAKAILSARLSKSRRLENLIAQLPGEKKNGLFGNLIALSLGLTPNFKSNFDLAEDAKLQLSKDTYDDDLDNLLAQIGDQYADLFLAAKNLSDAILLSDILRVNTEITKAPLSASMIKRYDEHHQDLTLLKALVRQQLPEKYKEIFFDQSKNGYAGYIDGGASQEEFYKFIKPILEKMDGTEELLVKLNREDLLRKQRTFDNGSIPHQIHLGELHAILRRQEDFYPFLKDNREKIEKILTFRIPYYVGPLARGNSRFAWMTRKSEETITPWNFEEVVDKGASAQSFIERMTNFDKNLPNEKVLPKHSLLYEYFTVYNELTKVKYVTEGMRKPAFLSGEQKKAIVDLLFKTNRKVTVKQLKEDYFKKIECFDSVEISGVEDRFNASLGTYHDLLKIIKDKDFLDNEENEDILEDIVLTLTLFEDREMIEERLKTYAHLFDDKVMKQLKRRRYTGWGRLSRKLINGIRDKQSGKTILDFLKSDGFANRNFMQLIHDDSLTFKEDIQKAQVSGQGDSLHEHIANLAGSPAIKKGILQTVKVVDELVKVMGRHKPENIVIEMARENQTTQKGQKNSRERMKRIEEGIKELGSQILKEHPVENTQLQNEKLYLYYLQNGRDMYVDQELDINRLSDYDVDHIVPQSFLKDDSIDNKVLTRSDKARGKSDNVPSEEVVKKMKNYWRQLLNAKLITQRKFDNLTKAERGGLSELDKAGFIKRQLVETRQITKHVAQILDSRMNTKYDENDKLIREVKVITLKSKLVSDFRKDFQFYKVREINNYHHAHDAYLNAVVGTALIKKYPKLESEFVYGDYKVYDVRKMIAKSEQEIGKATAKYFFYSNIMNFFKTEITLANGEIRKRPLIETNGETGEIVWDKGRDFATVRKVLSMPQVNIVKKTEVQTGGFSKESILPKRNSDKLIARKKDWDPKKYGGFDSPTVAYSVLVVAKVEKGKSKKLKSVKELLGITIMERSSFEKNPIDFLEAKGYKEVKKDLIIKLPKYSLFELENGRKRMLASAGELQKGNELALPSKYVNFLYLASHYEKLKGSPEDNEQKQLFVEQHKHYLDEIIEQISEFSKRVILADANLDKVLSAYNKHRDKPIREQAENIIHLFTLTNLGAPAAFKYFDTTIDRKRYTSTKEVLDATLIHQSITGLYETRIDLSQLGGDGGGGGGSGGLLGRDLLTKLKAQIQFSTEGPQVTWEDRPAMCLVLNLEEEYRLHEKPVPPSIDPSWLQLFPMVWAEKAGMGLANQVPPVVVELKSDASPVAVRQYPMSKEAREGIRPHIQRFLDLGILVPCQSPWNTPLLPVKKPGTNDYRPVQDLREVNKRVQDIHPTVPNPYNLLSSLPPSHTWYSVLDLKDAFFCLKLHPNSQPLFAFEWRDPEKGNTGQLTWTRLPQGFKNSPTLFNEALHRDLASFRALNPQVVMLQYVDDLLVAAPTYRDCKEGTRRLLQELSKLGYRVSAKKAQLCREEVTYLGYLLKGGKRWLTPARKATVMKIPTPTTPRQVREFLGKAGFCRLFIPGFASLAAPLYPLTRPKVPFTWTEAHQEAFGRIKEALLSAPALALPDLTKPFALYVDEKEGVARGVLTQTLGPWRRPVAYLSKKLDPVASGWPTCLKAIAAVALLLKDADKLTLGQNVLVIAPHNLESIVRQPPDRWMTNARMTHYQSLLLNERVSFAPPAILNPATLLPVESDDTPIHICSEILAEETGTRPDLRDQPLPGVPAWYTDGSSFIMDGRRQAGAAIVDNKRTVWASNLPEGTSAQKAELIALTQALRLAEGKSINIYTDSRYAFATAHVHGAIYKQRGWLTSAGKDIKNKEEILALLEAIHLPKRVAIIHCPGHQRGTDPVATGNRKADEAAKQAAQSTRILTETTKNAGKRTADGSEFEKRTADGSEFESPKKKAKVE

SEQ ID NO: 1706 - protein, 2146 aa, synthetic construct
MPAAKRVKLDGGDKKYSIGLDIGTNSVGWAVITDEYKVPSKKFKVLGNTDRHSIKKNLIGALLFDSGETAEATRLKRTARRRYTRRKNRICYLQEIFSNEMAKVDDSFFHRLEESFLVEEDKKHERHPIFGNIVDEVAYHEKYPTIYHLRKKLVDSTDKADLRLIYLALAHMIKFRGHFLIEGDLNPDNSDVDKLFIQLVQTYNQLFEENPINASGVDAKAILSARLSKSRRLENLIAQLPGEKKNGLFGNLIALSLGLTPNFKSNFDLAEDAKLQLSKDTYDDDLDNLLAQIGDQYADLFLAAKNLSDAILLSDILRVNTEITKAPLSASMIKRYDEHHQDLTLLKALVRQQLPEKYKEIFFDQSKNGYAGYIDGGASQEEFYKFIKPILEKMDGTEELLVKLNREDLLRKQRTFDNGSIPHQIHLGELHAILRRQEDFYPFLKDNREKIEKILTFRIPYYVGPLARGNSRFAWMTRKSEETITPWNFEEVVDKGASAQSFIERMTNFDKNLPNEKVLPKHSLLYEYFTVYNELTKVKYVTEGMRKPAFLSGEQKKAIVDLLFKTNRKVTVKQLKEDYFKKIECFDSVEISGVEDRFNASLGTYHDLLKIIKDKDFLDNEENEDILEDIVLTLTLFEDREMIEERLKTYAHLFDDKVMKQLKRRRYTGWGRLSRKLINGIRDKQSGKTILDFLKSDGFANRNFMQLIHDDSLTFKEDIQKAQVSGQGDSLHEHIANLAGSPAIKKGILQTVKVVDELVKVMGRHKPENIVIEMARENQTTQKGQKNSRERMKRIEEGIKELGSQILKEHPVENTQLQNEKLYLYYLQNGRDMYVDQELDINRLSDYDVDHIVPQSFLKDDSIDNKVLTRSDKARGKSDNVPSEEVVKKMKNYWRQLLNAKLITQRKFDNLTKAERGGLSELDKAGFIKRQLVETRQITKHVAQILDSRMNTKYDENDKLIREVKVITLKSKLVSDFRKDFQFYKVREINNYHHAHDAYLNAVVGTALIKKYPKLESEFVYGDYKVYDVRKMIAKSEQEIGKATAKYFFYSNIMNFFKTEITLANGEIRKRPLIETNGETGEIVWDKGRDFATVRKVLSMPQVNIVKKTEVQTGGFSKESILPKRNSDKLIARKKDWDPKKYGGFDSPTVAYSVLVVAKVEKGKSKKLKSVKELLGITIMERSSFEKNPIDFLEAKGYKEVKKDLIIKLPKYSLFELENGRKRMLASAGELQKGNELALPSKYVNFLYLASHYEKLKGSPEDNEQKQLFVEQHKHYLDEIIEQISEFSKRVILADANLDKVLSAYNKHRDKPIREQAENIIHLFTLTNLGAPAAFKYFDTTIDRKRYTSTKEVLDATLIHQSITGLYETRIDLSQLGGDGGEAAAKEAAAKEAAAKEAAAKEAAAKEAAAKGGLLGRDLLTKLKAQIQFSTEGPQVTWEDRPAMCLVLNLEEEYRLHEKPVPPSIDPSWLQLFPMVWAEKAGMGLANQVPPVVVELKSDASPVAVRQYPMSKEAREGIRPHIQRFLDLGILVPCQSPWNTPLLPVKKPGTNDYRPVQDLREVNKRVQDIHPTVPNPYNLLSSLPPSHTWYSVLDLKDAFFCLKLHPNSQPLFAFEWRDPEKGNTGQLTWTRLPQGFKNSPTLFNEALHRDLASFRALNPQVVMLQYVDDLLVAAPTYRDCKEGTRRLLQELSKLGYRVSAKKAQLCREEVTYLGYLLKGGKRWLTPARKATVMKIPTPTTPRQVREFLGKAGFCRLFIPGFASLAAPLYPLTRPKVPFTWTEAHQEAFGRIKEALLSAPALALPDLTKPFALYVDEKEGVARGVLTQTLGPWRRPVAYLSKKLDPVASGWPTCLKAIAAVALLLKDADKLTLGQNVLVIAPHNLESIVRQPPDRWMTNARMTHYQSLLLNERVSFAPPAILNPATLLPVESDDTPIHICSEILAEETGTRPDLRDQPLPGVPAWYTDGSSFIMDGRRQAGAAIVDNKRTVWASNLPEGTSAQKAELIALTQALRLAEGKSINIYTDSRYAFATAHVHGAIYKQRGWLTSAGKDIKNKEEILALLEAIHLPKRVAIIHCPGHQRGTDPVATGNRKADEAAKQAAQSTRILTETTKNAGKRTADGSEFEKRTADGSEFESPKKKAKVE

SEQ ID NO: 1707 - protein, 2122 aa, synthetic construct
MPAAKRVKLDGGDKKYSIGLDIGTNSVGWAVITDEYKVPSKKFKVLGNTDRHSIKKNLIGALLFDSGETAEATRLKRTARRRYTRRKNRICYLQEIFSNEMAKVDDSFFHRLEESFLVEEDKKHERHPIFGNIVDEVAYHEKYPTIYHLRKKLVDSTDKADLRLIYLALAHMIKFRGHFLIEGDLNPDNSDVDKLFIQLVQTYNQLFEENPINASGVDAKAILSARLSKSRRLENLIAQLPGEKKNGLFGNLIALSLGLTPNFKSNFDLAEDAKLQLSKDTYDDDLDNLLAQIGDQYADLFLAAKNLSDAILLSDILRVNTEITKAPLSASMIKRYDEHHQDLTLLKALVRQQLPEKYKEIFFDQSKNGYAGYIDGGASQEEFYKFIKPILEKMDGTEELLVKLNREDLLRKQRTFDNGSIPHQIHLGELHAILRRQEDFYPFLKDNREKIEKILTFRIPYYVGPLARGNSRFAWMTRKSEETITPWNFEEVVDKGASAQSFIERMTNFDKNLPNEKVLPKHSLLYEYFTVYNELTKVKYVTEGMRKPAFLSGEQKKAIVDLLFKTNRKVTVKQLKEDYFKKIECFDSVEISGVEDRFNASLGTYHDLLKIIKDKDFLDNEENEDILEDIVLTLTLFEDREMIEERLKTYAHLFDDKVMKQLKRRRYTGWGRLSRKLINGIRDKQSGKTILDFLKSDGFANRNFMQLIHDDSLTFKEDIQKAQVSGQGDSLHEHIANLAGSPAIKKGILQTVKVVDELVKVMGRHKPENIVIEMARENQTTQKGQKNSRERMKRIEEGIKELGSQILKEHPVENTQLQNEKLYLYYLQNGRDMYVDQELDINRLSDYDVDHIVPQSFLKDDSIDNKVLTRSDKARGKSDNVPSEEVVKKMKNYWRQLLNAKLITQRKFDNLTKAERGGLSELDKAGFIKRQLVETRQITKHVAQILDSRMNTKYDENDKLIREVKVITLKSKLVSDFRKDFQFYKVREINNYHHAHDAYLNAVVGTALIKKYPKLESEFVYGDYKVYDVRKMIAKSEQEIGKATAKYFFYSNIMNFFKTEITLANGEIRKRPLIETNGETGEIVWDKGRDFATVRKVLSMPQVNIVKKTEVQTGGFSKESILPKRNSDKLIARKKDWDPKKYGGFDSPTVAYSVLVVAKVEKGKSKKLKSVKELLGITIMERSSFEKNPIDFLEAKGYKEVKKDLIIKLPKYSLFELENGRKRMLASAGELQKGNELALPSKYVNFLYLASHYEKLKGSPEDNEQKQLFVEQHKHYLDEIIEQISEFSKRVILADANLDKVLSAYNKHRDKPIREQAENIIHLFTLTNLGAPAAFKYFDTTIDRKRYTSTKEVLDATLIHQSITGLYETRIDLSQLGGDGGGGGGGGGGLLGRDLLTKLKAQIQFSTEGPQVTWEDRPAMCLVLNLEEEYRLHEKPVPPSIDPSWLQLFPMVWAEKAGMGLANQVPPVVVELKSDASPVAVRQYPMSKEAREGIRPHIQRFLDLGILVPCQSPWNTPLLPVKKPGTNDYRPVQDLREVNKRVQDIHPTVPNPYNLLSSLPPSHTWYSVLDLKDAFFCLKLHPNSQPLFAFEWRDPEKGNTGQLTWTRLPQGFKNSPTLFNEALHRDLASFRALNPQVVMLQYVDDLLVAAPTYRDCKEGTRRLLQELSKLGYRVSAKKAQLCREEVTYLGYLLKGGKRWLTPARKATVMKIPTPTTPRQVREFLGKAGFCRLFIPGFASLAAPLYPLTRPKVPFTWTEAHQEAFGRIKEALLSAPALALPDLTKPFALYVDEKEGVARGVLTQTLGPWRRPVAYLSKKLDPVASGWPTCLKAIAAVALLLKDADKLTLGQNVLVIAPHNLESIVRQPPDRWMTNARMTHYQSLLLNERVSFAPPAILNPATLLPVESDDTPIHICSEILAEETGTRPDLRDQPLPGVPAWYTDGSSFIMDGRRQAGAAIVDNKRTVWASNLPEGTSAQKAELIALTQALRLAEGKSINIYTDSRYAFATAHVHGAIYKQRGWLTSAGKDIKNKEEILALLEAIHLPKRVAIIHCPGHQRGTDPVATGNRKADEAAKQAAQSTRILTETTKNAGKRTADGSEFEKRTADGSEFESPKKKAKVE

SEQ ID NO: 1708 - protein, 2127 aa, synthetic construct
MPAAKRVKLDGGDKKYSIGLDIGTNSVGWAVITDEYKVPSKKFKVLGNTDRHSIKKNLIGALLFDSGETAEATRLKRTARRRYTRRKNRICYLQEIFSNEMAKVDDSFFHRLEESFLVEEDKKHERHPIFGNIVDEVAYHEKYPTIYHLRKKLVDSTDKADLRLIYLALAHMIKFRGHFLIEGDLNPDNSDVDKLFIQLVQTYNQLFEENPINASGVDAKAILSARLSKSRRLENLIAQLPGEKKNGLFGNLIALSLGLTPNFKSNFDLAEDAKLQLSKDTYDDDLDNLLAQIGDQYADLFLAAKNLSDAILLSDILRVNTEITKAPLSASMIKRYDEHHQDLTLLKALVRQQLPEKYKEIFFDQSKNGYAGYIDGGASQEEFYKFIKPILEKMDGTEELLVKLNREDLLRKQRTFDNGSIPHQIHLGELHAILRRQEDFYPFLKDNREKIEKILTFRIPYYVGPLARGNSRFAWMTRKSEETITPWNFEEVVDKGASAQSFIERMTNFDKNLPNEKVLPKHSLLYEYFTVYNELTKVKYVTEGMRKPAFLSGEQKKAIVDLLFKTNRKVTVKQLKEDYFKKIECFDSVEISGVEDRFNASLGTYHDLLKIIKDKDFLDNEENEDILEDIVLTLTLFEDREMIEERLKTYAHLFDDKVMKQLKRRRYTGWGRLSRKLINGIRDKQSGKTILDFLKSDGFANRNFMQLIHDDSLTFKEDIQKAQVSGQGDSLHEHIANLAGSPAIKKGILQTVKVVDELVKVMGRHKPENIVIEMARENQTTQKGQKNSRERMKRIEEGIKELGSQILKEHPVENTQLQNEKLYLYYLQNGRDMYVDQELDINRLSDYDVDHIVPQSFLKDDSIDNKVLTRSDKARGKSDNVPSEEVVKKMKNYWRQLLNAKLITQRKFDNLTKAERGGLSELDKAGFIKRQLVETRQITKHVAQILDSRMNTKYDENDKLIREVKVITLKSKLVSDFRKDFQFYKVREINNYHHAHDAYLNAVVGTALIKKYPKLESEFVYGDYKVYDVRKMIAKSEQEIGKATAKYFFYSNIMNFFKTEITLANGEIRKRPLIETNGETGEIVWDKGRDFATVRKVLSMPQVNIVKKTEVQTGGFSKESILPKRNSDKLIARKKDWDPKKYGGFDSPTVAYSVLVVAKVEKGKSKKLKSVKELLGITIMERSSFEKNPIDFLEAKGYKEVKKDLIIKLPKYSLFELENGRKRMLASAGELQKGNELALPSKYVNFLYLASHYEKLKGSPEDNEQKQLFVEQHKHYLDEIIEQISEFSKRVILADANLDKVLSAYNKHRDKPIREQAENIIHLFTLTNLGAPAAFKYFDTTIDRKRYTSTKEVLDATLIHQSITGLYETRIDLSQLGGDGGGSSGGGEAAAKGGLLGRDLLTKLKAQIQFSTEGPQVTWEDRPAMCLVLNLEEEYRLHEKPVPPSIDPSWLQLFPMVWAEKAGMGLANQVPPVVVELKSDASPVAVRQYPMSKEAREGIRPHIQRFLDLGILVPCQSPWNTPLLPVKKPGTNDYRPVQDLREVNKRVQDIHPTVPNPYNLLSSLPPSHTWYSVLDLKDAFFCLKLHPNSQPLFAFEWRDPEKGNTGQLTWTRLPQGFKNSPTLFNEALHRDLASFRALNPQVVMLQYVDDLLVAAPTYRDCKEGTRRLLQELSKLGYRVSAKKAQLCREEVTYLGYLLKGGKRWLTPARKATVMKIPTPTTPRQVREFLGKAGFCRLFIPGFASLAAPLYPLTRPKVPFTWTEAHQEAFGRIKEALLSAPALALPDLTKPFALYVDEKEGVARGVLTQTLGPWRRPVAYLSKKLDPVASGWPTCLKAIAAVALLLKDADKLTLGQNVLVIAPHNLESIVRQPPDRWMTNARMTHYQSLLLNERVSFAPPAILNPATLLPVESDDTPIHICSEILAEETGTRPDLRDQPLPGVPAWYTDGSSFIMDGRRQAGAAIVDNKRTVWASNLPEGTSAQKAELIALTQALRLAEGKSINIYTDSRYAFATAHVHGAIYKQRGWLTSAGKDIKNKEEILALLEAIHLPKRVAIIHCPGHQRGTDPVATGNRKADEAAKQAAQSTRILTETTKNAGKRTADGSEFEKRTADGSEFESPKKKAKVE

SEQ ID NO: 1709 - protein, 2124 aa, synthetic construct
MPAAKRVKLDGGDKKYSIGLDIGTNSVGWAVITDEYKVPSKKFKVLGNTDRHSIKKNLIGALLFDSGETAEATRLKRTARRRYTRRKNRICYLQEIFSNEMAKVDDSFFHRLEESFLVEEDKKHERHPIFGNIVDEVAYHEKYPTIYHLRKKLVDSTDKADLRLIYLALAHMIKFRGHFLIEGDLNPDNSDVDKLFIQLVQTYNQLFEENPINASGVDAKAILSARLSKSRRLENLIAQLPGEKKNGLFGNLIALSLGLTPNFKSNFDLAEDAKLQLSKDTYDDDLDNLLAQIGDQYADLFLAAKNLSDAILLSDILRVNTEITKAPLSASMIKRYDEHHQDLTLLKALVRQQLPEKYKEIFFDQSKNGYAGYIDGGASQEEFYKFIKPILEKMDGTEELLVKLNREDLLRKQRTFDNGSIPHQIHLGELHAILRRQEDFYPFLKDNREKIEKILTFRIPYYVGPLARGNSRFAWMTRKSEETITPWNFEEVVDKGASAQSFIERMTNFDKNLPNEKVLPKHSLLYEYFTVYNELTKVKYVTEGMRKPAFLSGEQKKAIVDLLFKTNRKVTVKQLKEDYFKKIECFDSVEISGVEDRFNASLGTYHDLLKIIKDKDFLDNEENEDILEDIVLTLTLFEDREMIEERLKTYAHLFDDKVMKQLKRRRYTGWGRLSRKLINGIRDKQSGKTILDFLKSDGFANRNFMQLIHDDSLTFKEDIQKAQVSGQGDSLHEHIANLAGSPAIKKGILQTVKVVDELVKVMGRHKPENIVIEMARENQTTQKGQKNSRERMKRIEEGIKELGSQILKEHPVENTQLQNEKLYLYYLQNGRDMYVDQELDINRLSDYDVDHIVPQSFLKDDSIDNKVLTRSDKARGKSDNVPSEEVVKKMKNYWRQLLNAKLITQRKFDNLTKAERGGLSELDKAGFIKRQLVETRQITKHVAQILDSRMNTKYDENDKLIREVKVITLKSKLVSDFRKDFQFYKVREINNYHHAHDAYLNAVVGTALIKKYPKLESEFVYGDYKVYDVRKMIAKSEQEIGKATAKYFFYSNIMNFFKTEITLANGEIRKRPLIETNGETGEIVWDKGRDFATVRKVLSMPQVNIVKKTEVQTGGFSKESILPKRNSDKLIARKKDWDPKKYGGFDSPTVAYSVLVVAKVEKGKSKKLKSVKELLGITIMERSSFEKNPIDFLEAKGYKEVKKDLIIKLPKYSLFELENGRKRMLASAGELQKGNELALPSKYVNFLYLASHYEKLKGSPEDNEQKQLFVEQHKHYLDEIIEQISEFSKRVILADANLDKVLSAYNKHRDKPIREQAENIIHLFTLTNLGAPAAFKYFDTTIDRKRYTSTKEVLDATLIHQSITGLYETRIDLSQLGGDGGGSSEAAAKGGLLGRDLLTKLKAQIQFSTEGPQVTWEDRPAMCLVLNLEEEYRLHEKPVPPSIDPSWLQLFPMVWAEKAGMGLANQVPPVVVELKSDASPVAVRQYPMSKEAREGIRPHIQRFLDLGILVPCQSPWNTPLLPVKKPGTNDYRPVQDLREVNKRVQDIHPTVPNPYNLLSSLPPSHTWYSVLDLKDAFFCLKLHPNSQPLFAFEWRDPEKGNTGQLTWTRLPQGFKNSPTLFNEALHRDLASFRALNPQVVMLQYVDDLLVAAPTYRDCKEGTRRLLQELSKLGYRVSAKKAQLCREEVTYLGYLLKGGKRWLTPARKATVMKIPTPTTPRQVREFLGKAGFCRLFIPGFASLAAPLYPLTRPKVPFTWTEAHQEAFGRIKEALLSAPALALPDLTKPFALYVDEKEGVARGVLTQTLGPWRRPVAYLSKKLDPVASGWPTCLKAIAAVALLLKDADKLTLGQNVLVIAPHNLESIVRQPPDRWMTNARMTHYQSLLLNERVSFAPPAILNPATLLPVESDDTPIHICSEILAEETGTRPDLRDQPLPGVPAWYTDGSSFIMDGRRQAGAAIVDNKRTVWASNLPEGTSAQKAELIALTQALRLAEGKSINIYTDSRYAFATAHVHGAIYKQRGWLTSAGKDIKNKEEILALLEAIHLPKRVAIIHCPGHQRGTDPVATGNRKADEAAKQAAQSTRILTETTKNAGKRTADGSEFEKRTADGSEFESPKKKAKVE

SEQ ID NO: 1710 - protein, 2125 aa, synthetic construct
MPAAKRVKLDGGDKKYSIGLDIGTNSVGWAVITDEYKVPSKKFKVLGNTDRHSIKKNLIGALLFDSGETAEATRLKRTARRRYTRRKNRICYLQEIFSNEMAKVDDSFFHRLEESFLVEEDKKHERHPIFGNIVDEVAYHEKYPTIYHLRKKLVDSTDKADLRLIYLALAHMIKFRGHFLIEGDLNPDNSDVDKLFIQLVQTYNQLFEENPINASGVDAKAILSARLSKSRRLENLIAQLPGEKKNGLFGNLIALSLGLTPNFKSNFDLAEDAKLQLSKDTYDDDLDNLLAQIGDQYADLFLAAKNLSDAILLSDILRVNTEITKAPLSASMIKRYDEHHQDLTLLKALVRQQLPEKYKEIFFDQSKNGYAGYIDGGASQEEFYKFIKPILEKMDGTEELLVKLNREDLLRKQRTFDNGSIPHQIHLGELHAILRRQEDFYPFLKDNREKIEKILTFRIPYYVGPLARGNSRFAWMTRKSEETITPWNFEEVVDKGASAQSFIERMTNFDKNLPNEKVLPKHSLLYEYFTVYNELTKVKYVTEGMRKPAFLSGEQKKAIVDLLFKTNRKVTVKQLKEDYFKKIECFDSVEISGVEDRFNASLGTYHDLLKIIKDKDFLDNEENEDILEDIVLTLTLFEDREMIEERLKTYAHLFDDKVMKQLKRRRYTGWGRLSRKLINGIRDKQSGKTILDFLKSDGFANRNFMQLIHDDSLTFKEDIQKAQVSGQGDSLHEHIANLAGSPAIKKGILQTVKVVDELVKVMGRHKPENIVIEMARENQTTQKGQKNSRERMKRIEEGIKELGSQILKEHPVENTQLQNEKLYLYYLQNGRDMYVDQELDINRLSDYDVDHIVPQSFLKDDSIDNKVLTRSDKARGKSDNVPSEEVVKKMKNYWRQLLNAKLITQRKFDNLTKAERGGLSELDKAGFIKRQLVETRQITKHVAQILDSRMNTKYDENDKLIREVKVITLKSKLVSDFRKDFQFYKVREINNYHHAHDAYLNAVVGTALIKKYPKLESEFVYGDYKVYDVRKMIAKSEQEIGKATAKYFFYSNIMNFFKTEITLANGEIRKRPLIETNGETGEIVWDKGRDFATVRKVLSMPQVNIVKKTEVQTGGFSKESILPKRNSDKLIARKKDWDPKKYGGFDSPTVAYSVLVVAKVEKGKSKKLKSVKELLGITIMERSSFEKNPIDFLEAKGYKEVKKDLIIKLPKYSLFELENGRKRMLASAGELQKGNELALPSKYVNFLYLASHYEKLKGSPEDNEQKQLFVEQHKHYLDEIIEQISEFSKRVILADANLDKVLSAYNKHRDKPIREQAENIIHLFTLTNLGAPAAFKYFDTTIDRKRYTSTKEVLDATLIHQSITGLYETRIDLSQLGGDGGGGGPAPGGSGGLLGRDLLTKLKAQIQFSTEGPQVTWEDRPAMCLVLNLEEEYRLHEKPVPPSIDPSWLQLFPMVWAEKAGMGLANQVPPVVVELKSDASPVAVRQYPMSKEAREGIRPHIQRFLDLGILVPCQSPWNTPLLPVKKPGTNDYRPVQDLREVNKRVQDIHPTVPNPYNLLSSLPPSHTWYSVLDLKDAFFCLKLHPNSQPLFAFEWRDPEKGNTGQLTWTRLPQGFKNSPTLFNEALHRDLASFRALNPQVVMLQYVDDLLVAAPTYRDCKEGTRRLLQELSKLGYRVSAKKAQLCREEVTYLGYLLKGGKRWLTPARKATVMKIPTPTTPRQVREFLGKAGFCRLFIPGFASLAAPLYPLTRPKVPFTWTEAHQEAFGRIKEALLSAPALALPDLTKPFALYVDEKEGVARGVLTQTLGPWRRPVAYLSKKLDPVASGWPTCLKAIAAVALLLKDADKLTLGQNVLVIAPHNLESIVRQPPDRWMTNARMTHYQSLLLNERVSFAPPAILNPATLLPVESDDTPIHICSEILAEETGTRPDLRDQPLPGVPAWYTDGSSFIMDGRRQAGAAIVDNKRTVWASNLPEGTSAQKAELIALTQALRLAEGKSINIYTDSRYAFATAHVHGAIYKQRGWLTSAGKDIKNKEEILALLEAIHLPKRVAIIHCPGHQRGTDPVATGNRKADEAAKQAAQSTRILTETTKNAGKRTADGSEFEKRTADGSEFESPKKKAKVE

SEQ ID NO: 1711 - protein, 2127 aa, synthetic construct
MPAAKRVKLDGGDKKYSIGLDIGTNSVGWAVITDEYKVPSKKFKVLGNTDRHSIKKNLIGALLFDSGETAEATRLKRTARRRYTRRKNRICYLQEIFSNEMAKVDDSFFHRLEESFLVEEDKKHERHPIFGNIVDEVAYHEKYPTIYHLRKKLVDSTDKADLRLIYLALAHMIKFRGHFLIEGDLNPDNSDVDKLFIQLVQTYNQLFEENPINASGVDAKAILSARLSKSRRLENLIAQLPGEKKNGLFGNLIALSLGLTPNFKSNFDLAEDAKLQLSKDTYDDDLDNLLAQIGDQYADLFLAAKNLSDAILLSDILRVNTEITKAPLSASMIKRYDEHHQDLTLLKALVRQQLPEKYKEIFFDQSKNGYAGYIDGGASQEEFYKFIKPILEKMDGTEELLVKLNREDLLRKQRTFDNGSIPHQIHLGELHAILRRQEDFYPFLKDNREKIEKILTFRIPYYVGPLARGNSRFAWMTRKSEETITPWNFEEVVDKGASAQSFIERMTNFDKNLPNEKVLPKHSLLYEYFTVYNELTKVKYVTEGMRKPAFLSGEQKKAIVDLLFKTNRKVTVKQLKEDYFKKIECFDSVEISGVEDRFNASLGTYHDLLKIIKDKDFLDNEENEDILEDIVLTLTLFEDREMIEERLKTYAHLFDDKVMKQLKRRRYTGWGRLSRKLINGIRDKQSGKTILDFLKSDGFANRNFMQLIHDDSLTFKEDIQKAQVSGQGDSLHEHIANLAGSPAIKKGILQTVKVVDELVKVMGRHKPENIVIEMARENQTTQKGQKNSRERMKRIEEGIKELGSQILKEHPVENTQLQNEKLYLYYLQNGRDMYVDQELDINRLSDYDVDHIVPQSFLKDDSIDNKVLTRSDKARGKSDNVPSEEVVKKMKNYWRQLLNAKLITQRKFDNLTKAERGGLSELDKAGFIKRQLVETRQITKHVAQILDSRMNTKYDENDKLIREVKVITLKSKLVSDFRKDFQFYKVREINNYHHAHDAYLNAVVGTALIKKYPKLESEFVYGDYKVYDVRKMIAKSEQEIGKATAKYFFYSNIMNFFKTEITLANGEIRKRPLIETNGETGEIVWDKGRDFATVRKVLSMPQVNIVKKTEVQTGGFSKESILPKRNSDKLIARKKDWDPKKYGGFDSPTVAYSVLVVAKVEKGKSKKLKSVKELLGITIMERSSFEKNPIDFLEAKGYKEVKKDLIIKLPKYSLFELENGRKRMLASAGELQKGNELALPSKYVNFLYLASHYEKLKGSPEDNEQKQLFVEQHKHYLDEIIEQISEFSKRVILADANLDKVLSAYNKHRDKPIREQAENIIHLFTLTNLGAPAAFKYFDTTIDRKRYTSTKEVLDATLIHQSITGLYETRIDLSQLGGDGGGSSEAAAKPAPGGLLGRDLLTKLKAQIQFSTEGPQVTWEDRPAMCLVLNLEEEYRLHEKPVPPSIDPSWLQLFPMVWAEKAGMGLANQVPPVVVELKSDASPVAVRQYPMSKEAREGIRPHIQRFLDLGILVPCQSPWNTPLLPVKKPGTNDYRPVQDLREVNKRVQDIHPTVPNPYNLLSSLPPSHTWYSVLDLKDAFFCLKLHPNSQPLFAFEWRDPEKGNTGQLTWTRLPQGFKNSPTLFNEALHRDLASFRALNPQVVMLQYVDDLLVAAPTYRDCKEGTRRLLQELSKLGYRVSAKKAQLCREEVTYLGYLLKGGKRWLTPARKATVMKIPTPTTPRQVREFLGKAGFCRLFIPGFASLAAPLYPLTRPKVPFTWTEAHQEAFGRIKEALLSAPALALPDLTKPFALYVDEKEGVARGVLTQTLGPWRRPVAYLSKKLDPVASGWPTCLKAIAAVALLLKDADKLTLGQNVLVIAPHNLESIVRQPPDRWMTNARMTHYQSLLLNERVSFAPPAILNPATLLPVESDDTPIHICSEILAEETGTRPDLRDQPLPGVPAWYTDGSSFIMDGRRQAGAAIVDNKRTVWASNLPEGTSAQKAELIALTQALRLAEGKSINIYTDSRYAFATAHVHGAIYKQRGWLTSAGKDIKNKEEILALLEAIHLPKRVAIIHCPGHQRGTDPVATGNRKADEAAKQAAQSTRILTETTKNAGKRTADGSEFEKRTADGSEFESPKKKAKVE

SEQ ID NO: 1712 - protein, 2131 aa, synthetic construct
MPAAKRVKLDGGDKKYSIGLDIGTNSVGWAVITDEYKVPSKKFKVLGNTDRHSIKKNLIGALLFDSGETAEATRLKRTARRRYTRRKNRICYLQEIFSNEMAKVDDSFFHRLEESFLVEEDKKHERHPIFGNIVDEVAYHEKYPTIYHLRKKLVDSTDKADLRLIYLALAHMIKFRGHFLIEGDLNPDNSDVDKLFIQLVQTYNQLFEENPINASGVDAKAILSARLSKSRRLENLIAQLPGEKKNGLFGNLIALSLGLTPNFKSNFDLAEDAKLQLSKDTYDDDLDNLLAQIGDQYADLFLAAKNLSDAILLSDILRVNTEITKAPLSASMIKRYDEHHQDLTLLKALVRQQLPEKYKEIFFDQSKNGYAGYIDGGASQEEFYKFIKPILEKMDGTEELLVKLNREDLLRKQRTFDNGSIPHQIHLGELHAILRRQEDFYPFLKDNREKIEKILTFRIPYYVGPLARGNSRFAWMTRKSEETITPWNFEEVVDKGASAQSFIERMTNFDKNLPNEKVLPKHSLLYEYFTVYNELTKVKYVTEGMRKPAFLSGEQKKAIVDLLFKTNRKVTVKQLKEDYFKKIECFDSVEISGVEDRFNASLGTYHDLLKIIKDKDFLDNEENEDILEDIVLTLTLFEDREMIEERLKTYAHLFDDKVMKQLKRRRYTGWGRLSRKLINGIRDKQSGKTILDFLKSDGFANRNFMQLIHDDSLTFKEDIQKAQVSGQGDSLHEHIANLAGSPAIKKGILQTVKVVDELVKVMGRHKPENIVIEMARENQTTQKGQKNSRERMKRIEEGIKELGSQILKEHPVENTQLQNEKLYLYYLQNGRDMYVDQELDINRLSDYDVDHIVPQSFLKDDSIDNKVLTRSDKARGKSDNVPSEEVVKKMKNYWRQLLNAKLITQRKFDNLTKAERGGLSELDKAGFIKRQLVETRQITKHVAQILDSRMNTKYDENDKLIREVKVITLKSKLVSDFRKDFQFYKVREINNYHHAHDAYLNAVVGTALIKKYPKLESEFVYGDYKVYDVRKMIAKSEQEIGKATAKYFFYSNIMNFFKTEITLANGEIRKRPLIETNGETGEIVWDKGRDFATVRKVLSMPQVNIVKKTEVQTGGFSKESILPKRNSDKLIARKKDWDPKKYGGFDSPTVAYSVLVVAKVEKGKSKKLKSVKELLGITIMERSSFEKNPIDFLEAKGYKEVKKDLIIKLPKYSLFELENGRKRMLASAGELQKGNELALPSKYVNFLYLASHYEKLKGSPEDNEQKQLFVEQHKHYLDEIIEQISEFSKRVILADANLDKVLSAYNKHRDKPIREQAENIIHLFTLTNLGAPAAFKYFDTTIDRKRYTSTKEVLDATLIHQSITGLYETRIDLSQLGGDGGEAAAKGGGGSEAAAKGGLLGRDLLTKLKAQIQFSTEGPQVTWEDRPAMCLVLNLEEEYRLHEKPVPPSIDPSWLQLFPMVWAEKAGMGLANQVPPVVVELKSDASPVAVRQYPMSKEAREGIRPHIQRFLDLGILVPCQSPWNTPLLPVKKPGTNDYRPVQDLREVNKRVQDIHPTVPNPYNLLSSLPPSHTWYSVLDLKDAFFCLKLHPNSQPLFAFEWRDPEKGNTGQLTWTRLPQGFKNSPTLFNEALHRDLASFRALNPQVVMLQYVDDLLVAAPTYRDCKEGTRRLLQELSKLGYRVSAKKAQLCREEVTYLGYLLKGGKRWLTPARKATVMKIPTPTTPRQVREFLGKAGFCRLFIPGFASLAAPLYPLTRPKVPFTWTEAHQEAFGRIKEALLSAPALALPDLTKPFALYVDEKEGVARGVLTQTLGPWRRPVAYLSKKLDPVASGWPTCLKAIAAVALLLKDADKLTLGQNVLVIAPHNLESIVRQPPDRWMTNARMTHYQSLLLNERVSFAPPAILNPATLLPVESDDTPIHICSEILAEETGTRPDLRDQPLPGVPAWYTDGSSFIMDGRRQAGAAIVDNKRTVWASNLPEGTSAQKAELIALTQALRLAEGKSINIYTDSRYAFATAHVHGAIYKQRGWLTSAGKDIKNKEEILALLEAIHLPKRVAIIHCPGHQRGTDPVATGNRKADEAAKQAAQSTRILTETTKNAGKRTADGSEFEKRTADGSEFESPKKKAKVE

SEQ ID NO: 1713 - protein, 2127 aa, synthetic construct
MPAAKRVKLDGGDKKYSIGLDIGTNSVGWAVITDEYKVPSKKFKVLGNTDRHSIKKNLIGALLFDSGETAEATRLKRTARRRYTRRKNRICYLQEIFSNEMAKVDDSFFHRLEESFLVEEDKKHERHPIFGNIVDEVAYHEKYPTIYHLRKKLVDSTDKADLRLIYLALAHMIKFRGHFLIEGDLNPDNSDVDKLFIQLVQTYNQLFEENPINASGVDAKAILSARLSKSRRLENLIAQLPGEKKNGLFGNLIALSLGLTPNFKSNFDLAEDAKLQLSKDTYDDDLDNLLAQIGDQYADLFLAAKNLSDAILLSDILRVNTEITKAPLSASMIKRYDEHHQDLTLLKALVRQQLPEKYKEIFFDQSKNGYAGYIDGGASQEEFYKFIKPILEKMDGTEELLVKLNREDLLRKQRTFDNGSIPHQIHLGELHAILRRQEDFYPFLKDNREKIEKILTFRIPYYVGPLARGNSRFAWMTRKSEETITPWNFEEVVDKGASAQSFIERMTNFDKNLPNEKVLPKHSLLYEYFTVYNELTKVKYVTEGMRKPAFLSGEQKKAIVDLLFKTNRKVTVKQLKEDYFKKIECFDSVEISGVEDRFNASLGTYHDLLKIIKDKDFLDNEENEDILEDIVLTLTLFEDREMIEERLKTYAHLFDDKVMKQLKRRRYTGWGRLSRKLINGIRDKQSGKTILDFLKSDGFANRNFMQLIHDDSLTFKEDIQKAQVSGQGDSLHEHIANLAGSPAIKKGILQTVKVVDELVKVMGRHKPENIVIEMARENQTTQKGQKNSRERMKRIEEGIKELGSQILKEHPVENTQLQNEKLYLYYLQNGRDMYVDQELDINRLSDYDVDHIVPQSFLKDDSIDNKVLTRSDKARGKSDNVPSEEVVKKMKNYWRQLLNAKLITQRKFDNLTKAERGGLSELDKAGFIKRQLVETRQITKHVAQILDSRMNTKYDENDKLIREVKVITLKSKLVSDFRKDFQFYKVREINNYHHAHDAYLNAVVGTALIKKYPKLESEFVYGDYKVYDVRKMIAKSEQEIGKATAKYFFYSNIMNFFKTEITLANGEIRKRPLIETNGETGEIVWDKGRDFATVRKVLSMPQVNIVKKTEVQTGGFSKESILPKRNSDKLIARKKDWDPKKYGGFDSPTVAYSVLVVAKVEKGKSKKLKSVKELLGITIMERSSFEKNPIDFLEAKGYKEVKKDLIIKLPKYSLFELENGRKRMLASAGELQKGNELALPSKYVNFLYLASHYEKLKGSPEDNEQKQLFVEQHKHYLDEIIEQISEFSKRVILADANLDKVLSAYNKHRDKPIREQAENIIHLFTLTNLGAPAAFKYFDTTIDRKRYTSTKEVLDATLIHQSITGLYETRIDLSQLGGDGGGSSGGSEAAAKGGLLGRDLLTKLKAQIQFSTEGPQVTWEDRPAMCLVLNLEEEYRLHEKPVPPSIDPSWLQLFPMVWAEKAGMGLANQVPPVVVELKSDASPVAVRQYPMSKEAREGIRPHIQRFLDLGILVPCQSPWNTPLLPVKKPGTNDYRPVQDLREVNKRVQDIHPTVPNPYNLLSSLPPSHTWYSVLDLKDAFFCLKLHPNSQPLFAFEWRDPEKGNTGQLTWTRLPQGFKNSPTLFNEALHRDLASFRALNPQVVMLQYVDDLLVAAPTYRDCKEGTRRLLQELSKLGYRVSAKKAQLCREEVTYLGYLLKGGKRWLTPARKATVMKIPTPTTPRQVREFLGKAGFCRLFIPGFASLAAPLYPLTRPKVPFTWTEAHQEAFGRIKEALLSAPALALPDLTKPFALYVDEKEGVARGVLTQTLGPWRRPVAYLSKKLDPVASGWPTCLKAIAAVALLLKDADKLTLGQNVLVIAPHNLESIVRQPPDRWMTNARMTHYQSLLLNERVSFAPPAILNPATLLPVESDDTPIHICSEILAEETGTRPDLRDQPLPGVPAWYTDGSSFIMDGRRQAGAAIVDNKRTVWASNLPEGTSAQKAELIALTQALRLAEGKSINIYTDSRYAFATAHVHGAIYKQRGWLTSAGKDIKNKEEILALLEAIHLPKRVAIIHCPGHQRGTDPVATGNRKADEAAKQAAQSTRILTETTKNAGKRTADGSEFEKRTADGSEFESPKKKAKVE

SEQ ID NO: 1714 - protein, 2125 aa, synthetic construct
MPAAKRVKLDGGDKKYSIGLDIGTNSVGWAVITDEYKVPSKKFKVLGNTDRHSIKKNLIGALLFDSGETAEATRLKRTARRRYTRRKNRICYLQEIFSNEMAKVDDSFFHRLEESFLVEEDKKHERHPIFGNIVDEVAYHEKYPTIYHLRKKLVDSTDKADLRLIYLALAHMIKFRGHFLIEGDLNPDNSDVDKLFIQLVQTYNQLFEENPINASGVDAKAILSARLSKSRRLENLIAQLPGEKKNGLFGNLIALSLGLTPNFKSNFDLAEDAKLQLSKDTYDDDLDNLLAQIGDQYADLFLAAKNLSDAILLSDILRVNTEITKAPLSASMIKRYDEHHQDLTLLKALVRQQLPEKYKEIFFDQSKNGYAGYIDGGASQEEFYKFIKPILEKMDGTEELLVKLNREDLLRKQRTFDNGSIPHQIHLGELHAILRRQEDFYPFLKDNREKIEKILTFRIPYYVGPLARGNSRFAWMTRKSEETITPWNFEEVVDKGASAQSFIERMTNFDKNLPNEKVLPKHSLLYEYFTVYNELTKVKYVTEGMRKPAFLSGEQKKAIVDLLFKTNRKVTVKQLKEDYFKKIECFDSVEISGVEDRFNASLGTYHDLLKIIKDKDFLDNEENEDILEDIVLTLTLFEDREMIEERLKTYAHLFDDKVMKQLKRRRYTGWGRLSRKLINGIRDKQSGKTILDFLKSDGFANRNFMQLIHDDSLTFKEDIQKAQVSGQGDSLHEHIANLAGSPAIKKGILQTVKVVDELVKVMGRHKPENIVIEMARENQTTQKGQKNSRERMKRIEEGIKELGSQILKEHPVENTQLQNEKLYLYYLQNGRDMYVDQELDINRLSDYDVDHIVPQSFLKDDSIDNKVLTRSDKARGKSDNVPSEEVVKKMKNYWRQLLNAKLITQRKFDNLTKAERGGLSELDKAGFIKRQLVETRQITKHVAQILDSRMNTKYDENDKLIREVKVITLKSKLVSDFRKDFQFYKVREINNYHHAHDAYLNAVVGTALIKKYPKLESEFVYGDYKVYDVRKMIAKSEQEIGKATAKYFFYSNIMNFFKTEITLANGEIRKRPLIETNGETGEIVWDKGRDFATVRKVLSMPQVNIVKKTEVQTGGFSKESILPKRNSDKLIARKKDWDPKKYGGFDSPTVAYSVLVVAKVEKGKSKKLKSVKELLGITIMERSSFEKNPIDFLEAKGYKEVKKDLIIKLPKYSLFELENGRKRMLASAGELQKGNELALPSKYVNFLYLASHYEKLKGSPEDNEQKQLFVEQHKHYLDEIIEQISEFSKRVILADANLDKVLSAYNKHRDKPIREQAENIIHLFTLTNLGAPAAFKYFDTTIDRKRYTSTKEVLDATLIHQSITGLYETRIDLSQLGGDGGGSSGSSGSSGGLLGRDLLTKLKAQIQFSTEGPQVTWEDRPAMCLVLNLEEEYRLHEKPVPPSIDPSWLQLFPMVWAEKAGMGLANQVPPVVVELKSDASPVAVRQYPMSKEAREGIRPHIQRFLDLGILVPCQSPWNTPLLPVKKPGTNDYRPVQDLREVNKRVQDIHPTVPNPYNLLSSLPPSHTWYSVLDLKDAFFCLKLHPNSQPLFAFEWRDPEKGNTGQLTWTRLPQGFKNSPTLFNEALHRDLASFRALNPQVVMLQYVDDLLVAAPTYRDCKEGTRRLLQELSKLGYRVSAKKAQLCREEVTYLGYLLKGGKRWLTPARKATVMKIPTPTTPRQVREFLGKAGFCRLFIPGFASLAAPLYPLTRPKVPFTWTEAHQEAFGRIKEALLSAPALALPDLTKPFALYVDEKEGVARGVLTQTLGPWRRPVAYLSKKLDPVASGWPTCLKAIAAVALLLKDADKLTLGQNVLVIAPHNLESIVRQPPDRWMTNARMTHYQSLLLNERVSFAPPAILNPATLLPVESDDTPIHICSEILAEETGTRPDLRDQPLPGVPAWYTDGSSFIMDGRRQAGAAIVDNKRTVWASNLPEGTSAQKAELIALTQALRLAEGKSINIYTDSRYAFATAHVHGAIYKQRGWLTSAGKDIKNKEEILALLEAIHLPKRVAIIHCPGHQRGTDPVATGNRKADEAAKQAAQSTRILTETTKNAGKRTADGSEFEKRTADGSEFESPKKKAKVE

SEQ ID NO: 1715 - protein, 2127 aa, synthetic construct
MPAAKRVKLDGGDKKYSIGLDIGTNSVGWAVITDEYKVPSKKFKVLGNTDRHSIKKNLIGALLFDSGETAEATRLKRTARRRYTRRKNRICYLQEIFSNEMAKVDDSFFHRLEESFLVEEDKKHERHPIFGNIVDEVAYHEKYPTIYHLRKKLVDSTDKADLRLIYLALAHMIKFRGHFLIEGDLNPDNSDVDKLFIQLVQTYNQLFEENPINASGVDAKAILSARLSKSRRLENLIAQLPGEKKNGLFGNLIALSLGLTPNFKSNFDLAEDAKLQLSKDTYDDDLDNLLAQIGDQYADLFLAAKNLSDAILLSDILRVNTEITKAPLSASMIKRYDEHHQDLTLLKALVRQQLPEKYKEIFFDQSKNGYAGYIDGGASQEEFYKFIKPILEKMDGTEELLVKLNREDLLRKQRTFDNGSIPHQIHLGELHAILRRQEDFYPFLKDNREKIEKILTFRIPYYVGPLARGNSRFAWMTRKSEETITPWNFEEVVDKGASAQSFIERMTNFDKNLPNEKVLPKHSLLYEYFTVYNELTKVKYVTEGMRKPAFLSGEQKKAIVDLLFKTNRKVTVKQLKEDYFKKIECFDSVEISGVEDRFNASLGTYHDLLKIIKDKDFLDNEENEDILEDIVLTLTLFEDREMIEERLKTYAHLFDDKVMKQLKRRRYTGWGRLSRKLINGIRDKQSGKTILDFLKSDGFANRNFMQLIHDDSLTFKEDIQKAQVSGQGDSLHEHIANLAGSPAIKKGILQTVKVVDELVKVMGRHKPENIVIEMARENQTTQKGQKNSRERMKRIEEGIKELGSQILKEHPVENTQLQNEKLYLYYLQNGRDMYVDQELDINRLSDYDVDHIVPQSFLKDDSIDNKVLTRSDKARGKSDNVPSEEVVKKMKNYWRQLLNAKLITQRKFDNLTKAERGGLSELDKAGFIKRQLVETRQITKHVAQILDSRMNTKYDENDKLIREVKVITLKSKLVSDFRKDFQFYKVREINNYHHAHDAYLNAVVGTALIKKYPKLESEFVYGDYKVYDVRKMIAKSEQEIGKATAKYFFYSNIMNFFKTEITLANGEIRKRPLIETNGETGEIVWDKGRDFATVRKVLSMPQVNIVKKTEVQTGGFSKESILPKRNSDKLIARKKDWDPKKYGGFDSPTVAYSVLVVAKVEKGKSKKLKSVKELLGITIMERSSFEKNPIDFLEAKGYKEVKKDLIIKLPKYSLFELENGRKRMLASAGELQKGNELALPSKYVNFLYLASHYEKLKGSPEDNEQKQLFVEQHKHYLDEIIEQISEFSKRVILADANLDKVLSAYNKHRDKPIREQAENIIHLFTLTNLGAPAAFKYFDTTIDRKRYTSTKEVLDATLIHQSITGLYETRIDLSQLGGDGGEAAAKGGSGSSGGLLGRDLLTKLKAQIQFSTEGPQVTWEDRPAMCLVLNLEEEYRLHEKPVPPSIDPSWLQLFPMVWAEKAGMGLANQVPPVVVELKSDASPVAVRQYPMSKEAREGIRPHIQRFLDLGILVPCQSPWNTPLLPVKKPGTNDYRPVQDLREVNKRVQDIHPTVPNPYNLLSSLPPSHTWYSVLDLKDAFFCLKLHPNSQPLFAFEWRDPEKGNTGQLTWTRLPQGFKNSPTLFNEALHRDLASFRALNPQVVMLQYVDDLLVAAPTYRDCKEGTRRLLQELSKLGYRVSAKKAQLCREEVTYLGYLLKGGKRWLTPARKATVMKIPTPTTPRQVREFLGKAGFCRLFIPGFASLAAPLYPLTRPKVPFTWTEAHQEAFGRIKEALLSAPALALPDLTKPFALYVDEKEGVARGVLTQTLGPWRRPVAYLSKKLDPVASGWPTCLKAIAAVALLLKDADKLTLGQNVLVIAPHNLESIVRQPPDRWMTNARMTHYQSLLLNERVSFAPPAILNPATLLPVESDDTPIHICSEILAEETGTRPDLRDQPLPGVPAWYTDGSSFIMDGRRQAGAAIVDNKRTVWASNLPEGTSAQKAELIALTQALRLAEGKSINIYTDSRYAFATAHVHGAIYKQRGWLTSAGKDIKNKEEILALLEAIHLPKRVAIIHCPGHQRGTDPVATGNRKADEAAKQAAQSTRILTETTKNAGKRTADGSEFEKRTADGSEFESPKKKAKVE

SEQ ID NO: 1716 - protein, 2127 aa, synthetic construct
MPAAKRVKLDGGDKKYSIGLDIGTNSVGWAVITDEYKVPSKKFKVLGNTDRHSIKKNLIGALLFDSGETAEATRLKRTARRRYTRRKNRICYLQEIFSNEMAKVDDSFFHRLEESFLVEEDKKHERHPIFGNIVDEVAYHEKYPTIYHLRKKLVDSTDKADLRLIYLALAHMIKFRGHFLIEGDLNPDNSDVDKLFIQLVQTYNQLFEENPINASGVDAKAILSARLSKSRRLENLIAQLPGEKKNGLFGNLIALSLGLTPNFKSNFDLAEDAKLQLSKDTYDDDLDNLLAQIGDQYADLFLAAKNLSDAILLSDILRVNTEITKAPLSASMIKRYDEHHQDLTLLKALVRQQLPEKYKEIFFDQSKNGYAGYIDGGASQEEFYKFIKPILEKMDGTEELLVKLNREDLLRKQRTFDNGSIPHQIHLGELHAILRRQEDFYPFLKDNREKIEKILTFRIPYYVGPLARGNSRFAWMTRKSEETITPWNFEEVVDKGASAQSFIERMTNFDKNLPNEKVLPKHSLLYEYFTVYNELTKVKYVTEGMRKPAFLSGEQKKAIVDLLFKTNRKVTVKQLKEDYFKKIECFDSVEISGVEDRFNASLGTYHDLLKIIKDKDFLDNEENEDILEDIVLTLTLFEDREMIEERLKTYAHLFDDKVMKQLKRRRYTGWGRLSRKLINGIRDKQSGKTILDFLKSDGFANRNFMQLIHDDSLTFKEDIQKAQVSGQGDSLHEHIANLAGSPAIKKGILQTVKVVDELVKVMGRHKPENIVIEMARENQTTQKGQKNSRERMKRIEEGIKELGSQILKEHPVENTQLQNEKLYLYYLQNGRDMYVDQELDINRLSDYDVDHIVPQSFLKDDSIDNKVLTRSDKARGKSDNVPSEEVVKKMKNYWRQLLNAKLITQRKFDNLTKAERGGLSELDKAGFIKRQLVETRQITKHVAQILDSRMNTKYDENDKLIREVKVITLKSKLVSDFRKDFQFYKVREINNYHHAHDAYLNAVVGTALIKKYPKLESEFVYGDYKVYDVRKMIAKSEQEIGKATAKYFFYSNIMNFFKTEITLANGEIRKRPLIETNGETGEIVWDKGRDFATVRKVLSMPQVNIVKKTEVQTGGFSKESILPKRNSDKLIARKKDWDPKKYGGFDSPTVAYSVLVVAKVEKGKSKKLKSVKELLGITIMERSSFEKNPIDFLEAKGYKEVKKDLIIKLPKYSLFELENGRKRMLASAGELQKGNELALPSKYVNFLYLASHYEKLKGSPEDNEQKQLFVEQHKHYLDEIIEQISEFSKRVILADANLDKVLSAYNKHRDKPIREQAENIIHLFTLTNLGAPAAFKYFDTTIDRKRYTSTKEVLDATLIHQSITGLYETRIDLSQLGGDGGGGSGSSEAAAKGGLLGRDLLTKLKAQIQFSTEGPQVTWEDRPAMCLVLNLEEEYRLHEKPVPPSIDPSWLQLFPMVWAEKAGMGLANQVPPVVVELKSDASPVAVRQYPMSKEAREGIRPHIQRFLDLGILVPCQSPWNTPLLPVKKPGTNDYRPVQDLREVNKRVQDIHPTVPNPYNLLSSLPPSHTWYSVLDLKDAFFCLKLHPNSQPLFAFEWRDPEKGNTGQLTWTRLPQGFKNSPTLFNEALHRDLASFRALNPQVVMLQYVDDLLVAAPTYRDCKEGTRRLLQELSKLGYRVSAKKAQLCREEVTYLGYLLKGGKRWLTPARKATVMKIPTPTTPRQVREFLGKAGFCRLFIPGFASLAAPLYPLTRPKVPFTWTEAHQEAFGRIKEALLSAPALALPDLTKPFALYVDEKEGVARGVLTQTLGPWRRPVAYLSKKLDPVASGWPTCLKAIAAVALLLKDADKLTLGQNVLVIAPHNLESIVRQPPDRWMTNARMTHYQSLLLNERVSFAPPAILNPATLLPVESDDTPIHICSEILAEETGTRPDLRDQPLPGVPAWYTDGSSFIMDGRRQAGAAIVDNKRTVWASNLPEGTSAQKAELIALTQALRLAEGKSINIYTDSRYAFATAHVHGAIYKQRGWLTSAGKDIKNKEEILALLEAIHLPKRVAIIHCPGHQRGTDPVATGNRKADEAAKQAAQSTRILTETTKNAGKRTADGSEFEKRTADGSEFESPKKKAKVE

SEQ ID NO: 1717 - protein, 2127 aa, synthetic construct
MPAAKRVKLDGGDKKYSIGLDIGTNSVGWAVITDEYKVPSKKFKVLGNTDRHSIKKNLIGALLFDSGETAEATRLKRTARRRYTRRKNRICYLQEIFSNEMAKVDDSFFHRLEESFLVEEDKKHERHPIFGNIVDEVAYHEKYPTIYHLRKKLVDSTDKADLRLIYLALAHMIKFRGHFLIEGDLNPDNSDVDKLFIQLVQTYNQLFEENPINASGVDAKAILSARLSKSRRLENLIAQLPGEKKNGLFGNLIALSLGLTPNFKSNFDLAEDAKLQLSKDTYDDDLDNLLAQIGDQYADLFLAAKNLSDAILLSDILRVNTEITKAPLSASMIKRYDEHHQDLTLLKALVRQQLPEKYKEIFFDQSKNGYAGYIDGGASQEEFYKFIKPILEKMDGTEELLVKLNREDLLRKQRTFDNGSIPHQIHLGELHAILRRQEDFYPFLKDNREKIEKILTFRIPYYVGPLARGNSRFAWMTRKSEETITPWNFEEVVDKGASAQSFIERMTNFDKNLPNEKVLPKHSLLYEYFTVYNELTKVKYVTEGMRKPAFLSGEQKKAIVDLLFKTNRKVTVKQLKEDYFKKIECFDSVEISGVEDRFNASLGTYHDLLKIIKDKDFLDNEENEDILEDIVLTLTLFEDREMIEERLKTYAHLFDDKVMKQLKRRRYTGWGRLSRKLINGIRDKQSGKTILDFLKSDGFANRNFMQLIHDDSLTFKEDIQKAQVSGQGDSLHEHIANLAGSPAIKKGILQTVKVVDELVKVMGRHKPENIVIEMARENQTTQKGQKNSRERMKRIEEGIKELGSQILKEHPVENTQLQNEKLYLYYLQNGRDMYVDQELDINRLSDYDVDHIVPQSFLKDDSIDNKVLTRSDKARGKSDNVPSEEVVKKMKNYWRQLLNAKLITQRKFDNLTKAERGGLSELDKAGFIKRQLVETRQITKHVAQILDSRMNTKYDENDKLIREVKVITLKSKLVSDFRKDFQFYKVREINNYHHAHDAYLNAVVGTALIKKYPKLESEFVYGDYKVYDVRKMIAKSEQEIGKATAKYFFYSNIMNFFKTEITLANGEIRKRPLIETNGETGEIVWDKGRDFATVRKVLSMPQVNIVKKTEVQTGGFSKESILPKRNSDKLIARKKDWDPKKYGGFDSPTVAYSVLVVAKVEKGKSKKLKSVKELLGITIMERSSFEKNPIDFLEAKGYKEVKKDLIIKLPKYSLFELENGRKRMLASAGELQKGNELALPSKYVNFLYLASHYEKLKGSPEDNEQKQLFVEQHKHYLDEIIEQISEFSKRVILADANLDKVLSAYNKHRDKPIREQAENIIHLFTLTNLGAPAAFKYFDTTIDRKRYTSTKEVLDATLIHQSITGLYETRIDLSQLGGDGGGGSEAAAKGGGGGLLGRDLLTKLKAQIQFSTEGPQVTWEDRPAMCLVLNLEEEYRLHEKPVPPSIDPSWLQLFPMVWAEKAGMGLANQVPPVVVELKSDASPVAVRQYPMSKEAREGIRPHIQRFLDLGILVPCQSPWNTPLLPVKKPGTNDYRPVQDLREVNKRVQDIHPTVPNPYNLLSSLPPSHTWYSVLDLKDAFFCLKLHPNSQPLFAFEWRDPEKGNTGQLTWTRLPQGFKNSPTLFNEALHRDLASFRALNPQVVMLQYVDDLLVAAPTYRDCKEGTRRLLQELSKLGYRVSAKKAQLCREEVTYLGYLLKGGKRWLTPARKATVMKIPTPTTPRQVREFLGKAGFCRLFIPGFASLAAPLYPLTRPKVPFTWTEAHQEAFGRIKEALLSAPALALPDLTKPFALYVDEKEGVARGVLTQTLGPWRRPVAYLSKKLDPVASGWPTCLKAIAAVALLLKDADKLTLGQNVLVIAPHNLESIVRQPPDRWMTNARMTHYQSLLLNERVSFAPPAILNPATLLPVESDDTPIHICSEILAEETGTRPDLRDQPLPGVPAWYTDGSSFIMDGRRQAGAAIVDNKRTVWASNLPEGTSAQKAELIALTQALRLAEGKSINIYTDSRYAFATAHVHGAIYKQRGWLTSAGKDIKNKEEILALLEAIHLPKRVAIIHCPGHQRGTDPVATGNRKADEAAKQAAQSTRILTETTKNAGKRTADGSEFEKRTADGSEFESPKKKAKVE

SEQ ID NO: 1718 - protein, 2127 aa, synthetic construct
MPAAKRVKLDGGDKKYSIGLDIGTNSVGWAVITDEYKVPSKKFKVLGNTDRHSIKKNLIGALLFDSGETAEATRLKRTARRRYTRRKNRICYLQEIFSNEMAKVDDSFFHRLEESFLVEEDKKHERHPIFGNIVDEVAYHEKYPTIYHLRKKLVDSTDKADLRLIYLALAHMIKFRGHFLIEGDLNPDNSDVDKLFIQLVQTYNQLFEENPINASGVDAKAILSARLSKSRRLENLIAQLPGEKKNGLFGNLIALSLGLTPNFKSNFDLAEDAKLQLSKDTYDDDLDNLLAQIGDQYADLFLAAKNLSDAILLSDILRVNTEITKAPLSASMIKRYDEHHQDLTLLKALVRQQLPEKYKEIFFDQSKNGYAGYIDGGASQEEFYKFIKPILEKMDGTEELLVKLNREDLLRKQRTFDNGSIPHQIHLGELHAILRRQEDFYPFLKDNREKIEKILTFRIPYYVGPLARGNSRFAWMTRKSEETITPWNFEEVVDKGASAQSFIERMTNFDKNLPNEKVLPKHSLLYEYFTVYNELTKVKYVTEGMRKPAFLSGEQKKAIVDLLFKTNRKVTVKQLKEDYFKKIECFDSVEISGVEDRFNASLGTYHDLLKIIKDKDFLDNEENEDILEDIVLTLTLFEDREMIEERLKTYAHLFDDKVMKQLKRRRYTGWGRLSRKLINGIRDKQSGKTILDFLKSDGFANRNFMQLIHDDSLTFKEDIQKAQVSGQGDSLHEHIANLAGSPAIKKGILQTVKVVDELVKVMGRHKPENIVIEMARENQTTQKGQKNSRERMKRIEEGIKELGSQILKEHPVENTQLQNEKLYLYYLQNGRDMYVDQELDINRLSDYDVDHIVPQSFLKDDSIDNKVLTRSDKARGKSDNVPSEEVVKKMKNYWRQLLNAKLITQRKFDNLTKAERGGLSELDKAGFIKRQLVETRQITKHVAQILDSRMNTKYDENDKLIREVKVITLKSKLVSDFRKDFQFYKVREINNYHHAHDAYLNAVVGTALIKKYPKLESEFVYGDYKVYDVRKMIAKSEQEIGKATAKYFFYSNIMNFFKTEITLANGEIRKRPLIETNGETGEIVWDKGRDFATVRKVLSMPQVNIVKKTEVQTGGFSKESILPKRNSDKLIARKKDWDPKKYGGFDSPTVAYSVLVVAKVEKGKSKKLKSVKELLGITIMERSSFEKNPIDFLEAKGYKEVKKDLIIKLPKYSLFELENGRKRMLASAGELQKGNELALPSKYVNFLYLASHYEKLKGSPEDNEQKQLFVEQHKHYLDEIIEQISEFSKRVILADANLDKVLSAYNKHRDKPIREQAENIIHLFTLTNLGAPAAFKYFDTTIDRKRYTSTKEVLDATLIHQSITGLYETRIDLSQLGGDGGPAPGGSEAAAKGGLLGRDLLTKLKAQIQFSTEGPQVTWEDRPAMCLVLNLEEEYRLHEKPVPPSIDPSWLQLFPMVWAEKAGMGLANQVPPVVVELKSDASPVAVRQYPMSKEAREGIRPHIQRFLDLGILVPCQSPWNTPLLPVKKPGTNDYRPVQDLREVNKRVQDIHPTVPNPYNLLSSLPPSHTWYSVLDLKDAFFCLKLHPNSQPLFAFEWRDPEKGNTGQLTWTRLPQGFKNSPTLFNEALHRDLASFRALNPQVVMLQYVDDLLVAAPTYRDCKEGTRRLLQELSKLGYRVSAKKAQLCREEVTYLGYLLKGGKRWLTPARKATVMKIPTPTTPRQVREFLGKAGFCRLFIPGFASLAAPLYPLTRPKVPFTWTEAHQEAFGRIKEALLSAPALALPDLTKPFALYVDEKEGVARGVLTQTLGPWRRPVAYLSKKLDPVASGWPTCLKAIAAVALLLKDADKLTLGQNVLVIAPHNLESIVRQPPDRWMTNARMTHYQSLLLNERVSFAPPAILNPATLLPVESDDTPIHICSEILAEETGTRPDLRDQPLPGVPAWYTDGSSFIMDGRRQAGAAIVDNKRTVWASNLPEGTSAQKAELIALTQALRLAEGKSINIYTDSRYAFATAHVHGAIYKQRGWLTSAGKDIKNKEEILALLEAIHLPKRVAIIHCPGHQRGTDPVATGNRKADEAAKQAAQSTRILTETTKNAGKRTADGSEFEKRTADGSEFESPKKKAKVE

SEQ ID NO: 1719 - protein, 2125 aa, synthetic construct
MPAAKRVKLDGGDKKYSIGLDIGTNSVGWAVITDEYKVPSKKFKVLGNTDRHSIKKNLIGALLFDSGETAEATRLKRTARRRYTRRKNRICYLQEIFSNEMAKVDDSFFHRLEESFLVEEDKKHERHPIFGNIVDEVAYHEKYPTIYHLRKKLVDSTDKADLRLIYLALAHMIKFRGHFLIEGDLNPDNSDVDKLFIQLVQTYNQLFEENPINASGVDAKAILSARLSKSRRLENLIAQLPGEKKNGLFGNLIALSLGLTPNFKSNFDLAEDAKLQLSKDTYDDDLDNLLAQIGDQYADLFLAAKNLSDAILLSDILRVNTEITKAPLSASMIKRYDEHHQDLTLLKALVRQQLPEKYKEIFFDQSKNGYAGYIDGGASQEEFYKFIKPILEKMDGTEELLVKLNREDLLRKQRTFDNGSIPHQIHLGELHAILRRQEDFYPFLKDNREKIEKILTFRIPYYVGPLARGNSRFAWMTRKSEETITPWNFEEVVDKGASAQSFIERMTNFDKNLPNEKVLPKHSLLYEYFTVYNELTKVKYVTEGMRKPAFLSGEQKKAIVDLLFKTNRKVTVKQLKEDYFKKIECFDSVEISGVEDRFNASLGTYHDLLKIIKDKDFLDNEENEDILEDIVLTLTLFEDREMIEERLKTYAHLFDDKVMKQLKRRRYTGWGRLSRKLINGIRDKQSGKTILDFLKSDGFANRNFMQLIHDDSLTFKEDIQKAQVSGQGDSLHEHIANLAGSPAIKKGILQTVKVVDELVKVMGRHKPENIVIEMARENQTTQKGQKNSRERMKRIEEGIKELGSQILKEHPVENTQLQNEKLYLYYLQNGRDMYVDQELDINRLSDYDVDHIVPQSFLKDDSIDNKVLTRSDKARGKSDNVPSEEVVKKMKNYWRQLLNAKLITQRKFDNLTKAERGGLSELDKAGFIKRQLVETRQITKHVAQILDSRMNTKYDENDKLIREVKVITLKSKLVSDFRKDFQFYKVREINNYHHAHDAYLNAVVGTALIKKYPKLESEFVYGDYKVYDVRKMIAKSEQEIGKATAKYFFYSNIMNFFKTEITLANGEIRKRPLIETNGETGEIVWDKGRDFATVRKVLSMPQVNIVKKTEVQTGGFSKESILPKRNSDKLIARKKDWDPKKYGGFDSPTVAYSVLVVAKVEKGKSKKLKSVKELLGITIMERSSFEKNPIDFLEAKGYKEVKKDLIIKLPKYSLFELENGRKRMLASAGELQKGNELALPSKYVNFLYLASHYEKLKGSPEDNEQKQLFVEQHKHYLDEIIEQISEFSKRVILADANLDKVLSAYNKHRDKPIREQAENIIHLFTLTNLGAPAAFKYFDTTIDRKRYTSTKEVLDATLIHQSITGLYETRIDLSQLGGDGGPAPGSSGGGGGLLGRDLLTKLKAQIQFSTEGPQVTWEDRPAMCLVLNLEEEYRLHEKPVPPSIDPSWLQLFPMVWAEKAGMGLANQVPPVVVELKSDASPVAVRQYPMSKEAREGIRPHIQRFLDLGILVPCQSPWNTPLLPVKKPGTNDYRPVQDLREVNKRVQDIHPTVPNPYNLLSSLPPSHTWYSVLDLKDAFFCLKLHPNSQPLFAFEWRDPEKGNTGQLTWTRLPQGFKNSPTLFNEALHRDLASFRALNPQVVMLQYVDDLLVAAPTYRDCKEGTRRLLQELSKLGYRVSAKKAQLCREEVTYLGYLLKGGKRWLTPARKATVMKIPTPTTPRQVREFLGKAGFCRLFIPGFASLAAPLYPLTRPKVPFTWTEAHQEAFGRIKEALLSAPALALPDLTKPFALYVDEKEGVARGVLTQTLGPWRRPVAYLSKKLDPVASGWPTCLKAIAAVALLLKDADKLTLGQNVLVIAPHNLESIVRQPPDRWMTNARMTHYQSLLLNERVSFAPPAILNPATLLPVESDDTPIHICSEILAEETGTRPDLRDQPLPGVPAWYTDGSSFIMDGRRQAGAAIVDNKRTVWASNLPEGTSAQKAELIALTQALRLAEGKSINIYTDSRYAFATAHVHGAIYKQRGWLTSAGKDIKNKEEILALLEAIHLPKRVAIIHCPGHQRGTDPVATGNRKADEAAKQAAQSTRILTETTKNAGKRTADGSEFEKRTADGSEFESPKKKAKVE

SEQ ID NO: 1720 - protein, 2126 aa, synthetic construct
MPAAKRVKLDGGDKKYSIGLDIGTNSVGWAVITDEYKVPSKKFKVLGNTDRHSIKKNLIGALLFDSGETAEATRLKRTARRRYTRRKNRICYLQEIFSNEMAKVDDSFFHRLEESFLVEEDKKHERHPIFGNIVDEVAYHEKYPTIYHLRKKLVDSTDKADLRLIYLALAHMIKFRGHFLIEGDLNPDNSDVDKLFIQLVQTYNQLFEENPINASGVDAKAILSARLSKSRRLENLIAQLPGEKKNGLFGNLIALSLGLTPNFKSNFDLAEDAKLQLSKDTYDDDLDNLLAQIGDQYADLFLAAKNLSDAILLSDILRVNTEITKAPLSASMIKRYDEHHQDLTLLKALVRQQLPEKYKEIFFDQSKNGYAGYIDGGASQEEFYKFIKPILEKMDGTEELLVKLNREDLLRKQRTFDNGSIPHQIHLGELHAILRRQEDFYPFLKDNREKIEKILTFRIPYYVGPLARGNSRFAWMTRKSEETITPWNFEEVVDKGASAQSFIERMTNFDKNLPNEKVLPKHSLLYEYFTVYNELTKVKYVTEGMRKPAFLSGEQKKAIVDLLFKTNRKVTVKQLKEDYFKKIECFDSVEISGVEDRFNASLGTYHDLLKIIKDKDFLDNEENEDILEDIVLTLTLFEDREMIEERLKTYAHLFDDKVMKQLKRRRYTGWGRLSRKLINGIRDKQSGKTILDFLKSDGFANRNFMQLIHDDSLTFKEDIQKAQVSGQGDSLHEHIANLAGSPAIKKGILQTVKVVDELVKVMGRHKPENIVIEMARENQTTQKGQKNSRERMKRIEEGIKELGSQILKEHPVENTQLQNEKLYLYYLQNGRDMYVDQELDINRLSDYDVDHIVPQSFLKDDSIDNKVLTRSDKARGKSDNVPSEEVVKKMKNYWRQLLNAKLITQRKFDNLTKAERGGLSELDKAGFIKRQLVETRQITKHVAQILDSRMNTKYDENDKLIREVKVITLKSKLVSDFRKDFQFYKVREINNYHHAHDAYLNAVVGTALIKKYPKLESEFVYGDYKVYDVRKMIAKSEQEIGKATAKYFFYSNIMNFFKTEITLANGEIRKRPLIETNGETGEIVWDKGRDFATVRKVLSMPQVNIVKKTEVQTGGFSKESILPKRNSDKLIARKKDWDPKKYGGFDSPTVAYSVLVVAKVEKGKSKKLKSVKELLGITIMERSSFEKNPIDFLEAKGYKEVKKDLIIKLPKYSLFELENGRKRMLASAGELQKGNELALPSKYVNFLYLASHYEKLKGSPEDNEQKQLFVEQHKHYLDEIIEQISEFSKRVILADANLDKVLSAYNKHRDKPIREQAENIIHLFTLTNLGAPAAFKYFDTTIDRKRYTSTKEVLDATLIHQSITGLYETRIDLSQLGGDGGGGGGSGGGGSGGLLGRDLLTKLKAQIQFSTEGPQVTWEDRPAMCLVLNLEEEYRLHEKPVPPSIDPSWLQLFPMVWAEKAGMGLANQVPPVVVELKSDASPVAVRQYPMSKEAREGIRPHIQRFLDLGILVPCQSPWNTPLLPVKKPGTNDYRPVQDLREVNKRVQDIHPTVPNPYNLLSSLPPSHTWYSVLDLKDAFFCLKLHPNSQPLFAFEWRDPEKGNTGQLTWTRLPQGFKNSPTLFNEALHRDLASFRALNPQVVMLQYVDDLLVAAPTYRDCKEGTRRLLQELSKLGYRVSAKKAQLCREEVTYLGYLLKGGKRWLTPARKATVMKIPTPTTPRQVREFLGKAGFCRLFIPGFASLAAPLYPLTRPKVPFTWTEAHQEAFGRIKEALLSAPALALPDLTKPFALYVDEKEGVARGVLTQTLGPWRRPVAYLSKKLDPVASGWPTCLKAIAAVALLLKDADKLTLGQNVLVIAPHNLESIVRQPPDRWMTNARMTHYQSLLLNERVSFAPPAILNPATLLPVESDDTPIHICSEILAEETGTRPDLRDQPLPGVPAWYTDGSSFIMDGRRQAGAAIVDNKRTVWASNLPEGTSAQKAELIALTQALRLAEGKSINIYTDSRYAFATAHVHGAIYKQRGWLTSAGKDIKNKEEILALLEAIHLPKRVAIIHCPGHQRGTDPVATGNRKADEAAKQAAQSTRILTETTKNAGKRTADGSEFEKRTADGSEFESPKKKAKVE

SEQ ID NO: 1721 - protein, 2127 aa, synthetic construct
MPAAKRVKLDGGDKKYSIGLDIGTNSVGWAVITDEYKVPSKKFKVLGNTDRHSIKKNLIGALLFDSGETAEATRLKRTARRRYTRRKNRICYLQEIFSNEMAKVDDSFFHRLEESFLVEEDKKHERHPIFGNIVDEVAYHEKYPTIYHLRKKLVDSTDKADLRLIYLALAHMIKFRGHFLIEGDLNPDNSDVDKLFIQLVQTYNQLFEENPINASGVDAKAILSARLSKSRRLENLIAQLPGEKKNGLFGNLIALSLGLTPNFKSNFDLAEDAKLQLSKDTYDDDLDNLLAQIGDQYADLFLAAKNLSDAILLSDILRVNTEITKAPLSASMIKRYDEHHQDLTLLKALVRQQLPEKYKEIFFDQSKNGYAGYIDGGASQEEFYKFIKPILEKMDGTEELLVKLNREDLLRKQRTFDNGSIPHQIHLGELHAILRRQEDFYPFLKDNREKIEKILTFRIPYYVGPLARGNSRFAWMTRKSEETITPWNFEEVVDKGASAQSFIERMTNFDKNLPNEKVLPKHSLLYEYFTVYNELTKVKYVTEGMRKPAFLSGEQKKAIVDLLFKTNRKVTVKQLKEDYFKKIECFDSVEISGVEDRFNASLGTYHDLLKIIKDKDFLDNEENEDILEDIVLTLTLFEDREMIEERLKTYAHLFDDKVMKQLKRRRYTGWGRLSRKLINGIRDKQSGKTILDFLKSDGFANRNFMQLIHDDSLTFKEDIQKAQVSGQGDSLHEHIANLAGSPAIKKGILQTVKVVDELVKVMGRHKPENIVIEMARENQTTQKGQKNSRERMKRIEEGIKELGSQILKEHPVENTQLQNEKLYLYYLQNGRDMYVDQELDINRLSDYDVDHIVPQSFLKDDSIDNKVLTRSDKARGKSDNVPSEEVVKKMKNYWRQLLNAKLITQRKFDNLTKAERGGLSELDKAGFIKRQLVETRQITKHVAQILDSRMNTKYDENDKLIREVKVITLKSKLVSDFRKDFQFYKVREINNYHHAHDAYLNAVVGTALIKKYPKLESEFVYGDYKVYDVRKMIAKSEQEIGKATAKYFFYSNIMNFFKTEITLANGEIRKRPLIETNGETGEIVWDKGRDFATVRKVLSMPQVNIVKKTEVQTGGFSKESILPKRNSDKLIARKKDWDPKKYGGFDSPTVAYSVLVVAKVEKGKSKKLKSVKELLGITIMERSSFEKNPIDFLEAKGYKEVKKDLIIKLPKYSLFELENGRKRMLASAGELQKGNELALPSKYVNFLYLASHYEKLKGSPEDNEQKQLFVEQHKHYLDEIIEQISEFSKRVILADANLDKVLSAYNKHRDKPIREQAENIIHLFTLTNLGAPAAFKYFDTTIDRKRYTSTKEVLDATLIHQSITGLYETRIDLSQLGGDGGGSSPAPEAAAKGGLLGRDLLTKLKAQIQFSTEGPQVTWEDRPAMCLVLNLEEEYRLHEKPVPPSIDPSWLQLFPMVWAEKAGMGLANQVPPVVVELKSDASPVAVRQYPMSKEAREGIRPHIQRFLDLGILVPCQSPWNTPLLPVKKPGTNDYRPVQDLREVNKRVQDIHPTVPNPYNLLSSLPPSHTWYSVLDLKDAFFCLKLHPNSQPLFAFEWRDPEKGNTGQLTWTRLPQGFKNSPTLFNEALHRDLASFRALNPQVVMLQYVDDLLVAAPTYRDCKEGTRRLLQELSKLGYRVSAKKAQLCREEVTYLGYLLKGGKRWLTPARKATVMKIPTPTTPRQVREFLGKAGFCRLFIPGFASLAAPLYPLTRPKVPFTWTEAHQEAFGRIKEALLSAPALALPDLTKPFALYVDEKEGVARGVLTQTLGPWRRPVAYLSKKLDPVASGWPTCLKAIAAVALLLKDADKLTLGQNVLVIAPHNLESIVRQPPDRWMTNARMTHYQSLLLNERVSFAPPAILNPATLLPVESDDTPIHICSEILAEETGTRPDLRDQPLPGVPAWYTDGSSFIMDGRRQAGAAIVDNKRTVWASNLPEGTSAQKAELIALTQALRLAEGKSINIYTDSRYAFATAHVHGAIYKQRGWLTSAGKDIKNKEEILALLEAIHLPKRVAIIHCPGHQRGTDPVATGNRKADEAAKQAAQSTRILTETTKNAGKRTADGSEFEKRTADGSEFESPKKKAKVE

SEQ ID NO: 1722 - protein, 2127 aa, synthetic construct
MPAAKRVKLDGGDKKYSIGLDIGTNSVGWAVITDEYKVPSKKFKVLGNTDRHSIKKNLIGALLFDSGETAEATRLKRTARRRYTRRKNRICYLQEIFSNEMAKVDDSFFHRLEESFLVEEDKKHERHPIFGNIVDEVAYHEKYPTIYHLRKKLVDSTDKADLRLIYLALAHMIKFRGHFLIEGDLNPDNSDVDKLFIQLVQTYNQLFEENPINASGVDAKAILSARLSKSRRLENLIAQLPGEKKNGLFGNLIALSLGLTPNFKSNFDLAEDAKLQLSKDTYDDDLDNLLAQIGDQYADLFLAAKNLSDAILLSDILRVNTEITKAPLSASMIKRYDEHHQDLTLLKALVRQQLPEKYKEIFFDQSKNGYAGYIDGGASQEEFYKFIKPILEKMDGTEELLVKLNREDLLRKQRTFDNGSIPHQIHLGELHAILRRQEDFYPFLKDNREKIEKILTFRIPYYVGPLARGNSRFAWMTRKSEETITPWNFEEVVDKGASAQSFIERMTNFDKNLPNEKVLPKHSLLYEYFTVYNELTKVKYVTEGMRKPAFLSGEQKKAIVDLLFKTNRKVTVKQLKEDYFKKIECFDSVEISGVEDRFNASLGTYHDLLKIIKDKDFLDNEENEDILEDIVLTLTLFEDREMIEERLKTYAHLFDDKVMKQLKRRRYTGWGRLSRKLINGIRDKQSGKTILDFLKSDGFANRNFMQLIHDDSLTFKEDIQKAQVSGQGDSLHEHIANLAGSPAIKKGILQTVKVVDELVKVMGRHKPENIVIEMARENQTTQKGQKNSRERMKRIEEGIKELGSQILKEHPVENTQLQNEKLYLYYLQNGRDMYVDQELDINRLSDYDVDHIVPQSFLKDDSIDNKVLTRSDKARGKSDNVPSEEVVKKMKNYWRQLLNAKLITQRKFDNLTKAERGGLSELDKAGFIKRQLVETRQITKHVAQILDSRMNTKYDENDKLIREVKVITLKSKLVSDFRKDFQFYKVREINNYHHAHDAYLNAVVGTALIKKYPKLESEFVYGDYKVYDVRKMIAKSEQEIGKATAKYFFYSNIMNFFKTEITLANGEIRKRPLIETNGETGEIVWDKGRDFATVRKVLSMPQVNIVKKTEVQTGGFSKESILPKRNSDKLIARKKDWDPKKYGGFDSPTVAYSVLVVAKVEKGKSKKLKSVKELLGITIMERSSFEKNPIDFLEAKGYKEVKKDLIIKLPKYSLFELENGRKRMLASAGELQKGNELALPSKYVNFLYLASHYEKLKGSPEDNEQKQLFVEQHKHYLDEIIEQISEFSKRVILADANLDKVLSAYNKHRDKPIREQAENIIHLFTLTNLGAPAAFKYFDTTIDRKRYTSTKEVLDATLIHQSITGLYETRIDLSQLGGDGGGGSEAAAKGSSGGLLGRDLLTKLKAQIQFSTEGPQVTWEDRPAMCLVLNLEEEYRLHEKPVPPSIDPSWLQLFPMVWAEKAGMGLANQVPPVVVELKSDASPVAVRQYPMSKEAREGIRPHIQRFLDLGILVPCQSPWNTPLLPVKKPGTNDYRPVQDLREVNKRVQDIHPTVPNPYNLLSSLPPSHTWYSVLDLKDAFFCLKLHPNSQPLFAFEWRDPEKGNTGQLTWTRLPQGFKNSPTLFNEALHRDLASFRALNPQVVMLQYVDDLLVAAPTYRDCKEGTRRLLQELSKLGYRVSAKKAQLCREEVTYLGYLLKGGKRWLTPARKATVMKIPTPTTPRQVREFLGKAGFCRLFIPGFASLAAPLYPLTRPKVPFTWTEAHQEAFGRIKEALLSAPALALPDLTKPFALYVDEKEGVARGVLTQTLGPWRRPVAYLSKKLDPVASGWPTCLKAIAAVALLLKDADKLTLGQNVLVIAPHNLESIVRQPPDRWMTNARMTHYQSLLLNERVSFAPPAILNPATLLPVESDDTPIHICSEILAEETGTRPDLRDQPLPGVPAWYTDGSSFIMDGRRQAGAAIVDNKRTVWASNLPEGTSAQKAELIALTQALRLAEGKSINIYTDSRYAFATAHVHGAIYKQRGWLTSAGKDIKNKEEILALLEAIHLPKRVAIIHCPGHQRGTDPVATGNRKADEAAKQAAQSTRILTETTKNAGKRTADGSEFEKRTADGSEFESPKKKAKVE

SEQ ID NO: 1723 - protein, 2127 aa, synthetic construct
MPAAKRVKLDGGDKKYSIGLDIGTNSVGWAVITDEYKVPSKKFKVLGNTDRHSIKKNLIGALLFDSGETAEATRLKRTARRRYTRRKNRICYLQEIFSNEMAKVDDSFFHRLEESFLVEEDKKHERHPIFGNIVDEVAYHEKYPTIYHLRKKLVDSTDKADLRLIYLALAHMIKFRGHFLIEGDLNPDNSDVDKLFIQLVQTYNQLFEENPINASGVDAKAILSARLSKSRRLENLIAQLPGEKKNGLFGNLIALSLGLTPNFKSNFDLAEDAKLQLSKDTYDDDLDNLLAQIGDQYADLFLAAKNLSDAILLSDILRVNTEITKAPLSASMIKRYDEHHQDLTLLKALVRQQLPEKYKEIFFDQSKNGYAGYIDGGASQEEFYKFIKPILEKMDGTEELLVKLNREDLLRKQRTFDNGSIPHQIHLGELHAILRRQEDFYPFLKDNREKIEKILTFRIPYYVGPLARGNSRFAWMTRKSEETITPWNFEEVVDKGASAQSFIERMTNFDKNLPNEKVLPKHSLLYEYFTVYNELTKVKYVTEGMRKPAFLSGEQKKAIVDLLFKTNRKVTVKQLKEDYFKKIECFDSVEISGVEDRFNASLGTYHDLLKIIKDKDFLDNEENEDILEDIVLTLTLFEDREMIEERLKTYAHLFDDKVMKQLKRRRYTGWGRLSRKLINGIRDKQSGKTILDFLKSDGFANRNFMQLIHDDSLTFKEDIQKAQVSGQGDSLHEHIANLAGSPAIKKGILQTVKVVDELVKVMGRHKPENIVIEMARENQTTQKGQKNSRERMKRIEEGIKELGSQILKEHPVENTQLQNEKLYLYYLQNGRDMYVDQELDINRLSDYDVDHIVPQSFLKDDSIDNKVLTRSDKARGKSDNVPSEEVVKKMKNYWRQLLNAKLITQRKFDNLTKAERGGLSELDKAGFIKRQLVETRQITKHVAQILDSRMNTKYDENDKLIREVKVITLKSKLVSDFRKDFQFYKVREINNYHHAHDAYLNAVVGTALIKKYPKLESEFVYGDYKVYDVRKMIAKSEQEIGKATAKYFFYSNIMNFFKTEITLANGEIRKRPLIETNGETGEIVWDKGRDFATVRKVLSMPQVNIVKKTEVQTGGFSKESILPKRNSDKLIARKKDWDPKKYGGFDSPTVAYSVLVVAKVEKGKSKKLKSVKELLGITIMERSSFEKNPIDFLEAKGYKEVKKDLIIKLPKYSLFELENGRKRMLASAGELQKGNELALPSKYVNFLYLASHYEKLKGSPEDNEQKQLFVEQHKHYLDEIIEQISEFSKRVILADANLDKVLSAYNKHRDKPIREQAENIIHLFTLTNLGAPAAFKYFDTTIDRKRYTSTKEVLDATLIHQSITGLYETRIDLSQLGGDGGEAAAKPAPGGSGGLLGRDLLTKLKAQIQFSTEGPQVTWEDRPAMCLVLNLEEEYRLHEKPVPPSIDPSWLQLFPMVWAEKAGMGLANQVPPVVVELKSDASPVAVRQYPMSKEAREGIRPHIQRFLDLGILVPCQSPWNTPLLPVKKPGTNDYRPVQDLREVNKRVQDIHPTVPNPYNLLSSLPPSHTWYSVLDLKDAFFCLKLHPNSQPLFAFEWRDPEKGNTGQLTWTRLPQGFKNSPTLFNEALHRDLASFRALNPQVVMLQYVDDLLVAAPTYRDCKEGTRRLLQELSKLGYRVSAKKAQLCREEVTYLGYLLKGGKRWLTPARKATVMKIPTPTTPRQVREFLGKAGFCRLFIPGFASLAAPLYPLTRPKVPFTWTEAHQEAFGRIKEALLSAPALALPDLTKPFALYVDEKEGVARGVLTQTLGPWRRPVAYLSKKLDPVASGWPTCLKAIAAVALLLKDADKLTLGQNVLVIAPHNLESIVRQPPDRWMTNARMTHYQSLLLNERVSFAPPAILNPATLLPVESDDTPIHICSEILAEETGTRPDLRDQPLPGVPAWYTDGSSFIMDGRRQAGAAIVDNKRTVWASNLPEGTSAQKAELIALTQALRLAEGKSINIYTDSRYAFATAHVHGAIYKQRGWLTSAGKDIKNKEEILALLEAIHLPKRVAIIHCPGHQRGTDPVATGNRKADEAAKQAAQSTRILTETTKNAGKRTADGSEFEKRTADGSEFESPKKKAKVE

SEQ ID NO: 1724 - protein, 2125 aa, synthetic construct
MPAAKRVKLDGGDKKYSIGLDIGTNSVGWAVITDEYKVPSKKFKVLGNTDRHSIKKNLIGALLFDSGETAEATRLKRTARRRYTRRKNRICYLQEIFSNEMAKVDDSFFHRLEESFLVEEDKKHERHPIFGNIVDEVAYHEKYPTIYHLRKKLVDSTDKADLRLIYLALAHMIKFRGHFLIEGDLNPDNSDVDKLFIQLVQTYNQLFEENPINASGVDAKAILSARLSKSRRLENLIAQLPGEKKNGLFGNLIALSLGLTPNFKSNFDLAEDAKLQLSKDTYDDDLDNLLAQIGDQYADLFLAAKNLSDAILLSDILRVNTEITKAPLSASMIKRYDEHHQDLTLLKALVRQQLPEKYKEIFFDQSKNGYAGYIDGGASQEEFYKFIKPILEKMDGTEELLVKLNREDLLRKQRTFDNGSIPHQIHLGELHAILRRQEDFYPFLKDNREKIEKILTFRIPYYVGPLARGNSRFAWMTRKSEETITPWNFEEVVDKGASAQSFIERMTNFDKNLPNEKVLPKHSLLYEYFTVYNELTKVKYVTEGMRKPAFLSGEQKKAIVDLLFKTNRKVTVKQLKEDYFKKIECFDSVEISGVEDRFNASLGTYHDLLKIIKDKDFLDNEENEDILEDIVLTLTLFEDREMIEERLKTYAHLFDDKVMKQLKRRRYTGWGRLSRKLINGIRDKQSGKTILDFLKSDGFANRNFMQLIHDDSLTFKEDIQKAQVSGQGDSLHEHIANLAGSPAIKKGILQTVKVVDELVKVMGRHKPENIVIEMARENQTTQKGQKNSRERMKRIEEGIKELGSQILKEHPVENTQLQNEKLYLYYLQNGRDMYVDQELDINRLSDYDVDHIVPQSFLKDDSIDNKVLTRSDKARGKSDNVPSEEVVKKMKNYWRQLLNAKLITQRKFDNLTKAERGGLSELDKAGFIKRQLVETRQITKHVAQILDSRMNTKYDENDKLIREVKVITLKSKLVSDFRKDFQFYKVREINNYHHAHDAYLNAVVGTALIKKYPKLESEFVYGDYKVYDVRKMIAKSEQEIGKATAKYFFYSNIMNFFKTEITLANGEIRKRPLIETNGETGEIVWDKGRDFATVRKVLSMPQVNIVKKTEVQTGGFSKESILPKRNSDKLIARKKDWDPKKYGGFDSPTVAYSVLVVAKVEKGKSKKLKSVKELLGITIMERSSFEKNPIDFLEAKGYKEVKKDLIIKLPKYSLFELENGRKRMLASAGELQKGNELALPSKYVNFLYLASHYEKLKGSPEDNEQKQLFVEQHKHYLDEIIEQISEFSKRVILADANLDKVLSAYNKHRDKPIREQAENIIHLFTLTNLGAPAAFKYFDTTIDRKRYTSTKEVLDATLIHQSITGLYETRIDLSQLGGDGGGGSGSSGGGGGLLGRDLLTKLKAQIQFSTEGPQVTWEDRPAMCLVLNLEEEYRLHEKPVPPSIDPSWLQLFPMVWAEKAGMGLANQVPPVVVELKSDASPVAVRQYPMSKEAREGIRPHIQRFLDLGILVPCQSPWNTPLLPVKKPGTNDYRPVQDLREVNKRVQDIHPTVPNPYNLLSSLPPSHTWYSVLDLKDAFFCLKLHPNSQPLFAFEWRDPEKGNTGQLTWTRLPQGFKNSPTLFNEALHRDLASFRALNPQVVMLQYVDDLLVAAPTYRDCKEGTRRLLQELSKLGYRVSAKKAQLCREEVTYLGYLLKGGKRWLTPARKATVMKIPTPTTPRQVREFLGKAGFCRLFIPGFASLAAPLYPLTRPKVPFTWTEAHQEAFGRIKEALLSAPALALPDLTKPFALYVDEKEGVARGVLTQTLGPWRRPVAYLSKKLDPVASGWPTCLKAIAAVALLLKDADKLTLGQNVLVIAPHNLESIVRQPPDRWMTNARMTHYQSLLLNERVSFAPPAILNPATLLPVESDDTPIHICSEILAEETGTRPDLRDQPLPGVPAWYTDGSSFIMDGRRQAGAAIVDNKRTVWASNLPEGTSAQKAELIALTQALRLAEGKSINIYTDSRYAFATAHVHGAIYKQRGWLTSAGKDIKNKEEILALLEAIHLPKRVAIIHCPGHQRGTDPVATGNRKADEAAKQAAQSTRILTETTKNAGKRTADGSEFEKRTADGSEFESPKKKAKVE

SEQ ID NO: 1725 - protein, 2127 aa, synthetic construct
MPAAKRVKLDGGDKKYSIGLDIGTNSVGWAVITDEYKVPSKKFKVLGNTDRHSIKKNLIGALLFDSGETAEATRLKRTARRRYTRRKNRICYLQEIFSNEMAKVDDSFFHRLEESFLVEEDKKHERHPIFGNIVDEVAYHEKYPTIYHLRKKLVDSTDKADLRLIYLALAHMIKFRGHFLIEGDLNPDNSDVDKLFIQLVQTYNQLFEENPINASGVDAKAILSARLSKSRRLENLIAQLPGEKKNGLFGNLIALSLGLTPNFKSNFDLAEDAKLQLSKDTYDDDLDNLLAQIGDQYADLFLAAKNLSDAILLSDILRVNTEITKAPLSASMIKRYDEHHQDLTLLKALVRQQLPEKYKEIFFDQSKNGYAGYIDGGASQEEFYKFIKPILEKMDGTEELLVKLNREDLLRKQRTFDNGSIPHQIHLGELHAILRRQEDFYPFLKDNREKIEKILTFRIPYYVGPLARGNSRFAWMTRKSEETITPWNFEEVVDKGASAQSFIERMTNFDKNLPNEKVLPKHSLLYEYFTVYNELTKVKYVTEGMRKPAFLSGEQKKAIVDLLFKTNRKVTVKQLKEDYFKKIECFDSVEISGVEDRFNASLGTYHDLLKIIKDKDFLDNEENEDILEDIVLTLTLFEDREMIEERLKTYAHLFDDKVMKQLKRRRYTGWGRLSRKLINGIRDKQSGKTILDFLKSDGFANRNFMQLIHDDSLTFKEDIQKAQVSGQGDSLHEHIANLAGSPAIKKGILQTVKVVDELVKVMGRHKPENIVIEMARENQTTQKGQKNSRERMKRIEEGIKELGSQILKEHPVENTQLQNEKLYLYYLQNGRDMYVDQELDINRLSDYDVDHIVPQSFLKDDSIDNKVLTRSDKARGKSDNVPSEEVVKKMKNYWRQLLNAKLITQRKFDNLTKAERGGLSELDKAGFIKRQLVETRQITKHVAQILDSRMNTKYDENDKLIREVKVITLKSKLVSDFRKDFQFYKVREINNYHHAHDAYLNAVVGTALIKKYPKLESEFVYGDYKVYDVRKMIAKSEQEIGKATAKYFFYSNIMNFFKTEITLANGEIRKRPLIETNGETGEIVWDKGRDFATVRKVLSMPQVNIVKKTEVQTGGFSKESILPKRNSDKLIARKKDWDPKKYGGFDSPTVAYSVLVVAKVEKGKSKKLKSVKELLGITIMERSSFEKNPIDFLEAKGYKEVKKDLIIKLPKYSLFELENGRKRMLASAGELQKGNELALPSKYVNFLYLASHYEKLKGSPEDNEQKQLFVEQHKHYLDEIIEQISEFSKRVILADANLDKVLSAYNKHRDKPIREQAENIIHLFTLTNLGAPAAFKYFDTTIDRKRYTSTKEVLDATLIHQSITGLYETRIDLSQLGGDGGGSSEAAAKGGSGGLLGRDLLTKLKAQIQFSTEGPQVTWEDRPAMCLVLNLEEEYRLHEKPVPPSIDPSWLQLFPMVWAEKAGMGLANQVPPVVVELKSDASPVAVRQYPMSKEAREGIRPHIQRFLDLGILVPCQSPWNTPLLPVKKPGTNDYRPVQDLREVNKRVQDIHPTVPNPYNLLSSLPPSHTWYSVLDLKDAFFCLKLHPNSQPLFAFEWRDPEKGNTGQLTWTRLPQGFKNSPTLFNEALHRDLASFRALNPQVVMLQYVDDLLVAAPTYRDCKEGTRRLLQELSKLGYRVSAKKAQLCREEVTYLGYLLKGGKRWLTPARKATVMKIPTPTTPRQVREFLGKAGFCRLFIPGFASLAAPLYPLTRPKVPFTWTEAHQEAFGRIKEALLSAPALALPDLTKPFALYVDEKEGVARGVLTQTLGPWRRPVAYLSKKLDPVASGWPTCLKAIAAVALLLKDADKLTLGQNVLVIAPHNLESIVRQPPDRWMTNARMTHYQSLLLNERVSFAPPAILNPATLLPVESDDTPIHICSEILAEETGTRPDLRDQPLPGVPAWYTDGSSFIMDGRRQAGAAIVDNKRTVWASNLPEGTSAQKAELIALTQALRLAEGKSINIYTDSRYAFATAHVHGAIYKQRGWLTSAGKDIKNKEEILALLEAIHLPKRVAIIHCPGHQRGTDPVATGNRKADEAAKQAAQSTRILTETTKNAGKRTADGSEFEKRTADGSEFESPKKKAKVE

SEQ ID NO: 1726 - protein, 2127 aa, synthetic construct
MPAAKRVKLDGGDKKYSIGLDIGTNSVGWAVITDEYKVPSKKFKVLGNTDRHSIKKNLIGALLFDSGETAEATRLKRTARRRYTRRKNRICYLQEIFSNEMAKVDDSFFHRLEESFLVEEDKKHERHPIFGNIVDEVAYHEKYPTIYHLRKKLVDSTDKADLRLIYLALAHMIKFRGHFLIEGDLNPDNSDVDKLFIQLVQTYNQLFEENPINASGVDAKAILSARLSKSRRLENLIAQLPGEKKNGLFGNLIALSLGLTPNFKSNFDLAEDAKLQLSKDTYDDDLDNLLAQIGDQYADLFLAAKNLSDAILLSDILRVNTEITKAPLSASMIKRYDEHHQDLTLLKALVRQQLPEKYKEIFFDQSKNGYAGYIDGGASQEEFYKFIKPILEKMDGTEELLVKLNREDLLRKQRTFDNGSIPHQIHLGELHAILRRQEDFYPFLKDNREKIEKILTFRIPYYVGPLARGNSRFAWMTRKSEETITPWNFEEVVDKGASAQSFIERMTNFDKNLPNEKVLPKHSLLYEYFTVYNELTKVKYVTEGMRKPAFLSGEQKKAIVDLLFKTNRKVTVKQLKEDYFKKIECFDSVEISGVEDRFNASLGTYHDLLKIIKDKDFLDNEENEDILEDIVLTLTLFEDREMIEERLKTYAHLFDDKVMKQLKRRRYTGWGRLSRKLINGIRDKQSGKTILDFLKSDGFANRNFMQLIHDDSLTFKEDIQKAQVSGQGDSLHEHIANLAGSPAIKKGILQTVKVVDELVKVMGRHKPENIVIEMARENQTTQKGQKNSRERMKRIEEGIKELGSQILKEHPVENTQLQNEKLYLYYLQNGRDMYVDQELDINRLSDYDVDHIVPQSFLKDDSIDNKVLTRSDKARGKSDNVPSEEVVKKMKNYWRQLLNAKLITQRKFDNLTKAERGGLSELDKAGFIKRQLVETRQITKHVAQILDSRMNTKYDENDKLIREVKVITLKSKLVSDFRKDFQFYKVREINNYHHAHDAYLNAVVGTALIKKYPKLESEFVYGDYKVYDVRKMIAKSEQEIGKATAKYFFYSNIMNFFKTEITLANGEIRKRPLIETNGETGEIVWDKGRDFATVRKVLSMPQVNIVKKTEVQTGGFSKESILPKRNSDKLIARKKDWDPKKYGGFDSPTVAYSVLVVAKVEKGKSKKLKSVKELLGITIMERSSFEKNPIDFLEAKGYKEVKKDLIIKLPKYSLFELENGRKRMLASAGELQKGNELALPSKYVNFLYLASHYEKLKGSPEDNEQKQLFVEQHKHYLDEIIEQISEFSKRVILADANLDKVLSAYNKHRDKPIREQAENIIHLFTLTNLGAPAAFKYFDTTIDRKRYTSTKEVLDATLIHQSITGLYETRIDLSQLGGDGGGGGGSSEAAAKGGLLGRDLLTKLKAQIQFSTEGPQVTWEDRPAMCLVLNLEEEYRLHEKPVPPSIDPSWLQLFPMVWAEKAGMGLANQVPPVVVELKSDASPVAVRQYPMSKEAREGIRPHIQRFLDLGILVPCQSPWNTPLLPVKKPGTNDYRPVQDLREVNKRVQDIHPTVPNPYNLLSSLPPSHTWYSVLDLKDAFFCLKLHPNSQPLFAFEWRDPEKGNTGQLTWTRLPQGFKNSPTLFNEALHRDLASFRALNPQVVMLQYVDDLLVAAPTYRDCKEGTRRLLQELSKLGYRVSAKKAQLCREEVTYLGYLLKGGKRWLTPARKATVMKIPTPTTPRQVREFLGKAGFCRLFIPGFASLAAPLYPLTRPKVPFTWTEAHQEAFGRIKEALLSAPALALPDLTKPFALYVDEKEGVARGVLTQTLGPWRRPVAYLSKKLDPVASGWPTCLKAIAAVALLLKDADKLTLGQNVLVIAPHNLESIVRQPPDRWMTNARMTHYQSLLLNERVSFAPPAILNPATLLPVESDDTPIHICSEILAEETGTRPDLRDQPLPGVPAWYTDGSSFIMDGRRQAGAAIVDNKRTVWASNLPEGTSAQKAELIALTQALRLAEGKSINIYTDSRYAFATAHVHGAIYKQRGWLTSAGKDIKNKEEILALLEAIHLPKRVAIIHCPGHQRGTDPVATGNRKADEAAKQAAQSTRILTETTKNAGKRTADGSEFEKRTADGSEFESPKKKAKVE

SEQ ID NO: 1727 - protein, 2121 aa, synthetic construct
MPAAKRVKLDGGDKKYSIGLDIGTNSVGWAVITDEYKVPSKKFKVLGNTDRHSIKKNLIGALLFDSGETAEATRLKRTARRRYTRRKNRICYLQEIFSNEMAKVDDSFFHRLEESFLVEEDKKHERHPIFGNIVDEVAYHEKYPTIYHLRKKLVDSTDKADLRLIYLALAHMIKFRGHFLIEGDLNPDNSDVDKLFIQLVQTYNQLFEENPINASGVDAKAILSARLSKSRRLENLIAQLPGEKKNGLFGNLIALSLGLTPNFKSNFDLAEDAKLQLSKDTYDDDLDNLLAQIGDQYADLFLAAKNLSDAILLSDILRVNTEITKAPLSASMIKRYDEHHQDLTLLKALVRQQLPEKYKEIFFDQSKNGYAGYIDGGASQEEFYKFIKPILEKMDGTEELLVKLNREDLLRKQRTFDNGSIPHQIHLGELHAILRRQEDFYPFLKDNREKIEKILTFRIPYYVGPLARGNSRFAWMTRKSEETITPWNFEEVVDKGASAQSFIERMTNFDKNLPNEKVLPKHSLLYEYFTVYNELTKVKYVTEGMRKPAFLSGEQKKAIVDLLFKTNRKVTVKQLKEDYFKKIECFDSVEISGVEDRFNASLGTYHDLLKIIKDKDFLDNEENEDILEDIVLTLTLFEDREMIEERLKTYAHLFDDKVMKQLKRRRYTGWGRLSRKLINGIRDKQSGKTILDFLKSDGFANRNFMQLIHDDSLTFKEDIQKAQVSGQGDSLHEHIANLAGSPAIKKGILQTVKVVDELVKVMGRHKPENIVIEMARENQTTQKGQKNSRERMKRIEEGIKELGSQILKEHPVENTQLQNEKLYLYYLQNGRDMYVDQELDINRLSDYDVDHIVPQSFLKDDSIDNKVLTRSDKARGKSDNVPSEEVVKKMKNYWRQLLNAKLITQRKFDNLTKAERGGLSELDKAGFIKRQLVETRQITKHVAQILDSRMNTKYDENDKLIREVKVITLKSKLVSDFRKDFQFYKVREINNYHHAHDAYLNAVVGTALIKKYPKLESEFVYGDYKVYDVRKMIAKSEQEIGKATAKYFFYSNIMNFFKTEITLANGEIRKRPLIETNGETGEIVWDKGRDFATVRKVLSMPQVNIVKKTEVQTGGFSKESILPKRNSDKLIARKKDWDPKKYGGFDSPTVAYSVLVVAKVEKGKSKKLKSVKELLGITIMERSSFEKNPIDFLEAKGYKEVKKDLIIKLPKYSLFELENGRKRMLASAGELQKGNELALPSKYVNFLYLASHYEKLKGSPEDNEQKQLFVEQHKHYLDEIIEQISEFSKRVILADANLDKVLSAYNKHRDKPIREQAENIIHLFTLTNLGAPAAFKYFDTTIDRKRYTSTKEVLDATLIHQSITGLYETRIDLSQLGGDGGPAPAPGGLLGRDLLTKLKAQIQFSTEGPQVTWEDRPAMCLVLNLEEEYRLHEKPVPPSIDPSWLQLFPMVWAEKAGMGLANQVPPVVVELKSDASPVAVRQYPMSKEAREGIRPHIQRFLDLGILVPCQSPWNTPLLPVKKPGTNDYRPVQDLREVNKRVQDIHPTVPNPYNLLSSLPPSHTWYSVLDLKDAFFCLKLHPNSQPLFAFEWRDPEKGNTGQLTWTRLPQGFKNSPTLFNEALHRDLASFRALNPQVVMLQYVDDLLVAAPTYRDCKEGTRRLLQELSKLGYRVSAKKAQLCREEVTYLGYLLKGGKRWLTPARKATVMKIPTPTTPRQVREFLGKAGFCRLFIPGFASLAAPLYPLTRPKVPFTWTEAHQEAFGRIKEALLSAPALALPDLTKPFALYVDEKEGVARGVLTQTLGPWRRPVAYLSKKLDPVASGWPTCLKAIAAVALLLKDADKLTLGQNVLVIAPHNLESIVRQPPDRWMTNARMTHYQSLLLNERVSFAPPAILNPATLLPVESDDTPIHICSEILAEETGTRPDLRDQPLPGVPAWYTDGSSFIMDGRRQAGAAIVDNKRTVWASNLPEGTSAQKAELIALTQALRLAEGKSINIYTDSRYAFATAHVHGAIYKQRGWLTSAGKDIKNKEEILALLEAIHLPKRVAIIHCPGHQRGTDPVATGNRKADEAAKQAAQSTRILTETTKNAGKRTADGSEFEKRTADGSEFESPKKKAKVE

SEQ ID NO: 1728 - protein, 2122 aa, synthetic construct
MPAAKRVKLDGGDKKYSIGLDIGTNSVGWAVITDEYKVPSKKFKVLGNTDRHSIKKNLIGALLFDSGETAEATRLKRTARRRYTRRKNRICYLQEIFSNEMAKVDDSFFHRLEESFLVEEDKKHERHPIFGNIVDEVAYHEKYPTIYHLRKKLVDSTDKADLRLIYLALAHMIKFRGHFLIEGDLNPDNSDVDKLFIQLVQTYNQLFEENPINASGVDAKAILSARLSKSRRLENLIAQLPGEKKNGLFGNLIALSLGLTPNFKSNFDLAEDAKLQLSKDTYDDDLDNLLAQIGDQYADLFLAAKNLSDAILLSDILRVNTEITKAPLSASMIKRYDEHHQDLTLLKALVRQQLPEKYKEIFFDQSKNGYAGYIDGGASQEEFYKFIKPILEKMDGTEELLVKLNREDLLRKQRTFDNGSIPHQIHLGELHAILRRQEDFYPFLKDNREKIEKILTFRIPYYVGPLARGNSRFAWMTRKSEETITPWNFEEVVDKGASAQSFIERMTNFDKNLPNEKVLPKHSLLYEYFTVYNELTKVKYVTEGMRKPAFLSGEQKKAIVDLLFKTNRKVTVKQLKEDYFKKIECFDSVEISGVEDRFNASLGTYHDLLKIIKDKDFLDNEENEDILEDIVLTLTLFEDREMIEERLKTYAHLFDDKVMKQLKRRRYTGWGRLSRKLINGIRDKQSGKTILDFLKSDGFANRNFMQLIHDDSLTFKEDIQKAQVSGQGDSLHEHIANLAGSPAIKKGILQTVKVVDELVKVMGRHKPENIVIEMARENQTTQKGQKNSRERMKRIEEGIKELGSQILKEHPVENTQLQNEKLYLYYLQNGRDMYVDQELDINRLSDYDVDHIVPQSFLKDDSIDNKVLTRSDKARGKSDNVPSEEVVKKMKNYWRQLLNAKLITQRKFDNLTKAERGGLSELDKAGFIKRQLVETRQITKHVAQILDSRMNTKYDENDKLIREVKVITLKSKLVSDFRKDFQFYKVREINNYHHAHDAYLNAVVGTALIKKYPKLESEFVYGDYKVYDVRKMIAKSEQEIGKATAKYFFYSNIMNFFKTEITLANGEIRKRPLIETNGETGEIVWDKGRDFATVRKVLSMPQVNIVKKTEVQTGGFSKESILPKRNSDKLIARKKDWDPKKYGGFDSPTVAYSVLVVAKVEKGKSKKLKSVKELLGITIMERSSFEKNPIDFLEAKGYKEVKKDLIIKLPKYSLFELENGRKRMLASAGELQKGNELALPSKYVNFLYLASHYEKLKGSPEDNEQKQLFVEQHKHYLDEIIEQISEFSKRVILADANLDKVLSAYNKHRDKPIREQAENIIHLFTLTNLGAPAAFKYFDTTIDRKRYTSTKEVLDATLIHQSITGLYETRIDLSQLGGDGGPAPGGSGGLLGRDLLTKLKAQIQFSTEGPQVTWEDRPAMCLVLNLEEEYRLHEKPVPPSIDPSWLQLFPMVWAEKAGMGLANQVPPVVVELKSDASPVAVRQYPMSKEAREGIRPHIQRFLDLGILVPCQSPWNTPLLPVKKPGTNDYRPVQDLREVNKRVQDIHPTVPNPYNLLSSLPPSHTWYSVLDLKDAFFCLKLHPNSQPLFAFEWRDPEKGNTGQLTWTRLPQGFKNSPTLFNEALHRDLASFRALNPQVVMLQYVDDLLVAAPTYRDCKEGTRRLLQELSKLGYRVSAKKAQLCREEVTYLGYLLKGGKRWLTPARKATVMKIPTPTTPRQVREFLGKAGFCRLFIPGFASLAAPLYPLTRPKVPFTWTEAHQEAFGRIKEALLSAPALALPDLTKPFALYVDEKEGVARGVLTQTLGPWRRPVAYLSKKLDPVASGWPTCLKAIAAVALLLKDADKLTLGQNVLVIAPHNLESIVRQPPDRWMTNARMTHYQSLLLNERVSFAPPAILNPATLLPVESDDTPIHICSEILAEETGTRPDLRDQPLPGVPAWYTDGSSFIMDGRRQAGAAIVDNKRTVWASNLPEGTSAQKAELIALTQALRLAEGKSINIYTDSRYAFATAHVHGAIYKQRGWLTSAGKDIKNKEEILALLEAIHLPKRVAIIHCPGHQRGTDPVATGNRKADEAAKQAAQSTRILTETTKNAGKRTADGSEFEKRTADGSEFESPKKKAKVE

SEQ ID NO: 1729 - protein, 2131 aa, synthetic construct
MPAAKRVKLDGGDKKYSIGLDIGTNSVGWAVITDEYKVPSKKFKVLGNTDRHSIKKNLIGALLFDSGETAEATRLKRTARRRYTRRKNRICYLQEIFSNEMAKVDDSFFHRLEESFLVEEDKKHERHPIFGNIVDEVAYHEKYPTIYHLRKKLVDSTDKADLRLIYLALAHMIKFRGHFLIEGDLNPDNSDVDKLFIQLVQTYNQLFEENPINASGVDAKAILSARLSKSRRLENLIAQLPGEKKNGLFGNLIALSLGLTPNFKSNFDLAEDAKLQLSKDTYDDDLDNLLAQIGDQYADLFLAAKNLSDAILLSDILRVNTEITKAPLSASMIKRYDEHHQDLTLLKALVRQQLPEKYKEIFFDQSKNGYAGYIDGGASQEEFYKFIKPILEKMDGTEELLVKLNREDLLRKQRTFDNGSIPHQIHLGELHAILRRQEDFYPFLKDNREKIEKILTFRIPYYVGPLARGNSRFAWMTRKSEETITPWNFEEVVDKGASAQSFIERMTNFDKNLPNEKVLPKHSLLYEYFTVYNELTKVKYVTEGMRKPAFLSGEQKKAIVDLLFKTNRKVTVKQLKEDYFKKIECFDSVEISGVEDRFNASLGTYHDLLKIIKDKDFLDNEENEDILEDIVLTLTLFEDREMIEERLKTYAHLFDDKVMKQLKRRRYTGWGRLSRKLINGIRDKQSGKTILDFLKSDGFANRNFMQLIHDDSLTFKEDIQKAQVSGQGDSLHEHIANLAGSPAIKKGILQTVKVVDELVKVMGRHKPENIVIEMARENQTTQKGQKNSRERMKRIEEGIKELGSQILKEHPVENTQLQNEKLYLYYLQNGRDMYVDQELDINRLSDYDVDHIVPQSFLKDDSIDNKVLTRSDKARGKSDNVPSEEVVKKMKNYWRQLLNAKLITQRKFDNLTKAERGGLSELDKAGFIKRQLVETRQITKHVAQILDSRMNTKYDENDKLIREVKVITLKSKLVSDFRKDFQFYKVREINNYHHAHDAYLNAVVGTALIKKYPKLESEFVYGDYKVYDVRKMIAKSEQEIGKATAKYFFYSNIMNFFKTEITLANGEIRKRPLIETNGETGEIVWDKGRDFATVRKVLSMPQVNIVKKTEVQTGGFSKESILPKRNSDKLIARKKDWDPKKYGGFDSPTVAYSVLVVAKVEKGKSKKLKSVKELLGITIMERSSFEKNPIDFLEAKGYKEVKKDLIIKLPKYSLFELENGRKRMLASAGELQKGNELALPSKYVNFLYLASHYEKLKGSPEDNEQKQLFVEQHKHYLDEIIEQISEFSKRVILADANLDKVLSAYNKHRDKPIREQAENIIHLFTLTNLGAPAAFKYFDTTIDRKRYTSTKEVLDATLIHQSITGLYETRIDLSQLGGDGGGGGGSGGGGSGGGGSGGLLGRDLLTKLKAQIQFSTEGPQVTWEDRPAMCLVLNLEEEYRLHEKPVPPSIDPSWLQLFPMVWAEKAGMGLANQVPPVVVELKSDASPVAVRQYPMSKEAREGIRPHIQRFLDLGILVPCQSPWNTPLLPVKKPGTNDYRPVQDLREVNKRVQDIHPTVPNPYNLLSSLPPSHTWYSVLDLKDAFFCLKLHPNSQPLFAFEWRDPEKGNTGQLTWTRLPQGFKNSPTLFNEALHRDLASFRALNPQVVMLQYVDDLLVAAPTYRDCKEGTRRLLQELSKLGYRVSAKKAQLCREEVTYLGYLLKGGKRWLTPARKATVMKIPTPTTPRQVREFLGKAGFCRLFIPGFASLAAPLYPLTRPKVPFTWTEAHQEAFGRIKEALLSAPALALPDLTKPFALYVDEKEGVARGVLTQTLGPWRRPVAYLSKKLDPVASGWPTCLKAIAAVALLLKDADKLTLGQNVLVIAPHNLESIVRQPPDRWMTNARMTHYQSLLLNERVSFAPPAILNPATLLPVESDDTPIHICSEILAEETGTRPDLRDQPLPGVPAWYTDGSSFIMDGRRQAGAAIVDNKRTVWASNLPEGTSAQKAELIALTQALRLAEGKSINIYTDSRYAFATAHVHGAIYKQRGWLTSAGKDIKNKEEILALLEAIHLPKRVAIIHCPGHQRGTDPVATGNRKADEAAKQAAQSTRILTETTKNAGKRTADGSEFEKRTADGSEFESPKKKAKVE

SEQ ID NO: 1730 - protein, 2125 aa, synthetic construct
MPAAKRVKLDGGDKKYSIGLDIGTNSVGWAVITDEYKVPSKKFKVLGNTDRHSIKKNLIGALLFDSGETAEATRLKRTARRRYTRRKNRICYLQEIFSNEMAKVDDSFFHRLEESFLVEEDKKHERHPIFGNIVDEVAYHEKYPTIYHLRKKLVDSTDKADLRLIYLALAHMIKFRGHFLIEGDLNPDNSDVDKLFIQLVQTYNQLFEENPINASGVDAKAILSARLSKSRRLENLIAQLPGEKKNGLFGNLIALSLGLTPNFKSNFDLAEDAKLQLSKDTYDDDLDNLLAQIGDQYADLFLAAKNLSDAILLSDILRVNTEITKAPLSASMIKRYDEHHQDLTLLKALVRQQLPEKYKEIFFDQSKNGYAGYIDGGASQEEFYKFIKPILEKMDGTEELLVKLNREDLLRKQRTFDNGSIPHQIHLGELHAILRRQEDFYPFLKDNREKIEKILTFRIPYYVGPLARGNSRFAWMTRKSEETITPWNFEEVVDKGASAQSFIERMTNFDKNLPNEKVLPKHSLLYEYFTVYNELTKVKYVTEGMRKPAFLSGEQKKAIVDLLFKTNRKVTVKQLKEDYFKKIECFDSVEISGVEDRFNASLGTYHDLLKIIKDKDFLDNEENEDILEDIVLTLTLFEDREMIEERLKTYAHLFDDKVMKQLKRRRYTGWGRLSRKLINGIRDKQSGKTILDFLKSDGFANRNFMQLIHDDSLTFKEDIQKAQVSGQGDSLHEHIANLAGSPAIKKGILQTVKVVDELVKVMGRHKPENIVIEMARENQTTQKGQKNSRERMKRIEEGIKELGSQILKEHPVENTQLQNEKLYLYYLQNGRDMYVDQELDINRLSDYDVDHIVPQSFLKDDSIDNKVLTRSDKARGKSDNVPSEEVVKKMKNYWRQLLNAKLITQRKFDNLTKAERGGLSELDKAGFIKRQLVETRQITKHVAQILDSRMNTKYDENDKLIREVKVITLKSKLVSDFRKDFQFYKVREINNYHHAHDAYLNAVVGTALIKKYPKLESEFVYGDYKVYDVRKMIAKSEQEIGKATAKYFFYSNIMNFFKTEITLANGEIRKRPLIETNGETGEIVWDKGRDFATVRKVLSMPQVNIVKKTEVQTGGFSKESILPKRNSDKLIARKKDWDPKKYGGFDSPTVAYSVLVVAKVEKGKSKKLKSVKELLGITIMERSSFEKNPIDFLEAKGYKEVKKDLIIKLPKYSLFELENGRKRMLASAGELQKGNELALPSKYVNFLYLASHYEKLKGSPEDNEQKQLFVEQHKHYLDEIIEQISEFSKRVILADANLDKVLSAYNKHRDKPIREQAENIIHLFTLTNLGAPAAFKYFDTTIDRKRYTSTKEVLDATLIHQSITGLYETRIDLSQLGGDGGGGSPAPGGGGGLLGRDLLTKLKAQIQFSTEGPQVTWEDRPAMCLVLNLEEEYRLHEKPVPPSIDPSWLQLFPMVWAEKAGMGLANQVPPVVVELKSDASPVAVRQYPMSKEAREGIRPHIQRFLDLGILVPCQSPWNTPLLPVKKPGTNDYRPVQDLREVNKRVQDIHPTVPNPYNLLSSLPPSHTWYSVLDLKDAFFCLKLHPNSQPLFAFEWRDPEKGNTGQLTWTRLPQGFKNSPTLFNEALHRDLASFRALNPQVVMLQYVDDLLVAAPTYRDCKEGTRRLLQELSKLGYRVSAKKAQLCREEVTYLGYLLKGGKRWLTPARKATVMKIPTPTTPRQVREFLGKAGFCRLFIPGFASLAAPLYPLTRPKVPFTWTEAHQEAFGRIKEALLSAPALALPDLTKPFALYVDEKEGVARGVLTQTLGPWRRPVAYLSKKLDPVASGWPTCLKAIAAVALLLKDADKLTLGQNVLVIAPHNLESIVRQPPDRWMTNARMTHYQSLLLNERVSFAPPAILNPATLLPVESDDTPIHICSEILAEETGTRPDLRDQPLPGVPAWYTDGSSFIMDGRRQAGAAIVDNKRTVWASNLPEGTSAQKAELIALTQALRLAEGKSINIYTDSRYAFATAHVHGAIYKQRGWLTSAGKDIKNKEEILALLEAIHLPKRVAIIHCPGHQRGTDPVATGNRKADEAAKQAAQSTRILTETTKNAGKRTADGSEFEKRTADGSEFESPKKKAKVE

SEQ ID NO: 1731 - protein, 2122 aa, synthetic construct
MPAAKRVKLDGGDKKYSIGLDIGTNSVGWAVITDEYKVPSKKFKVLGNTDRHSIKKNLIGALLFDSGETAEATRLKRTARRRYTRRKNRICYLQEIFSNEMAKVDDSFFHRLEESFLVEEDKKHERHPIFGNIVDEVAYHEKYPTIYHLRKKLVDSTDKADLRLIYLALAHMIKFRGHFLIEGDLNPDNSDVDKLFIQLVQTYNQLFEENPINASGVDAKAILSARLSKSRRLENLIAQLPGEKKNGLFGNLIALSLGLTPNFKSNFDLAEDAKLQLSKDTYDDDLDNLLAQIGDQYADLFLAAKNLSDAILLSDILRVNTEITKAPLSASMIKRYDEHHQDLTLLKALVRQQLPEKYKEIFFDQSKNGYAGYIDGGASQEEFYKFIKPILEKMDGTEELLVKLNREDLLRKQRTFDNGSIPHQIHLGELHAILRRQEDFYPFLKDNREKIEKILTFRIPYYVGPLARGNSRFAWMTRKSEETITPWNFEEVVDKGASAQSFIERMTNFDKNLPNEKVLPKHSLLYEYFTVYNELTKVKYVTEGMRKPAFLSGEQKKAIVDLLFKTNRKVTVKQLKEDYFKKIECFDSVEISGVEDRFNASLGTYHDLLKIIKDKDFLDNEENEDILEDIVLTLTLFEDREMIEERLKTYAHLFDDKVMKQLKRRRYTGWGRLSRKLINGIRDKQSGKTILDFLKSDGFANRNFMQLIHDDSLTFKEDIQKAQVSGQGDSLHEHIANLAGSPAIKKGILQTVKVVDELVKVMGRHKPENIVIEMARENQTTQKGQKNSRERMKRIEEGIKELGSQILKEHPVENTQLQNEKLYLYYLQNGRDMYVDQELDINRLSDYDVDHIVPQSFLKDDSIDNKVLTRSDKARGKSDNVPSEEVVKKMKNYWRQLLNAKLITQRKFDNLTKAERGGLSELDKAGFIKRQLVETRQITKHVAQILDSRMNTKYDENDKLIREVKVITLKSKLVSDFRKDFQFYKVREINNYHHAHDAYLNAVVGTALIKKYPKLESEFVYGDYKVYDVRKMIAKSEQEIGKATAKYFFYSNIMNFFKTEITLANGEIRKRPLIETNGETGEIVWDKGRDFATVRKVLSMPQVNIVKKTEVQTGGFSKESILPKRNSDKLIARKKDWDPKKYGGFDSPTVAYSVLVVAKVEKGKSKKLKSVKELLGITIMERSSFEKNPIDFLEAKGYKEVKKDLIIKLPKYSLFELENGRKRMLASAGELQKGNELALPSKYVNFLYLASHYEKLKGSPEDNEQKQLFVEQHKHYLDEIIEQISEFSKRVILADANLDKVLSAYNKHRDKPIREQAENIIHLFTLTNLGAPAAFKYFDTTIDRKRYTSTKEVLDATLIHQSITGLYETRIDLSQLGGDGGGSSPAPGGLLGRDLLTKLKAQIQFSTEGPQVTWEDRPAMCLVLNLEEEYRLHEKPVPPSIDPSWLQLFPMVWAEKAGMGLANQVPPVVVELKSDASPVAVRQYPMSKEAREGIRPHIQRFLDLGILVPCQSPWNTPLLPVKKPGTNDYRPVQDLREVNKRVQDIHPTVPNPYNLLSSLPPSHTWYSVLDLKDAFFCLKLHPNSQPLFAFEWRDPEKGNTGQLTWTRLPQGFKNSPTLFNEALHRDLASFRALNPQVVMLQYVDDLLVAAPTYRDCKEGTRRLLQELSKLGYRVSAKKAQLCREEVTYLGYLLKGGKRWLTPARKATVMKIPTPTTPRQVREFLGKAGFCRLFIPGFASLAAPLYPLTRPKVPFTWTEAHQEAFGRIKEALLSAPALALPDLTKPFALYVDEKEGVARGVLTQTLGPWRRPVAYLSKKLDPVASGWPTCLKAIAAVALLLKDADKLTLGQNVLVIAPHNLESIVRQPPDRWMTNARMTHYQSLLLNERVSFAPPAILNPATLLPVESDDTPIHICSEILAEETGTRPDLRDQPLPGVPAWYTDGSSFIMDGRRQAGAAIVDNKRTVWASNLPEGTSAQKAELIALTQALRLAEGKSINIYTDSRYAFATAHVHGAIYKQRGWLTSAGKDIKNKEEILALLEAIHLPKRVAIIHCPGHQRGTDPVATGNRKADEAAKQAAQSTRILTETTKNAGKRTADGSEFEKRTADGSEFESPKKKAKVE

SEQ ID NO: 1732 - protein, 2125 aa, synthetic construct
MPAAKRVKLDGGDKKYSIGLDIGTNSVGWAVITDEYKVPSKKFKVLGNTDRHSIKKNLIGALLFDSGETAEATRLKRTARRRYTRRKNRICYLQEIFSNEMAKVDDSFFHRLEESFLVEEDKKHERHPIFGNIVDEVAYHEKYPTIYHLRKKLVDSTDKADLRLIYLALAHMIKFRGHFLIEGDLNPDNSDVDKLFIQLVQTYNQLFEENPINASGVDAKAILSARLSKSRRLENLIAQLPGEKKNGLFGNLIALSLGLTPNFKSNFDLAEDAKLQLSKDTYDDDLDNLLAQIGDQYADLFLAAKNLSDAILLSDILRVNTEITKAPLSASMIKRYDEHHQDLTLLKALVRQQLPEKYKEIFFDQSKNGYAGYIDGGASQEEFYKFIKPILEKMDGTEELLVKLNREDLLRKQRTFDNGSIPHQIHLGELHAILRRQEDFYPFLKDNREKIEKILTFRIPYYVGPLARGNSRFAWMTRKSEETITPWNFEEVVDKGASAQSFIERMTNFDKNLPNEKVLPKHSLLYEYFTVYNELTKVKYVTEGMRKPAFLSGEQKKAIVDLLFKTNRKVTVKQLKEDYFKKIECFDSVEISGVEDRFNASLGTYHDLLKIIKDKDFLDNEENEDILEDIVLTLTLFEDREMIEERLKTYAHLFDDKVMKQLKRRRYTGWGRLSRKLINGIRDKQSGKTILDFLKSDGFANRNFMQLIHDDSLTFKEDIQKAQVSGQGDSLHEHIANLAGSPAIKKGILQTVKVVDELVKVMGRHKPENIVIEMARENQTTQKGQKNSRERMKRIEEGIKELGSQILKEHPVENTQLQNEKLYLYYLQNGRDMYVDQELDINRLSDYDVDHIVPQSFLKDDSIDNKVLTRSDKARGKSDNVPSEEVVKKMKNYWRQLLNAKLITQRKFDNLTKAERGGLSELDKAGFIKRQLVETRQITKHVAQILDSRMNTKYDENDKLIREVKVITLKSKLVSDFRKDFQFYKVREINNYHHAHDAYLNAVVGTALIKKYPKLESEFVYGDYKVYDVRKMIAKSEQEIGKATAKYFFYSNIMNFFKTEITLANGEIRKRPLIETNGETGEIVWDKGRDFATVRKVLSMPQVNIVKKTEVQTGGFSKESILPKRNSDKLIARKKDWDPKKYGGFDSPTVAYSVLVVAKVEKGKSKKLKSVKELLGITIMERSSFEKNPIDFLEAKGYKEVKKDLIIKLPKYSLFELENGRKRMLASAGELQKGNELALPSKYVNFLYLASHYEKLKGSPEDNEQKQLFVEQHKHYLDEIIEQISEFSKRVILADANLDKVLSAYNKHRDKPIREQAENIIHLFTLTNLGAPAAFKYFDTTIDRKRYTSTKEVLDATLIHQSITGLYETRIDLSQLGGDGGGGSPAPGSSGGLLGRDLLTKLKAQIQFSTEGPQVTWEDRPAMCLVLNLEEEYRLHEKPVPPSIDPSWLQLFPMVWAEKAGMGLANQVPPVVVELKSDASPVAVRQYPMSKEAREGIRPHIQRFLDLGILVPCQSPWNTPLLPVKKPGTNDYRPVQDLREVNKRVQDIHPTVPNPYNLLSSLPPSHTWYSVLDLKDAFFCLKLHPNSQPLFAFEWRDPEKGNTGQLTWTRLPQGFKNSPTLFNEALHRDLASFRALNPQVVMLQYVDDLLVAAPTYRDCKEGTRRLLQELSKLGYRVSAKKAQLCREEVTYLGYLLKGGKRWLTPARKATVMKIPTPTTPRQVREFLGKAGFCRLFIPGFASLAAPLYPLTRPKVPFTWTEAHQEAFGRIKEALLSAPALALPDLTKPFALYVDEKEGVARGVLTQTLGPWRRPVAYLSKKLDPVASGWPTCLKAIAAVALLLKDADKLTLGQNVLVIAPHNLESIVRQPPDRWMTNARMTHYQSLLLNERVSFAPPAILNPATLLPVESDDTPIHICSEILAEETGTRPDLRDQPLPGVPAWYTDGSSFIMDGRRQAGAAIVDNKRTVWASNLPEGTSAQKAELIALTQALRLAEGKSINIYTDSRYAFATAHVHGAIYKQRGWLTSAGKDIKNKEEILALLEAIHLPKRVAIIHCPGHQRGTDPVATGNRKADEAAKQAAQSTRILTETTKNAGKRTADGSEFEKRTADGSEFESPKKKAKVE

SEQ ID NO: 1733 - protein, 2122 aa, synthetic construct
MPAAKRVKLDGGDKKYSIGLDIGTNSVGWAVITDEYKVPSKKFKVLGNTDRHSIKKNLIGALLFDSGETAEATRLKRTARRRYTRRKNRICYLQEIFSNEMAKVDDSFFHRLEESFLVEEDKKHERHPIFGNIVDEVAYHEKYPTIYHLRKKLVDSTDKADLRLIYLALAHMIKFRGHFLIEGDLNPDNSDVDKLFIQLVQTYNQLFEENPINASGVDAKAILSARLSKSRRLENLIAQLPGEKKNGLFGNLIALSLGLTPNFKSNFDLAEDAKLQLSKDTYDDDLDNLLAQIGDQYADLFLAAKNLSDAILLSDILRVNTEITKAPLSASMIKRYDEHHQDLTLLKALVRQQLPEKYKEIFFDQSKNGYAGYIDGGASQEEFYKFIKPILEKMDGTEELLVKLNREDLLRKQRTFDNGSIPHQIHLGELHAILRRQEDFYPFLKDNREKIEKILTFRIPYYVGPLARGNSRFAWMTRKSEETITPWNFEEVVDKGASAQSFIERMTNFDKNLPNEKVLPKHSLLYEYFTVYNELTKVKYVTEGMRKPAFLSGEQKKAIVDLLFKTNRKVTVKQLKEDYFKKIECFDSVEISGVEDRFNASLGTYHDLLKIIKDKDFLDNEENEDILEDIVLTLTLFEDREMIEERLKTYAHLFDDKVMKQLKRRRYTGWGRLSRKLINGIRDKQSGKTILDFLKSDGFANRNFMQLIHDDSLTFKEDIQKAQVSGQGDSLHEHIANLAGSPAIKKGILQTVKVVDELVKVMGRHKPENIVIEMARENQTTQKGQKNSRERMKRIEEGIKELGSQILKEHPVENTQLQNEKLYLYYLQNGRDMYVDQELDINRLSDYDVDHIVPQSFLKDDSIDNKVLTRSDKARGKSDNVPSEEVVKKMKNYWRQLLNAKLITQRKFDNLTKAERGGLSELDKAGFIKRQLVETRQITKHVAQILDSRMNTKYDENDKLIREVKVITLKSKLVSDFRKDFQFYKVREINNYHHAHDAYLNAVVGTALIKKYPKLESEFVYGDYKVYDVRKMIAKSEQEIGKATAKYFFYSNIMNFFKTEITLANGEIRKRPLIETNGETGEIVWDKGRDFATVRKVLSMPQVNIVKKTEVQTGGFSKESILPKRNSDKLIARKKDWDPKKYGGFDSPTVAYSVLVVAKVEKGKSKKLKSVKELLGITIMERSSFEKNPIDFLEAKGYKEVKKDLIIKLPKYSLFELENGRKRMLASAGELQKGNELALPSKYVNFLYLASHYEKLKGSPEDNEQKQLFVEQHKHYLDEIIEQISEFSKRVILADANLDKVLSAYNKHRDKPIREQAENIIHLFTLTNLGAPAAFKYFDTTIDRKRYTSTKEVLDATLIHQSITGLYETRIDLSQLGGDGGGGSGSSGGLLGRDLLTKLKAQIQFSTEGPQVTWEDRPAMCLVLNLEEEYRLHEKPVPPSIDPSWLQLFPMVWAEKAGMGLANQVPPVVVELKSDASPVAVRQYPMSKEAREGIRPHIQRFLDLGILVPCQSPWNTPLLPVKKPGTNDYRPVQDLREVNKRVQDIHPTVPNPYNLLSSLPPSHTWYSVLDLKDAFFCLKLHPNSQPLFAFEWRDPEKGNTGQLTWTRLPQGFKNSPTLFNEALHRDLASFRALNPQVVMLQYVDDLLVAAPTYRDCKEGTRRLLQELSKLGYRVSAKKAQLCREEVTYLGYLLKGGKRWLTPARKATVMKIPTPTTPRQVREFLGKAGFCRLFIPGFASLAAPLYPLTRPKVPFTWTEAHQEAFGRIKEALLSAPALALPDLTKPFALYVDEKEGVARGVLTQTLGPWRRPVAYLSKKLDPVASGWPTCLKAIAAVALLLKDADKLTLGQNVLVIAPHNLESIVRQPPDRWMTNARMTHYQSLLLNERVSFAPPAILNPATLLPVESDDTPIHICSEILAEETGTRPDLRDQPLPGVPAWYTDGSSFIMDGRRQAGAAIVDNKRTVWASNLPEGTSAQKAELIALTQALRLAEGKSINIYTDSRYAFATAHVHGAIYKQRGWLTSAGKDIKNKEEILALLEAIHLPKRVAIIHCPGHQRGTDPVATGNRKADEAAKQAAQSTRILTETTKNAGKRTADGSEFEKRTADGSEFESPKKKAKVE

SEQ ID NO: 1734 - protein, 2125 aa, synthetic construct
MPAAKRVKLDGGDKKYSIGLDIGTNSVGWAVITDEYKVPSKKFKVLGNTDRHSIKKNLIGALLFDSGETAEATRLKRTARRRYTRRKNRICYLQEIFSNEMAKVDDSFFHRLEESFLVEEDKKHERHPIFGNIVDEVAYHEKYPTIYHLRKKLVDSTDKADLRLIYLALAHMIKFRGHFLIEGDLNPDNSDVDKLFIQLVQTYNQLFEENPINASGVDAKAILSARLSKSRRLENLIAQLPGEKKNGLFGNLIALSLGLTPNFKSNFDLAEDAKLQLSKDTYDDDLDNLLAQIGDQYADLFLAAKNLSDAILLSDILRVNTEITKAPLSASMIKRYDEHHQDLTLLKALVRQQLPEKYKEIFFDQSKNGYAGYIDGGASQEEFYKFIKPILEKMDGTEELLVKLNREDLLRKQRTFDNGSIPHQIHLGELHAILRRQEDFYPFLKDNREKIEKILTFRIPYYVGPLARGNSRFAWMTRKSEETITPWNFEEVVDKGASAQSFIERMTNFDKNLPNEKVLPKHSLLYEYFTVYNELTKVKYVTEGMRKPAFLSGEQKKAIVDLLFKTNRKVTVKQLKEDYFKKIECFDSVEISGVEDRFNASLGTYHDLLKIIKDKDFLDNEENEDILEDIVLTLTLFEDREMIEERLKTYAHLFDDKVMKQLKRRRYTGWGRLSRKLINGIRDKQSGKTILDFLKSDGFANRNFMQLIHDDSLTFKEDIQKAQVSGQGDSLHEHIANLAGSPAIKKGILQTVKVVDELVKVMGRHKPENIVIEMARENQTTQKGQKNSRERMKRIEEGIKELGSQILKEHPVENTQLQNEKLYLYYLQNGRDMYVDQELDINRLSDYDVDHIVPQSFLKDDSIDNKVLTRSDKARGKSDNVPSEEVVKKMKNYWRQLLNAKLITQRKFDNLTKAERGGLSELDKAGFIKRQLVETRQITKHVAQILDSRMNTKYDENDKLIREVKVITLKSKLVSDFRKDFQFYKVREINNYHHAHDAYLNAVVGTALIKKYPKLESEFVYGDYKVYDVRKMIAKSEQEIGKATAKYFFYSNIMNFFKTEITLANGEIRKRPLIETNGETGEIVWDKGRDFATVRKVLSMPQVNIVKKTEVQTGGFSKESILPKRNSDKLIARKKDWDPKKYGGFDSPTVAYSVLVVAKVEKGKSKKLKSVKELLGITIMERSSFEKNPIDFLEAKGYKEVKKDLIIKLPKYSLFELENGRKRMLASAGELQKGNELALPSKYVNFLYLASHYEKLKGSPEDNEQKQLFVEQHKHYLDEIIEQISEFSKRVILADANLDKVLSAYNKHRDKPIREQAENIIHLFTLTNLGAPAAFKYFDTTIDRKRYTSTKEVLDATLIHQSITGLYETRIDLSQLGGDGGGGGGSSPAPGGLLGRDLLTKLKAQIQFSTEGPQVTWEDRPAMCLVLNLEEEYRLHEKPVPPSIDPSWLQLFPMVWAEKAGMGLANQVPPVVVELKSDASPVAVRQYPMSKEAREGIRPHIQRFLDLGILVPCQSPWNTPLLPVKKPGTNDYRPVQDLREVNKRVQDIHPTVPNPYNLLSSLPPSHTWYSVLDLKDAFFCLKLHPNSQPLFAFEWRDPEKGNTGQLTWTRLPQGFKNSPTLFNEALHRDLASFRALNPQVVMLQYVDDLLVAAPTYRDCKEGTRRLLQELSKLGYRVSAKKAQLCREEVTYLGYLLKGGKRWLTPARKATVMKIPTPTTPRQVREFLGKAGFCRLFIPGFASLAAPLYPLTRPKVPFTWTEAHQEAFGRIKEALLSAPALALPDLTKPFALYVDEKEGVARGVLTQTLGPWRRPVAYLSKKLDPVASGWPTCLKAIAAVALLLKDADKLTLGQNVLVIAPHNLESIVRQPPDRWMTNARMTHYQSLLLNERVSFAPPAILNPATLLPVESDDTPIHICSEILAEETGTRPDLRDQPLPGVPAWYTDGSSFIMDGRRQAGAAIVDNKRTVWASNLPEGTSAQKAELIALTQALRLAEGKSINIYTDSRYAFATAHVHGAIYKQRGWLTSAGKDIKNKEEILALLEAIHLPKRVAIIHCPGHQRGTDPVATGNRKADEAAKQAAQSTRILTETTKNAGKRTADGSEFEKRTADGSEFESPKKKAKVE

SEQ ID NO: 1735 - protein, 2125 aa, synthetic construct
MPAAKRVKLDGGDKKYSIGLDIGTNSVGWAVITDEYKVPSKKFKVLGNTDRHSIKKNLIGALLFDSGETAEATRLKRTARRRYTRRKNRICYLQEIFSNEMAKVDDSFFHRLEESFLVEEDKKHERHPIFGNIVDEVAYHEKYPTIYHLRKKLVDSTDKADLRLIYLALAHMIKFRGHFLIEGDLNPDNSDVDKLFIQLVQTYNQLFEENPINASGVDAKAILSARLSKSRRLENLIAQLPGEKKNGLFGNLIALSLGLTPNFKSNFDLAEDAKLQLSKDTYDDDLDNLLAQIGDQYADLFLAAKNLSDAILLSDILRVNTEITKAPLSASMIKRYDEHHQDLTLLKALVRQQLPEKYKEIFFDQSKNGYAGYIDGGASQEEFYKFIKPILEKMDGTEELLVKLNREDLLRKQRTFDNGSIPHQIHLGELHAILRRQEDFYPFLKDNREKIEKILTFRIPYYVGPLARGNSRFAWMTRKSEETITPWNFEEVVDKGASAQSFIERMTNFDKNLPNEKVLPKHSLLYEYFTVYNELTKVKYVTEGMRKPAFLSGEQKKAIVDLLFKTNRKVTVKQLKEDYFKKIECFDSVEISGVEDRFNASLGTYHDLLKIIKDKDFLDNEENEDILEDIVLTLTLFEDREMIEERLKTYAHLFDDKVMKQLKRRRYTGWGRLSRKLINGIRDKQSGKTILDFLKSDGFANRNFMQLIHDDSLTFKEDIQKAQVSGQGDSLHEHIANLAGSPAIKKGILQTVKVVDELVKVMGRHKPENIVIEMARENQTTQKGQKNSRERMKRIEEGIKELGSQILKEHPVENTQLQNEKLYLYYLQNGRDMYVDQELDINRLSDYDVDHIVPQSFLKDDSIDNKVLTRSDKARGKSDNVPSEEVVKKMKNYWRQLLNAKLITQRKFDNLTKAERGGLSELDKAGFIKRQLVETRQITKHVAQILDSRMNTKYDENDKLIREVKVITLKSKLVSDFRKDFQFYKVREINNYHHAHDAYLNAVVGTALIKKYPKLESEFVYGDYKVYDVRKMIAKSEQEIGKATAKYFFYSNIMNFFKTEITLANGEIRKRPLIETNGETGEIVWDKGRDFATVRKVLSMPQVNIVKKTEVQTGGFSKESILPKRNSDKLIARKKDWDPKKYGGFDSPTVAYSVLVVAKVEKGKSKKLKSVKELLGITIMERSSFEKNPIDFLEAKGYKEVKKDLIIKLPKYSLFELENGRKRMLASAGELQKGNELALPSKYVNFLYLASHYEKLKGSPEDNEQKQLFVEQHKHYLDEIIEQISEFSKRVILADANLDKVLSAYNKHRDKPIREQAENIIHLFTLTNLGAPAAFKYFDTTIDRKRYTSTKEVLDATLIHQSITGLYETRIDLSQLGGDGGGSSGGSPAPGGLLGRDLLTKLKAQIQFSTEGPQVTWEDRPAMCLVLNLEEEYRLHEKPVPPSIDPSWLQLFPMVWAEKAGMGLANQVPPVVVELKSDASPVAVRQYPMSKEAREGIRPHIQRFLDLGILVPCQSPWNTPLLPVKKPGTNDYRPVQDLREVNKRVQDIHPTVPNPYNLLSSLPPSHTWYSVLDLKDAFFCLKLHPNSQPLFAFEWRDPEKGNTGQLTWTRLPQGFKNSPTLFNEALHRDLASFRALNPQVVMLQYVDDLLVAAPTYRDCKEGTRRLLQELSKLGYRVSAKKAQLCREEVTYLGYLLKGGKRWLTPARKATVMKIPTPTTPRQVREFLGKAGFCRLFIPGFASLAAPLYPLTRPKVPFTWTEAHQEAFGRIKEALLSAPALALPDLTKPFALYVDEKEGVARGVLTQTLGPWRRPVAYLSKKLDPVASGWPTCLKAIAAVALLLKDADKLTLGQNVLVIAPHNLESIVRQPPDRWMTNARMTHYQSLLLNERVSFAPPAILNPATLLPVESDDTPIHICSEILAEETGTRPDLRDQPLPGVPAWYTDGSSFIMDGRRQAGAAIVDNKRTVWASNLPEGTSAQKAELIALTQALRLAEGKSINIYTDSRYAFATAHVHGAIYKQRGWLTSAGKDIKNKEEILALLEAIHLPKRVAIIHCPGHQRGTDPVATGNRKADEAAKQAAQSTRILTETTKNAGKRTADGSEFEKRTADGSEFESPKKKAKVE

SEQ ID NO: 1736 - protein, 2127 aa, synthetic construct
MPAAKRVKLDGGDKKYSIGLDIGTNSVGWAVITDEYKVPSKKFKVLGNTDRHSIKKNLIGALLFDSGETAEATRLKRTARRRYTRRKNRICYLQEIFSNEMAKVDDSFFHRLEESFLVEEDKKHERHPIFGNIVDEVAYHEKYPTIYHLRKKLVDSTDKADLRLIYLALAHMIKFRGHFLIEGDLNPDNSDVDKLFIQLVQTYNQLFEENPINASGVDAKAILSARLSKSRRLENLIAQLPGEKKNGLFGNLIALSLGLTPNFKSNFDLAEDAKLQLSKDTYDDDLDNLLAQIGDQYADLFLAAKNLSDAILLSDILRVNTEITKAPLSASMIKRYDEHHQDLTLLKALVRQQLPEKYKEIFFDQSKNGYAGYIDGGASQEEFYKFIKPILEKMDGTEELLVKLNREDLLRKQRTFDNGSIPHQIHLGELHAILRRQEDFYPFLKDNREKIEKILTFRIPYYVGPLARGNSRFAWMTRKSEETITPWNFEEVVDKGASAQSFIERMTNFDKNLPNEKVLPKHSLLYEYFTVYNELTKVKYVTEGMRKPAFLSGEQKKAIVDLLFKTNRKVTVKQLKEDYFKKIECFDSVEISGVEDRFNASLGTYHDLLKIIKDKDFLDNEENEDILEDIVLTLTLFEDREMIEERLKTYAHLFDDKVMKQLKRRRYTGWGRLSRKLINGIRDKQSGKTILDFLKSDGFANRNFMQLIHDDSLTFKEDIQKAQVSGQGDSLHEHIANLAGSPAIKKGILQTVKVVDELVKVMGRHKPENIVIEMARENQTTQKGQKNSRERMKRIEEGIKELGSQILKEHPVENTQLQNEKLYLYYLQNGRDMYVDQELDINRLSDYDVDHIVPQSFLKDDSIDNKVLTRSDKARGKSDNVPSEEVVKKMKNYWRQLLNAKLITQRKFDNLTKAERGGLSELDKAGFIKRQLVETRQITKHVAQILDSRMNTKYDENDKLIREVKVITLKSKLVSDFRKDFQFYKVREINNYHHAHDAYLNAVVGTALIKKYPKLESEFVYGDYKVYDVRKMIAKSEQEIGKATAKYFFYSNIMNFFKTEITLANGEIRKRPLIETNGETGEIVWDKGRDFATVRKVLSMPQVNIVKKTEVQTGGFSKESILPKRNSDKLIARKKDWDPKKYGGFDSPTVAYSVLVVAKVEKGKSKKLKSVKELLGITIMERSSFEKNPIDFLEAKGYKEVKKDLIIKLPKYSLFELENGRKRMLASAGELQKGNELALPSKYVNFLYLASHYEKLKGSPEDNEQKQLFVEQHKHYLDEIIEQISEFSKRVILADANLDKVLSAYNKHRDKPIREQAENIIHLFTLTNLGAPAAFKYFDTTIDRKRYTSTKEVLDATLIHQSITGLYETRIDLSQLGGDGGEAAAKGGGGGSGGLLGRDLLTKLKAQIQFSTEGPQVTWEDRPAMCLVLNLEEEYRLHEKPVPPSIDPSWLQLFPMVWAEKAGMGLANQVPPVVVELKSDASPVAVRQYPMSKEAREGIRPHIQRFLDLGILVPCQSPWNTPLLPVKKPGTNDYRPVQDLREVNKRVQDIHPTVPNPYNLLSSLPPSHTWYSVLDLKDAFFCLKLHPNSQPLFAFEWRDPEKGNTGQLTWTRLPQGFKNSPTLFNEALHRDLASFRALNPQVVMLQYVDDLLVAAPTYRDCKEGTRRLLQELSKLGYRVSAKKAQLCREEVTYLGYLLKGGKRWLTPARKATVMKIPTPTTPRQVREFLGKAGFCRLFIPGFASLAAPLYPLTRPKVPFTWTEAHQEAFGRIKEALLSAPALALPDLTKPFALYVDEKEGVARGVLTQTLGPWRRPVAYLSKKLDPVASGWPTCLKAIAAVALLLKDADKLTLGQNVLVIAPHNLESIVRQPPDRWMTNARMTHYQSLLLNERVSFAPPAILNPATLLPVESDDTPIHICSEILAEETGTRPDLRDQPLPGVPAWYTDGSSFIMDGRRQAGAAIVDNKRTVWASNLPEGTSAQKAELIALTQALRLAEGKSINIYTDSRYAFATAHVHGAIYKQRGWLTSAGKDIKNKEEILALLEAIHLPKRVAIIHCPGHQRGTDPVATGNRKADEAAKQAAQSTRILTETTKNAGKRTADGSEFEKRTADGSEFESPKKKAKVE

SEQ ID NO: 1737 - protein, 2127 aa, synthetic construct
MPAAKRVKLDGGDKKYSIGLDIGTNSVGWAVITDEYKVPSKKFKVLGNTDRHSIKKNLIGALLFDSGETAEATRLKRTARRRYTRRKNRICYLQEIFSNEMAKVDDSFFHRLEESFLVEEDKKHERHPIFGNIVDEVAYHEKYPTIYHLRKKLVDSTDKADLRLIYLALAHMIKFRGHFLIEGDLNPDNSDVDKLFIQLVQTYNQLFEENPINASGVDAKAILSARLSKSRRLENLIAQLPGEKKNGLFGNLIALSLGLTPNFKSNFDLAEDAKLQLSKDTYDDDLDNLLAQIGDQYADLFLAAKNLSDAILLSDILRVNTEITKAPLSASMIKRYDEHHQDLTLLKALVRQQLPEKYKEIFFDQSKNGYAGYIDGGASQEEFYKFIKPILEKMDGTEELLVKLNREDLLRKQRTFDNGSIPHQIHLGELHAILRRQEDFYPFLKDNREKIEKILTFRIPYYVGPLARGNSRFAWMTRKSEETITPWNFEEVVDKGASAQSFIERMTNFDKNLPNEKVLPKHSLLYEYFTVYNELTKVKYVTEGMRKPAFLSGEQKKAIVDLLFKTNRKVTVKQLKEDYFKKIECFDSVEISGVEDRFNASLGTYHDLLKIIKDKDFLDNEENEDILEDIVLTLTLFEDREMIEERLKTYAHLFDDKVMKQLKRRRYTGWGRLSRKLINGIRDKQSGKTILDFLKSDGFANRNFMQLIHDDSLTFKEDIQKAQVSGQGDSLHEHIANLAGSPAIKKGILQTVKVVDELVKVMGRHKPENIVIEMARENQTTQKGQKNSRERMKRIEEGIKELGSQILKEHPVENTQLQNEKLYLYYLQNGRDMYVDQELDINRLSDYDVDHIVPQSFLKDDSIDNKVLTRSDKARGKSDNVPSEEVVKKMKNYWRQLLNAKLITQRKFDNLTKAERGGLSELDKAGFIKRQLVETRQITKHVAQILDSRMNTKYDENDKLIREVKVITLKSKLVSDFRKDFQFYKVREINNYHHAHDAYLNAVVGTALIKKYPKLESEFVYGDYKVYDVRKMIAKSEQEIGKATAKYFFYSNIMNFFKTEITLANGEIRKRPLIETNGETGEIVWDKGRDFATVRKVLSMPQVNIVKKTEVQTGGFSKESILPKRNSDKLIARKKDWDPKKYGGFDSPTVAYSVLVVAKVEKGKSKKLKSVKELLGITIMERSSFEKNPIDFLEAKGYKEVKKDLIIKLPKYSLFELENGRKRMLASAGELQKGNELALPSKYVNFLYLASHYEKLKGSPEDNEQKQLFVEQHKHYLDEIIEQISEFSKRVILADANLDKVLSAYNKHRDKPIREQAENIIHLFTLTNLGAPAAFKYFDTTIDRKRYTSTKEVLDATLIHQSITGLYETRIDLSQLGGDGGGSSEAAAKGGGGGLLGRDLLTKLKAQIQFSTEGPQVTWEDRPAMCLVLNLEEEYRLHEKPVPPSIDPSWLQLFPMVWAEKAGMGLANQVPPVVVELKSDASPVAVRQYPMSKEAREGIRPHIQRFLDLGILVPCQSPWNTPLLPVKKPGTNDYRPVQDLREVNKRVQDIHPTVPNPYNLLSSLPPSHTWYSVLDLKDAFFCLKLHPNSQPLFAFEWRDPEKGNTGQLTWTRLPQGFKNSPTLFNEALHRDLASFRALNPQVVMLQYVDDLLVAAPTYRDCKEGTRRLLQELSKLGYRVSAKKAQLCREEVTYLGYLLKGGKRWLTPARKATVMKIPTPTTPRQVREFLGKAGFCRLFIPGFASLAAPLYPLTRPKVPFTWTEAHQEAFGRIKEALLSAPALALPDLTKPFALYVDEKEGVARGVLTQTLGPWRRPVAYLSKKLDPVASGWPTCLKAIAAVALLLKDADKLTLGQNVLVIAPHNLESIVRQPPDRWMTNARMTHYQSLLLNERVSFAPPAILNPATLLPVESDDTPIHICSEILAEETGTRPDLRDQPLPGVPAWYTDGSSFIMDGRRQAGAAIVDNKRTVWASNLPEGTSAQKAELIALTQALRLAEGKSINIYTDSRYAFATAHVHGAIYKQRGWLTSAGKDIKNKEEILALLEAIHLPKRVAIIHCPGHQRGTDPVATGNRKADEAAKQAAQSTRILTETTKNAGKRTADGSEFEKRTADGSEFESPKKKAKVE

SEQ ID NO: 1738 - protein, 2125 aa, synthetic construct
MPAAKRVKLDGGDKKYSIGLDIGTNSVGWAVITDEYKVPSKKFKVLGNTDRHSIKKNLIGALLFDSGETAEATRLKRTARRRYTRRKNRICYLQEIFSNEMAKVDDSFFHRLEESFLVEEDKKHERHPIFGNIVDEVAYHEKYPTIYHLRKKLVDSTDKADLRLIYLALAHMIKFRGHFLIEGDLNPDNSDVDKLFIQLVQTYNQLFEENPINASGVDAKAILSARLSKSRRLENLIAQLPGEKKNGLFGNLIALSLGLTPNFKSNFDLAEDAKLQLSKDTYDDDLDNLLAQIGDQYADLFLAAKNLSDAILLSDILRVNTEITKAPLSASMIKRYDEHHQDLTLLKALVRQQLPEKYKEIFFDQSKNGYAGYIDGGASQEEFYKFIKPILEKMDGTEELLVKLNREDLLRKQRTFDNGSIPHQIHLGELHAILRRQEDFYPFLKDNREKIEKILTFRIPYYVGPLARGNSRFAWMTRKSEETITPWNFEEVVDKGASAQSFIERMTNFDKNLPNEKVLPKHSLLYEYFTVYNELTKVKYVTEGMRKPAFLSGEQKKAIVDLLFKTNRKVTVKQLKEDYFKKIECFDSVEISGVEDRFNASLGTYHDLLKIIKDKDFLDNEENEDILEDIVLTLTLFEDREMIEERLKTYAHLFDDKVMKQLKRRRYTGWGRLSRKLINGIRDKQSGKTILDFLKSDGFANRNFMQLIHDDSLTFKEDIQKAQVSGQGDSLHEHIANLAGSPAIKKGILQTVKVVDELVKVMGRHKPENIVIEMARENQTTQKGQKNSRERMKRIEEGIKELGSQILKEHPVENTQLQNEKLYLYYLQNGRDMYVDQELDINRLSDYDVDHIVPQSFLKDDSIDNKVLTRSDKARGKSDNVPSEEVVKKMKNYWRQLLNAKLITQRKFDNLTKAERGGLSELDKAGFIKRQLVETRQITKHVAQILDSRMNTKYDENDKLIREVKVITLKSKLVSDFRKDFQFYKVREINNYHHAHDAYLNAVVGTALIKKYPKLESEFVYGDYKVYDVRKMIAKSEQEIGKATAKYFFYSNIMNFFKTEITLANGEIRKRPLIETNGETGEIVWDKGRDFATVRKVLSMPQVNIVKKTEVQTGGFSKESILPKRNSDKLIARKKDWDPKKYGGFDSPTVAYSVLVVAKVEKGKSKKLKSVKELLGITIMERSSFEKNPIDFLEAKGYKEVKKDLIIKLPKYSLFELENGRKRMLASAGELQKGNELALPSKYVNFLYLASHYEKLKGSPEDNEQKQLFVEQHKHYLDEIIEQISEFSKRVILADANLDKVLSAYNKHRDKPIREQAENIIHLFTLTNLGAPAAFKYFDTTIDRKRYTSTKEVLDATLIHQSITGLYETRIDLSQLGGDGGGSSPAPGGSGGLLGRDLLTKLKAQIQFSTEGPQVTWEDRPAMCLVLNLEEEYRLHEKPVPPSIDPSWLQLFPMVWAEKAGMGLANQVPPVVVELKSDASPVAVRQYPMSKEAREGIRPHIQRFLDLGILVPCQSPWNTPLLPVKKPGTNDYRPVQDLREVNKRVQDIHPTVPNPYNLLSSLPPSHTWYSVLDLKDAFFCLKLHPNSQPLFAFEWRDPEKGNTGQLTWTRLPQGFKNSPTLFNEALHRDLASFRALNPQVVMLQYVDDLLVAAPTYRDCKEGTRRLLQELSKLGYRVSAKKAQLCREEVTYLGYLLKGGKRWLTPARKATVMKIPTPTTPRQVREFLGKAGFCRLFIPGFASLAAPLYPLTRPKVPFTWTEAHQEAFGRIKEALLSAPALALPDLTKPFALYVDEKEGVARGVLTQTLGPWRRPVAYLSKKLDPVASGWPTCLKAIAAVALLLKDADKLTLGQNVLVIAPHNLESIVRQPPDRWMTNARMTHYQSLLLNERVSFAPPAILNPATLLPVESDDTPIHICSEILAEETGTRPDLRDQPLPGVPAWYTDGSSFIMDGRRQAGAAIVDNKRTVWASNLPEGTSAQKAELIALTQALRLAEGKSINIYTDSRYAFATAHVHGAIYKQRGWLTSAGKDIKNKEEILALLEAIHLPKRVAIIHCPGHQRGTDPVATGNRKADEAAKQAAQSTRILTETTKNAGKRTADGSEFEKRTADGSEFESPKKKAKVE

SEQ ID NO: 1739 - protein, 2131 aa, synthetic construct
MPAAKRVKLDGGDKKYSIGLDIGTNSVGWAVITDEYKVPSKKFKVLGNTDRHSIKKNLIGALLFDSGETAEATRLKRTARRRYTRRKNRICYLQEIFSNEMAKVDDSFFHRLEESFLVEEDKKHERHPIFGNIVDEVAYHEKYPTIYHLRKKLVDSTDKADLRLIYLALAHMIKFRGHFLIEGDLNPDNSDVDKLFIQLVQTYNQLFEENPINASGVDAKAILSARLSKSRRLENLIAQLPGEKKNGLFGNLIALSLGLTPNFKSNFDLAEDAKLQLSKDTYDDDLDNLLAQIGDQYADLFLAAKNLSDAILLSDILRVNTEITKAPLSASMIKRYDEHHQDLTLLKALVRQQLPEKYKEIFFDQSKNGYAGYIDGGASQEEFYKFIKPILEKMDGTEELLVKLNREDLLRKQRTFDNGSIPHQIHLGELHAILRRQEDFYPFLKDNREKIEKILTFRIPYYVGPLARGNSRFAWMTRKSEETITPWNFEEVVDKGASAQSFIERMTNFDKNLPNEKVLPKHSLLYEYFTVYNELTKVKYVTEGMRKPAFLSGEQKKAIVDLLFKTNRKVTVKQLKEDYFKKIECFDSVEISGVEDRFNASLGTYHDLLKIIKDKDFLDNEENEDILEDIVLTLTLFEDREMIEERLKTYAHLFDDKVMKQLKRRRYTGWGRLSRKLINGIRDKQSGKTILDFLKSDGFANRNFMQLIHDDSLTFKEDIQKAQVSGQGDSLHEHIANLAGSPAIKKGILQTVKVVDELVKVMGRHKPENIVIEMARENQTTQKGQKNSRERMKRIEEGIKELGSQILKEHPVENTQLQNEKLYLYYLQNGRDMYVDQELDINRLSDYDVDHIVPQSFLKDDSIDNKVLTRSDKARGKSDNVPSEEVVKKMKNYWRQLLNAKLITQRKFDNLTKAERGGLSELDKAGFIKRQLVETRQITKHVAQILDSRMNTKYDENDKLIREVKVITLKSKLVSDFRKDFQFYKVREINNYHHAHDAYLNAVVGTALIKKYPKLESEFVYGDYKVYDVRKMIAKSEQEIGKATAKYFFYSNIMNFFKTEITLANGEIRKRPLIETNGETGEIVWDKGRDFATVRKVLSMPQVNIVKKTEVQTGGFSKESILPKRNSDKLIARKKDWDPKKYGGFDSPTVAYSVLVVAKVEKGKSKKLKSVKELLGITIMERSSFEKNPIDFLEAKGYKEVKKDLIIKLPKYSLFELENGRKRMLASAGELQKGNELALPSKYVNFLYLASHYEKLKGSPEDNEQKQLFVEQHKHYLDEIIEQISEFSKRVILADANLDKVLSAYNKHRDKPIREQAENIIHLFTLTNLGAPAAFKYFDTTIDRKRYTSTKEVLDATLIHQSITGLYETRIDLSQLGGDGGGGGGSEAAAKGGGGSGGLLGRDLLTKLKAQIQFSTEGPQVTWEDRPAMCLVLNLEEEYRLHEKPVPPSIDPSWLQLFPMVWAEKAGMGLANQVPPVVVELKSDASPVAVRQYPMSKEAREGIRPHIQRFLDLGILVPCQSPWNTPLLPVKKPGTNDYRPVQDLREVNKRVQDIHPTVPNPYNLLSSLPPSHTWYSVLDLKDAFFCLKLHPNSQPLFAFEWRDPEKGNTGQLTWTRLPQGFKNSPTLFNEALHRDLASFRALNPQVVMLQYVDDLLVAAPTYRDCKEGTRRLLQELSKLGYRVSAKKAQLCREEVTYLGYLLKGGKRWLTPARKATVMKIPTPTTPRQVREFLGKAGFCRLFIPGFASLAAPLYPLTRPKVPFTWTEAHQEAFGRIKEALLSAPALALPDLTKPFALYVDEKEGVARGVLTQTLGPWRRPVAYLSKKLDPVASGWPTCLKAIAAVALLLKDADKLTLGQNVLVIAPHNLESIVRQPPDRWMTNARMTHYQSLLLNERVSFAPPAILNPATLLPVESDDTPIHICSEILAEETGTRPDLRDQPLPGVPAWYTDGSSFIMDGRRQAGAAIVDNKRTVWASNLPEGTSAQKAELIALTQALRLAEGKSINIYTDSRYAFATAHVHGAIYKQRGWLTSAGKDIKNKEEILALLEAIHLPKRVAIIHCPGHQRGTDPVATGNRKADEAAKQAAQSTRILTETTKNAGKRTADGSEFEKRTADGSEFESPKKKAKVE

SEQ ID NO: 1740 - protein, 2125 aa, synthetic construct
MPAAKRVKLDGGDKKYSIGLDIGTNSVGWAVITDEYKVPSKKFKVLGNTDRHSIKKNLIGALLFDSGETAEATRLKRTARRRYTRRKNRICYLQEIFSNEMAKVDDSFFHRLEESFLVEEDKKHERHPIFGNIVDEVAYHEKYPTIYHLRKKLVDSTDKADLRLIYLALAHMIKFRGHFLIEGDLNPDNSDVDKLFIQLVQTYNQLFEENPINASGVDAKAILSARLSKSRRLENLIAQLPGEKKNGLFGNLIALSLGLTPNFKSNFDLAEDAKLQLSKDTYDDDLDNLLAQIGDQYADLFLAAKNLSDAILLSDILRVNTEITKAPLSASMIKRYDEHHQDLTLLKALVRQQLPEKYKEIFFDQSKNGYAGYIDGGASQEEFYKFIKPILEKMDGTEELLVKLNREDLLRKQRTFDNGSIPHQIHLGELHAILRRQEDFYPFLKDNREKIEKILTFRIPYYVGPLARGNSRFAWMTRKSEETITPWNFEEVVDKGASAQSFIERMTNFDKNLPNEKVLPKHSLLYEYFTVYNELTKVKYVTEGMRKPAFLSGEQKKAIVDLLFKTNRKVTVKQLKEDYFKKIECFDSVEISGVEDRFNASLGTYHDLLKIIKDKDFLDNEENEDILEDIVLTLTLFEDREMIEERLKTYAHLFDDKVMKQLKRRRYTGWGRLSRKLINGIRDKQSGKTILDFLKSDGFANRNFMQLIHDDSLTFKEDIQKAQVSGQGDSLHEHIANLAGSPAIKKGILQTVKVVDELVKVMGRHKPENIVIEMARENQTTQKGQKNSRERMKRIEEGIKELGSQILKEHPVENTQLQNEKLYLYYLQNGRDMYVDQELDINRLSDYDVDHIVPQSFLKDDSIDNKVLTRSDKARGKSDNVPSEEVVKKMKNYWRQLLNAKLITQRKFDNLTKAERGGLSELDKAGFIKRQLVETRQITKHVAQILDSRMNTKYDENDKLIREVKVITLKSKLVSDFRKDFQFYKVREINNYHHAHDAYLNAVVGTALIKKYPKLESEFVYGDYKVYDVRKMIAKSEQEIGKATAKYFFYSNIMNFFKTEITLANGEIRKRPLIETNGETGEIVWDKGRDFATVRKVLSMPQVNIVKKTEVQTGGFSKESILPKRNSDKLIARKKDWDPKKYGGFDSPTVAYSVLVVAKVEKGKSKKLKSVKELLGITIMERSSFEKNPIDFLEAKGYKEVKKDLIIKLPKYSLFELENGRKRMLASAGELQKGNELALPSKYVNFLYLASHYEKLKGSPEDNEQKQLFVEQHKHYLDEIIEQISEFSKRVILADANLDKVLSAYNKHRDKPIREQAENIIHLFTLTNLGAPAAFKYFDTTIDRKRYTSTKEVLDATLIHQSITGLYETRIDLSQLGGDGGPAPGGSGGGGGLLGRDLLTKLKAQIQFSTEGPQVTWEDRPAMCLVLNLEEEYRLHEKPVPPSIDPSWLQLFPMVWAEKAGMGLANQVPPVVVELKSDASPVAVRQYPMSKEAREGIRPHIQRFLDLGILVPCQSPWNTPLLPVKKPGTNDYRPVQDLREVNKRVQDIHPTVPNPYNLLSSLPPSHTWYSVLDLKDAFFCLKLHPNSQPLFAFEWRDPEKGNTGQLTWTRLPQGFKNSPTLFNEALHRDLASFRALNPQVVMLQYVDDLLVAAPTYRDCKEGTRRLLQELSKLGYRVSAKKAQLCREEVTYLGYLLKGGKRWLTPARKATVMKIPTPTTPRQVREFLGKAGFCRLFIPGFASLAAPLYPLTRPKVPFTWTEAHQEAFGRIKEALLSAPALALPDLTKPFALYVDEKEGVARGVLTQTLGPWRRPVAYLSKKLDPVASGWPTCLKAIAAVALLLKDADKLTLGQNVLVIAPHNLESIVRQPPDRWMTNARMTHYQSLLLNERVSFAPPAILNPATLLPVESDDTPIHICSEILAEETGTRPDLRDQPLPGVPAWYTDGSSFIMDGRRQAGAAIVDNKRTVWASNLPEGTSAQKAELIALTQALRLAEGKSINIYTDSRYAFATAHVHGAIYKQRGWLTSAGKDIKNKEEILALLEAIHLPKRVAIIHCPGHQRGTDPVATGNRKADEAAKQAAQSTRILTETTKNAGKRTADGSEFEKRTADGSEFESPKKKAKVE

SEQ ID NO: 1741 - protein, 2127 aa, synthetic construct
MPAAKRVKLDGGDKKYSIGLDIGTNSVGWAVITDEYKVPSKKFKVLGNTDRHSIKKNLIGALLFDSGETAEATRLKRTARRRYTRRKNRICYLQEIFSNEMAKVDDSFFHRLEESFLVEEDKKHERHPIFGNIVDEVAYHEKYPTIYHLRKKLVDSTDKADLRLIYLALAHMIKFRGHFLIEGDLNPDNSDVDKLFIQLVQTYNQLFEENPINASGVDAKAILSARLSKSRRLENLIAQLPGEKKNGLFGNLIALSLGLTPNFKSNFDLAEDAKLQLSKDTYDDDLDNLLAQIGDQYADLFLAAKNLSDAILLSDILRVNTEITKAPLSASMIKRYDEHHQDLTLLKALVRQQLPEKYKEIFFDQSKNGYAGYIDGGASQEEFYKFIKPILEKMDGTEELLVKLNREDLLRKQRTFDNGSIPHQIHLGELHAILRRQEDFYPFLKDNREKIEKILTFRIPYYVGPLARGNSRFAWMTRKSEETITPWNFEEVVDKGASAQSFIERMTNFDKNLPNEKVLPKHSLLYEYFTVYNELTKVKYVTEGMRKPAFLSGEQKKAIVDLLFKTNRKVTVKQLKEDYFKKIECFDSVEISGVEDRFNASLGTYHDLLKIIKDKDFLDNEENEDILEDIVLTLTLFEDREMIEERLKTYAHLFDDKVMKQLKRRRYTGWGRLSRKLINGIRDKQSGKTILDFLKSDGFANRNFMQLIHDDSLTFKEDIQKAQVSGQGDSLHEHIANLAGSPAIKKGILQTVKVVDELVKVMGRHKPENIVIEMARENQTTQKGQKNSRERMKRIEEGIKELGSQILKEHPVENTQLQNEKLYLYYLQNGRDMYVDQELDINRLSDYDVDHIVPQSFLKDDSIDNKVLTRSDKARGKSDNVPSEEVVKKMKNYWRQLLNAKLITQRKFDNLTKAERGGLSELDKAGFIKRQLVETRQITKHVAQILDSRMNTKYDENDKLIREVKVITLKSKLVSDFRKDFQFYKVREINNYHHAHDAYLNAVVGTALIKKYPKLESEFVYGDYKVYDVRKMIAKSEQEIGKATAKYFFYSNIMNFFKTEITLANGEIRKRPLIETNGETGEIVWDKGRDFATVRKVLSMPQVNIVKKTEVQTGGFSKESILPKRNSDKLIARKKDWDPKKYGGFDSPTVAYSVLVVAKVEKGKSKKLKSVKELLGITIMERSSFEKNPIDFLEAKGYKEVKKDLIIKLPKYSLFELENGRKRMLASAGELQKGNELALPSKYVNFLYLASHYEKLKGSPEDNEQKQLFVEQHKHYLDEIIEQISEFSKRVILADANLDKVLSAYNKHRDKPIREQAENIIHLFTLTNLGAPAAFKYFDTTIDRKRYTSTKEVLDATLIHQSITGLYETRIDLSQLGGDGGGGSGGGEAAAKGGLLGRDLLTKLKAQIQFSTEGPQVTWEDRPAMCLVLNLEEEYRLHEKPVPPSIDPSWLQLFPMVWAEKAGMGLANQVPPVVVELKSDASPVAVRQYPMSKEAREGIRPHIQRFLDLGILVPCQSPWNTPLLPVKKPGTNDYRPVQDLREVNKRVQDIHPTVPNPYNLLSSLPPSHTWYSVLDLKDAFFCLKLHPNSQPLFAFEWRDPEKGNTGQLTWTRLPQGFKNSPTLFNEALHRDLASFRALNPQVVMLQYVDDLLVAAPTYRDCKEGTRRLLQELSKLGYRVSAKKAQLCREEVTYLGYLLKGGKRWLTPARKATVMKIPTPTTPRQVREFLGKAGFCRLFIPGFASLAAPLYPLTRPKVPFTWTEAHQEAFGRIKEALLSAPALALPDLTKPFALYVDEKEGVARGVLTQTLGPWRRPVAYLSKKLDPVASGWPTCLKAIAAVALLLKDADKLTLGQNVLVIAPHNLESIVRQPPDRWMTNARMTHYQSLLLNERVSFAPPAILNPATLLPVESDDTPIHICSEILAEETGTRPDLRDQPLPGVPAWYTDGSSFIMDGRRQAGAAIVDNKRTVWASNLPEGTSAQKAELIALTQALRLAEGKSINIYTDSRYAFATAHVHGAIYKQRGWLTSAGKDIKNKEEILALLEAIHLPKRVAIIHCPGHQRGTDPVATGNRKADEAAKQAAQSTRILTETTKNAGKRTADGSEFEKRTADGSEFESPKKKAKVE

SEQ ID NO: 1742 - protein, 2122 aa, synthetic construct
MPAAKRVKLDGGDKKYSIGLDIGTNSVGWAVITDEYKVPSKKFKVLGNTDRHSIKKNLIGALLFDSGETAEATRLKRTARRRYTRRKNRICYLQEIFSNEMAKVDDSFFHRLEESFLVEEDKKHERHPIFGNIVDEVAYHEKYPTIYHLRKKLVDSTDKADLRLIYLALAHMIKFRGHFLIEGDLNPDNSDVDKLFIQLVQTYNQLFEENPINASGVDAKAILSARLSKSRRLENLIAQLPGEKKNGLFGNLIALSLGLTPNFKSNFDLAEDAKLQLSKDTYDDDLDNLLAQIGDQYADLFLAAKNLSDAILLSDILRVNTEITKAPLSASMIKRYDEHHQDLTLLKALVRQQLPEKYKEIFFDQSKNGYAGYIDGGASQEEFYKFIKPILEKMDGTEELLVKLNREDLLRKQRTFDNGSIPHQIHLGELHAILRRQEDFYPFLKDNREKIEKILTFRIPYYVGPLARGNSRFAWMTRKSEETITPWNFEEVVDKGASAQSFIERMTNFDKNLPNEKVLPKHSLLYEYFTVYNELTKVKYVTEGMRKPAFLSGEQKKAIVDLLFKTNRKVTVKQLKEDYFKKIECFDSVEISGVEDRFNASLGTYHDLLKIIKDKDFLDNEENEDILEDIVLTLTLFEDREMIEERLKTYAHLFDDKVMKQLKRRRYTGWGRLSRKLINGIRDKQSGKTILDFLKSDGFANRNFMQLIHDDSLTFKEDIQKAQVSGQGDSLHEHIANLAGSPAIKKGILQTVKVVDELVKVMGRHKPENIVIEMARENQTTQKGQKNSRERMKRIEEGIKELGSQILKEHPVENTQLQNEKLYLYYLQNGRDMYVDQELDINRLSDYDVDHIVPQSFLKDDSIDNKVLTRSDKARGKSDNVPSEEVVKKMKNYWRQLLNAKLITQRKFDNLTKAERGGLSELDKAGFIKRQLVETRQITKHVAQILDSRMNTKYDENDKLIREVKVITLKSKLVSDFRKDFQFYKVREINNYHHAHDAYLNAVVGTALIKKYPKLESEFVYGDYKVYDVRKMIAKSEQEIGKATAKYFFYSNIMNFFKTEITLANGEIRKRPLIETNGETGEIVWDKGRDFATVRKVLSMPQVNIVKKTEVQTGGFSKESILPKRNSDKLIARKKDWDPKKYGGFDSPTVAYSVLVVAKVEKGKSKKLKSVKELLGITIMERSSFEKNPIDFLEAKGYKEVKKDLIIKLPKYSLFELENGRKRMLASAGELQKGNELALPSKYVNFLYLASHYEKLKGSPEDNEQKQLFVEQHKHYLDEIIEQISEFSKRVILADANLDKVLSAYNKHRDKPIREQAENIIHLFTLTNLGAPAAFKYFDTTIDRKRYTSTKEVLDATLIHQSITGLYETRIDLSQLGGDGGGSSGGSGGLLGRDLLTKLKAQIQFSTEGPQVTWEDRPAMCLVLNLEEEYRLHEKPVPPSIDPSWLQLFPMVWAEKAGMGLANQVPPVVVELKSDASPVAVRQYPMSKEAREGIRPHIQRFLDLGILVPCQSPWNTPLLPVKKPGTNDYRPVQDLREVNKRVQDIHPTVPNPYNLLSSLPPSHTWYSVLDLKDAFFCLKLHPNSQPLFAFEWRDPEKGNTGQLTWTRLPQGFKNSPTLFNEALHRDLASFRALNPQVVMLQYVDDLLVAAPTYRDCKEGTRRLLQELSKLGYRVSAKKAQLCREEVTYLGYLLKGGKRWLTPARKATVMKIPTPTTPRQVREFLGKAGFCRLFIPGFASLAAPLYPLTRPKVPFTWTEAHQEAFGRIKEALLSAPALALPDLTKPFALYVDEKEGVARGVLTQTLGPWRRPVAYLSKKLDPVASGWPTCLKAIAAVALLLKDADKLTLGQNVLVIAPHNLESIVRQPPDRWMTNARMTHYQSLLLNERVSFAPPAILNPATLLPVESDDTPIHICSEILAEETGTRPDLRDQPLPGVPAWYTDGSSFIMDGRRQAGAAIVDNKRTVWASNLPEGTSAQKAELIALTQALRLAEGKSINIYTDSRYAFATAHVHGAIYKQRGWLTSAGKDIKNKEEILALLEAIHLPKRVAIIHCPGHQRGTDPVATGNRKADEAAKQAAQSTRILTETTKNAGKRTADGSEFEKRTADGSEFESPKKKAKVE

SEQ ID NO: 1743 - protein, 2124 aa, synthetic construct
MPAAKRVKLDGGDKKYSIGLDIGTNSVGWAVITDEYKVPSKKFKVLGNTDRHSIKKNLIGALLFDSGETAEATRLKRTARRRYTRRKNRICYLQEIFSNEMAKVDDSFFHRLEESFLVEEDKKHERHPIFGNIVDEVAYHEKYPTIYHLRKKLVDSTDKADLRLIYLALAHMIKFRGHFLIEGDLNPDNSDVDKLFIQLVQTYNQLFEENPINASGVDAKAILSARLSKSRRLENLIAQLPGEKKNGLFGNLIALSLGLTPNFKSNFDLAEDAKLQLSKDTYDDDLDNLLAQIGDQYADLFLAAKNLSDAILLSDILRVNTEITKAPLSASMIKRYDEHHQDLTLLKALVRQQLPEKYKEIFFDQSKNGYAGYIDGGASQEEFYKFIKPILEKMDGTEELLVKLNREDLLRKQRTFDNGSIPHQIHLGELHAILRRQEDFYPFLKDNREKIEKILTFRIPYYVGPLARGNSRFAWMTRKSEETITPWNFEEVVDKGASAQSFIERMTNFDKNLPNEKVLPKHSLLYEYFTVYNELTKVKYVTEGMRKPAFLSGEQKKAIVDLLFKTNRKVTVKQLKEDYFKKIECFDSVEISGVEDRFNASLGTYHDLLKIIKDKDFLDNEENEDILEDIVLTLTLFEDREMIEERLKTYAHLFDDKVMKQLKRRRYTGWGRLSRKLINGIRDKQSGKTILDFLKSDGFANRNFMQLIHDDSLTFKEDIQKAQVSGQGDSLHEHIANLAGSPAIKKGILQTVKVVDELVKVMGRHKPENIVIEMARENQTTQKGQKNSRERMKRIEEGIKELGSQILKEHPVENTQLQNEKLYLYYLQNGRDMYVDQELDINRLSDYDVDHIVPQSFLKDDSIDNKVLTRSDKARGKSDNVPSEEVVKKMKNYWRQLLNAKLITQRKFDNLTKAERGGLSELDKAGFIKRQLVETRQITKHVAQILDSRMNTKYDENDKLIREVKVITLKSKLVSDFRKDFQFYKVREINNYHHAHDAYLNAVVGTALIKKYPKLESEFVYGDYKVYDVRKMIAKSEQEIGKATAKYFFYSNIMNFFKTEITLANGEIRKRPLIETNGETGEIVWDKGRDFATVRKVLSMPQVNIVKKTEVQTGGFSKESILPKRNSDKLIARKKDWDPKKYGGFDSPTVAYSVLVVAKVEKGKSKKLKSVKELLGITIMERSSFEKNPIDFLEAKGYKEVKKDLIIKLPKYSLFELENGRKRMLASAGELQKGNELALPSKYVNFLYLASHYEKLKGSPEDNEQKQLFVEQHKHYLDEIIEQISEFSKRVILADANLDKVLSAYNKHRDKPIREQAENIIHLFTLTNLGAPAAFKYFDTTIDRKRYTSTKEVLDATLIHQSITGLYETRIDLSQLGGDGGGGSEAAAKGGLLGRDLLTKLKAQIQFSTEGPQVTWEDRPAMCLVLNLEEEYRLHEKPVPPSIDPSWLQLFPMVWAEKAGMGLANQVPPVVVELKSDASPVAVRQYPMSKEAREGIRPHIQRFLDLGILVPCQSPWNTPLLPVKKPGTNDYRPVQDLREVNKRVQDIHPTVPNPYNLLSSLPPSHTWYSVLDLKDAFFCLKLHPNSQPLFAFEWRDPEKGNTGQLTWTRLPQGFKNSPTLFNEALHRDLASFRALNPQVVMLQYVDDLLVAAPTYRDCKEGTRRLLQELSKLGYRVSAKKAQLCREEVTYLGYLLKGGKRWLTPARKATVMKIPTPTTPRQVREFLGKAGFCRLFIPGFASLAAPLYPLTRPKVPFTWTEAHQEAFGRIKEALLSAPALALPDLTKPFALYVDEKEGVARGVLTQTLGPWRRPVAYLSKKLDPVASGWPTCLKAIAAVALLLKDADKLTLGQNVLVIAPHNLESIVRQPPDRWMTNARMTHYQSLLLNERVSFAPPAILNPATLLPVESDDTPIHICSEILAEETGTRPDLRDQPLPGVPAWYTDGSSFIMDGRRQAGAAIVDNKRTVWASNLPEGTSAQKAELIALTQALRLAEGKSINIYTDSRYAFATAHVHGAIYKQRGWLTSAGKDIKNKEEILALLEAIHLPKRVAIIHCPGHQRGTDPVATGNRKADEAAKQAAQSTRILTETTKNAGKRTADGSEFEKRTADGSEFESPKKKAKVE

SEQ ID NO: 1744 - protein, 2141 aa, synthetic construct
MPAAKRVKLDGGDKKYSIGLDIGTNSVGWAVITDEYKVPSKKFKVLGNTDRHSIKKNLIGALLFDSGETAEATRLKRTARRRYTRRKNRICYLQEIFSNEMAKVDDSFFHRLEESFLVEEDKKHERHPIFGNIVDEVAYHEKYPTIYHLRKKLVDSTDKADLRLIYLALAHMIKFRGHFLIEGDLNPDNSDVDKLFIQLVQTYNQLFEENPINASGVDAKAILSARLSKSRRLENLIAQLPGEKKNGLFGNLIALSLGLTPNFKSNFDLAEDAKLQLSKDTYDDDLDNLLAQIGDQYADLFLAAKNLSDAILLSDILRVNTEITKAPLSASMIKRYDEHHQDLTLLKALVRQQLPEKYKEIFFDQSKNGYAGYIDGGASQEEFYKFIKPILEKMDGTEELLVKLNREDLLRKQRTFDNGSIPHQIHLGELHAILRRQEDFYPFLKDNREKIEKILTFRIPYYVGPLARGNSRFAWMTRKSEETITPWNFEEVVDKGASAQSFIERMTNFDKNLPNEKVLPKHSLLYEYFTVYNELTKVKYVTEGMRKPAFLSGEQKKAIVDLLFKTNRKVTVKQLKEDYFKKIECFDSVEISGVEDRFNASLGTYHDLLKIIKDKDFLDNEENEDILEDIVLTLTLFEDREMIEERLKTYAHLFDDKVMKQLKRRRYTGWGRLSRKLINGIRDKQSGKTILDFLKSDGFANRNFMQLIHDDSLTFKEDIQKAQVSGQGDSLHEHIANLAGSPAIKKGILQTVKVVDELVKVMGRHKPENIVIEMARENQTTQKGQKNSRERMKRIEEGIKELGSQILKEHPVENTQLQNEKLYLYYLQNGRDMYVDQELDINRLSDYDVDHIVPQSFLKDDSIDNKVLTRSDKARGKSDNVPSEEVVKKMKNYWRQLLNAKLITQRKFDNLTKAERGGLSELDKAGFIKRQLVETRQITKHVAQILDSRMNTKYDENDKLIREVKVITLKSKLVSDFRKDFQFYKVREINNYHHAHDAYLNAVVGTALIKKYPKLESEFVYGDYKVYDVRKMIAKSEQEIGKATAKYFFYSNIMNFFKTEITLANGEIRKRPLIETNGETGEIVWDKGRDFATVRKVLSMPQVNIVKKTEVQTGGFSKESILPKRNSDKLIARKKDWDPKKYGGFDSPTVAYSVLVVAKVEKGKSKKLKSVKELLGITIMERSSFEKNPIDFLEAKGYKEVKKDLIIKLPKYSLFELENGRKRMLASAGELQKGNELALPSKYVNFLYLASHYEKLKGSPEDNEQKQLFVEQHKHYLDEIIEQISEFSKRVILADANLDKVLSAYNKHRDKPIREQAENIIHLFTLTNLGAPAAFKYFDTTIDRKRYTSTKEVLDATLIHQSITGLYETRIDLSQLGGDGGEAAAKEAAAKEAAAKEAAAKEAAAKGGLLGRDLLTKLKAQIQFSTEGPQVTWEDRPAMCLVLNLEEEYRLHEKPVPPSIDPSWLQLFPMVWAEKAGMGLANQVPPVVVELKSDASPVAVRQYPMSKEAREGIRPHIQRFLDLGILVPCQSPWNTPLLPVKKPGTNDYRPVQDLREVNKRVQDIHPTVPNPYNLLSSLPPSHTWYSVLDLKDAFFCLKLHPNSQPLFAFEWRDPEKGNTGQLTWTRLPQGFKNSPTLFNEALHRDLASFRALNPQVVMLQYVDDLLVAAPTYRDCKEGTRRLLQELSKLGYRVSAKKAQLCREEVTYLGYLLKGGKRWLTPARKATVMKIPTPTTPRQVREFLGKAGFCRLFIPGFASLAAPLYPLTRPKVPFTWTEAHQEAFGRIKEALLSAPALALPDLTKPFALYVDEKEGVARGVLTQTLGPWRRPVAYLSKKLDPVASGWPTCLKAIAAVALLLKDADKLTLGQNVLVIAPHNLESIVRQPPDRWMTNARMTHYQSLLLNERVSFAPPAILNPATLLPVESDDTPIHICSEILAEETGTRPDLRDQPLPGVPAWYTDGSSFIMDGRRQAGAAIVDNKRTVWASNLPEGTSAQKAELIALTQALRLAEGKSINIYTDSRYAFATAHVHGAIYKQRGWLTSAGKDIKNKEEILALLEAIHLPKRVAIIHCPGHQRGTDPVATGNRKADEAAKQAAQSTRILTETTKNAGKRTADGSEFEKRTADGSEFESPKKKAKVE

SEQ ID NO: 1745 - protein, 2125 aa, synthetic construct
MPAAKRVKLDGGDKKYSIGLDIGTNSVGWAVITDEYKVPSKKFKVLGNTDRHSIKKNLIGALLFDSGETAEATRLKRTARRRYTRRKNRICYLQEIFSNEMAKVDDSFFHRLEESFLVEEDKKHERHPIFGNIVDEVAYHEKYPTIYHLRKKLVDSTDKADLRLIYLALAHMIKFRGHFLIEGDLNPDNSDVDKLFIQLVQTYNQLFEENPINASGVDAKAILSARLSKSRRLENLIAQLPGEKKNGLFGNLIALSLGLTPNFKSNFDLAEDAKLQLSKDTYDDDLDNLLAQIGDQYADLFLAAKNLSDAILLSDILRVNTEITKAPLSASMIKRYDEHHQDLTLLKALVRQQLPEKYKEIFFDQSKNGYAGYIDGGASQEEFYKFIKPILEKMDGTEELLVKLNREDLLRKQRTFDNGSIPHQIHLGELHAILRRQEDFYPFLKDNREKIEKILTFRIPYYVGPLARGNSRFAWMTRKSEETITPWNFEEVVDKGASAQSFIERMTNFDKNLPNEKVLPKHSLLYEYFTVYNELTKVKYVTEGMRKPAFLSGEQKKAIVDLLFKTNRKVTVKQLKEDYFKKIECFDSVEISGVEDRFNASLGTYHDLLKIIKDKDFLDNEENEDILEDIVLTLTLFEDREMIEERLKTYAHLFDDKVMKQLKRRRYTGWGRLSRKLINGIRDKQSGKTILDFLKSDGFANRNFMQLIHDDSLTFKEDIQKAQVSGQGDSLHEHIANLAGSPAIKKGILQTVKVVDELVKVMGRHKPENIVIEMARENQTTQKGQKNSRERMKRIEEGIKELGSQILKEHPVENTQLQNEKLYLYYLQNGRDMYVDQELDINRLSDYDVDHIVPQSFLKDDSIDNKVLTRSDKARGKSDNVPSEEVVKKMKNYWRQLLNAKLITQRKFDNLTKAERGGLSELDKAGFIKRQLVETRQITKHVAQILDSRMNTKYDENDKLIREVKVITLKSKLVSDFRKDFQFYKVREINNYHHAHDAYLNAVVGTALIKKYPKLESEFVYGDYKVYDVRKMIAKSEQEIGKATAKYFFYSNIMNFFKTEITLANGEIRKRPLIETNGETGEIVWDKGRDFATVRKVLSMPQVNIVKKTEVQTGGFSKESILPKRNSDKLIARKKDWDPKKYGGFDSPTVAYSVLVVAKVEKGKSKKLKSVKELLGITIMERSSFEKNPIDFLEAKGYKEVKKDLIIKLPKYSLFELENGRKRMLASAGELQKGNELALPSKYVNFLYLASHYEKLKGSPEDNEQKQLFVEQHKHYLDEIIEQISEFSKRVILADANLDKVLSAYNKHRDKPIREQAENIIHLFTLTNLGAPAAFKYFDTTIDRKRYTSTKEVLDATLIHQSITGLYETRIDLSQLGGDGGGGGGGSPAPGGLLGRDLLTKLKAQIQFSTEGPQVTWEDRPAMCLVLNLEEEYRLHEKPVPPSIDPSWLQLFPMVWAEKAGMGLANQVPPVVVELKSDASPVAVRQYPMSKEAREGIRPHIQRFLDLGILVPCQSPWNTPLLPVKKPGTNDYRPVQDLREVNKRVQDIHPTVPNPYNLLSSLPPSHTWYSVLDLKDAFFCLKLHPNSQPLFAFEWRDPEKGNTGQLTWTRLPQGFKNSPTLFNEALHRDLASFRALNPQVVMLQYVDDLLVAAPTYRDCKEGTRRLLQELSKLGYRVSAKKAQLCREEVTYLGYLLKGGKRWLTPARKATVMKIPTPTTPRQVREFLGKAGFCRLFIPGFASLAAPLYPLTRPKVPFTWTEAHQEAFGRIKEALLSAPALALPDLTKPFALYVDEKEGVARGVLTQTLGPWRRPVAYLSKKLDPVASGWPTCLKAIAAVALLLKDADKLTLGQNVLVIAPHNLESIVRQPPDRWMTNARMTHYQSLLLNERVSFAPPAILNPATLLPVESDDTPIHICSEILAEETGTRPDLRDQPLPGVPAWYTDGSSFIMDGRRQAGAAIVDNKRTVWASNLPEGTSAQKAELIALTQALRLAEGKSINIYTDSRYAFATAHVHGAIYKQRGWLTSAGKDIKNKEEILALLEAIHLPKRVAIIHCPGHQRGTDPVATGNRKADEAAKQAAQSTRILTETTKNAGKRTADGSEFEKRTADGSEFESPKKKAKVE

SEQ ID NO: 1746 - protein, 2124 aa, synthetic construct
MPAAKRVKLDGGDKKYSIGLDIGTNSVGWAVITDEYKVPSKKFKVLGNTDRHSIKKNLIGALLFDSGETAEATRLKRTARRRYTRRKNRICYLQEIFSNEMAKVDDSFFHRLEESFLVEEDKKHERHPIFGNIVDEVAYHEKYPTIYHLRKKLVDSTDKADLRLIYLALAHMIKFRGHFLIEGDLNPDNSDVDKLFIQLVQTYNQLFEENPINASGVDAKAILSARLSKSRRLENLIAQLPGEKKNGLFGNLIALSLGLTPNFKSNFDLAEDAKLQLSKDTYDDDLDNLLAQIGDQYADLFLAAKNLSDAILLSDILRVNTEITKAPLSASMIKRYDEHHQDLTLLKALVRQQLPEKYKEIFFDQSKNGYAGYIDGGASQEEFYKFIKPILEKMDGTEELLVKLNREDLLRKQRTFDNGSIPHQIHLGELHAILRRQEDFYPFLKDNREKIEKILTFRIPYYVGPLARGNSRFAWMTRKSEETITPWNFEEVVDKGASAQSFIERMTNFDKNLPNEKVLPKHSLLYEYFTVYNELTKVKYVTEGMRKPAFLSGEQKKAIVDLLFKTNRKVTVKQLKEDYFKKIECFDSVEISGVEDRFNASLGTYHDLLKIIKDKDFLDNEENEDILEDIVLTLTLFEDREMIEERLKTYAHLFDDKVMKQLKRRRYTGWGRLSRKLINGIRDKQSGKTILDFLKSDGFANRNFMQLIHDDSLTFKEDIQKAQVSGQGDSLHEHIANLAGSPAIKKGILQTVKVVDELVKVMGRHKPENIVIEMARENQTTQKGQKNSRERMKRIEEGIKELGSQILKEHPVENTQLQNEKLYLYYLQNGRDMYVDQELDINRLSDYDVDHIVPQSFLKDDSIDNKVLTRSDKARGKSDNVPSEEVVKKMKNYWRQLLNAKLITQRKFDNLTKAERGGLSELDKAGFIKRQLVETRQITKHVAQILDSRMNTKYDENDKLIREVKVITLKSKLVSDFRKDFQFYKVREINNYHHAHDAYLNAVVGTALIKKYPKLESEFVYGDYKVYDVRKMIAKSEQEIGKATAKYFFYSNIMNFFKTEITLANGEIRKRPLIETNGETGEIVWDKGRDFATVRKVLSMPQVNIVKKTEVQTGGFSKESILPKRNSDKLIARKKDWDPKKYGGFDSPTVAYSVLVVAKVEKGKSKKLKSVKELLGITIMERSSFEKNPIDFLEAKGYKEVKKDLIIKLPKYSLFELENGRKRMLASAGELQKGNELALPSKYVNFLYLASHYEKLKGSPEDNEQKQLFVEQHKHYLDEIIEQISEFSKRVILADANLDKVLSAYNKHRDKPIREQAENIIHLFTLTNLGAPAAFKYFDTTIDRKRYTSTKEVLDATLIHQSITGLYETRIDLSQLGGDGGEAAAKGGGGGLLGRDLLTKLKAQIQFSTEGPQVTWEDRPAMCLVLNLEEEYRLHEKPVPPSIDPSWLQLFPMVWAEKAGMGLANQVPPVVVELKSDASPVAVRQYPMSKEAREGIRPHIQRFLDLGILVPCQSPWNTPLLPVKKPGTNDYRPVQDLREVNKRVQDIHPTVPNPYNLLSSLPPSHTWYSVLDLKDAFFCLKLHPNSQPLFAFEWRDPEKGNTGQLTWTRLPQGFKNSPTLFNEALHRDLASFRALNPQVVMLQYVDDLLVAAPTYRDCKEGTRRLLQELSKLGYRVSAKKAQLCREEVTYLGYLLKGGKRWLTPARKATVMKIPTPTTPRQVREFLGKAGFCRLFIPGFASLAAPLYPLTRPKVPFTWTEAHQEAFGRIKEALLSAPALALPDLTKPFALYVDEKEGVARGVLTQTLGPWRRPVAYLSKKLDPVASGWPTCLKAIAAVALLLKDADKLTLGQNVLVIAPHNLESIVRQPPDRWMTNARMTHYQSLLLNERVSFAPPAILNPATLLPVESDDTPIHICSEILAEETGTRPDLRDQPLPGVPAWYTDGSSFIMDGRRQAGAAIVDNKRTVWASNLPEGTSAQKAELIALTQALRLAEGKSINIYTDSRYAFATAHVHGAIYKQRGWLTSAGKDIKNKEEILALLEAIHLPKRVAIIHCPGHQRGTDPVATGNRKADEAAKQAAQSTRILTETTKNAGKRTADGSEFEKRTADGSEFESPKKKAKVE

SEQ ID NO: 1747 - protein, 2122 aa, synthetic construct
MPAAKRVKLDGGDKKYSIGLDIGTNSVGWAVITDEYKVPSKKFKVLGNTDRHSIKKNLIGALLFDSGETAEATRLKRTARRRYTRRKNRICYLQEIFSNEMAKVDDSFFHRLEESFLVEEDKKHERHPIFGNIVDEVAYHEKYPTIYHLRKKLVDSTDKADLRLIYLALAHMIKFRGHFLIEGDLNPDNSDVDKLFIQLVQTYNQLFEENPINASGVDAKAILSARLSKSRRLENLIAQLPGEKKNGLFGNLIALSLGLTPNFKSNFDLAEDAKLQLSKDTYDDDLDNLLAQIGDQYADLFLAAKNLSDAILLSDILRVNTEITKAPLSASMIKRYDEHHQDLTLLKALVRQQLPEKYKEIFFDQSKNGYAGYIDGGASQEEFYKFIKPILEKMDGTEELLVKLNREDLLRKQRTFDNGSIPHQIHLGELHAILRRQEDFYPFLKDNREKIEKILTFRIPYYVGPLARGNSRFAWMTRKSEETITPWNFEEVVDKGASAQSFIERMTNFDKNLPNEKVLPKHSLLYEYFTVYNELTKVKYVTEGMRKPAFLSGEQKKAIVDLLFKTNRKVTVKQLKEDYFKKIECFDSVEISGVEDRFNASLGTYHDLLKIIKDKDFLDNEENEDILEDIVLTLTLFEDREMIEERLKTYAHLFDDKVMKQLKRRRYTGWGRLSRKLINGIRDKQSGKTILDFLKSDGFANRNFMQLIHDDSLTFKEDIQKAQVSGQGDSLHEHIANLAGSPAIKKGILQTVKVVDELVKVMGRHKPENIVIEMARENQTTQKGQKNSRERMKRIEEGIKELGSQILKEHPVENTQLQNEKLYLYYLQNGRDMYVDQELDINRLSDYDVDHIVPQSFLKDDSIDNKVLTRSDKARGKSDNVPSEEVVKKMKNYWRQLLNAKLITQRKFDNLTKAERGGLSELDKAGFIKRQLVETRQITKHVAQILDSRMNTKYDENDKLIREVKVITLKSKLVSDFRKDFQFYKVREINNYHHAHDAYLNAVVGTALIKKYPKLESEFVYGDYKVYDVRKMIAKSEQEIGKATAKYFFYSNIMNFFKTEITLANGEIRKRPLIETNGETGEIVWDKGRDFATVRKVLSMPQVNIVKKTEVQTGGFSKESILPKRNSDKLIARKKDWDPKKYGGFDSPTVAYSVLVVAKVEKGKSKKLKSVKELLGITIMERSSFEKNPIDFLEAKGYKEVKKDLIIKLPKYSLFELENGRKRMLASAGELQKGNELALPSKYVNFLYLASHYEKLKGSPEDNEQKQLFVEQHKHYLDEIIEQISEFSKRVILADANLDKVLSAYNKHRDKPIREQAENIIHLFTLTNLGAPAAFKYFDTTIDRKRYTSTKEVLDATLIHQSITGLYETRIDLSQLGGDGGGSSGSSGGLLGRDLLTKLKAQIQFSTEGPQVTWEDRPAMCLVLNLEEEYRLHEKPVPPSIDPSWLQLFPMVWAEKAGMGLANQVPPVVVELKSDASPVAVRQYPMSKEAREGIRPHIQRFLDLGILVPCQSPWNTPLLPVKKPGTNDYRPVQDLREVNKRVQDIHPTVPNPYNLLSSLPPSHTWYSVLDLKDAFFCLKLHPNSQPLFAFEWRDPEKGNTGQLTWTRLPQGFKNSPTLFNEALHRDLASFRALNPQVVMLQYVDDLLVAAPTYRDCKEGTRRLLQELSKLGYRVSAKKAQLCREEVTYLGYLLKGGKRWLTPARKATVMKIPTPTTPRQVREFLGKAGFCRLFIPGFASLAAPLYPLTRPKVPFTWTEAHQEAFGRIKEALLSAPALALPDLTKPFALYVDEKEGVARGVLTQTLGPWRRPVAYLSKKLDPVASGWPTCLKAIAAVALLLKDADKLTLGQNVLVIAPHNLESIVRQPPDRWMTNARMTHYQSLLLNERVSFAPPAILNPATLLPVESDDTPIHICSEILAEETGTRPDLRDQPLPGVPAWYTDGSSFIMDGRRQAGAAIVDNKRTVWASNLPEGTSAQKAELIALTQALRLAEGKSINIYTDSRYAFATAHVHGAIYKQRGWLTSAGKDIKNKEEILALLEAIHLPKRVAIIHCPGHQRGTDPVATGNRKADEAAKQAAQSTRILTETTKNAGKRTADGSEFEKRTADGSEFESPKKKAKVE

SEQ ID NO: 1748 - protein, 2122 aa, synthetic construct
MPAAKRVKLDGGDKKYSIGLDIGTNSVGWAVITDEYKVPSKKFKVLGNTDRHSIKKNLIGALLFDSGETAEATRLKRTARRRYTRRKNRICYLQEIFSNEMAKVDDSFFHRLEESFLVEEDKKHERHPIFGNIVDEVAYHEKYPTIYHLRKKLVDSTDKADLRLIYLALAHMIKFRGHFLIEGDLNPDNSDVDKLFIQLVQTYNQLFEENPINASGVDAKAILSARLSKSRRLENLIAQLPGEKKNGLFGNLIALSLGLTPNFKSNFDLAEDAKLQLSKDTYDDDLDNLLAQIGDQYADLFLAAKNLSDAILLSDILRVNTEITKAPLSASMIKRYDEHHQDLTLLKALVRQQLPEKYKEIFFDQSKNGYAGYIDGGASQEEFYKFIKPILEKMDGTEELLVKLNREDLLRKQRTFDNGSIPHQIHLGELHAILRRQEDFYPFLKDNREKIEKILTFRIPYYVGPLARGNSRFAWMTRKSEETITPWNFEEVVDKGASAQSFIERMTNFDKNLPNEKVLPKHSLLYEYFTVYNELTKVKYVTEGMRKPAFLSGEQKKAIVDLLFKTNRKVTVKQLKEDYFKKIECFDSVEISGVEDRFNASLGTYHDLLKIIKDKDFLDNEENEDILEDIVLTLTLFEDREMIEERLKTYAHLFDDKVMKQLKRRRYTGWGRLSRKLINGIRDKQSGKTILDFLKSDGFANRNFMQLIHDDSLTFKEDIQKAQVSGQGDSLHEHIANLAGSPAIKKGILQTVKVVDELVKVMGRHKPENIVIEMARENQTTQKGQKNSRERMKRIEEGIKELGSQILKEHPVENTQLQNEKLYLYYLQNGRDMYVDQELDINRLSDYDVDHIVPQSFLKDDSIDNKVLTRSDKARGKSDNVPSEEVVKKMKNYWRQLLNAKLITQRKFDNLTKAERGGLSELDKAGFIKRQLVETRQITKHVAQILDSRMNTKYDENDKLIREVKVITLKSKLVSDFRKDFQFYKVREINNYHHAHDAYLNAVVGTALIKKYPKLESEFVYGDYKVYDVRKMIAKSEQEIGKATAKYFFYSNIMNFFKTEITLANGEIRKRPLIETNGETGEIVWDKGRDFATVRKVLSMPQVNIVKKTEVQTGGFSKESILPKRNSDKLIARKKDWDPKKYGGFDSPTVAYSVLVVAKVEKGKSKKLKSVKELLGITIMERSSFEKNPIDFLEAKGYKEVKKDLIIKLPKYSLFELENGRKRMLASAGELQKGNELALPSKYVNFLYLASHYEKLKGSPEDNEQKQLFVEQHKHYLDEIIEQISEFSKRVILADANLDKVLSAYNKHRDKPIREQAENIIHLFTLTNLGAPAAFKYFDTTIDRKRYTSTKEVLDATLIHQSITGLYETRIDLSQLGGDGGGGGGGSGGLLGRDLLTKLKAQIQFSTEGPQVTWEDRPAMCLVLNLEEEYRLHEKPVPPSIDPSWLQLFPMVWAEKAGMGLANQVPPVVVELKSDASPVAVRQYPMSKEAREGIRPHIQRFLDLGILVPCQSPWNTPLLPVKKPGTNDYRPVQDLREVNKRVQDIHPTVPNPYNLLSSLPPSHTWYSVLDLKDAFFCLKLHPNSQPLFAFEWRDPEKGNTGQLTWTRLPQGFKNSPTLFNEALHRDLASFRALNPQVVMLQYVDDLLVAAPTYRDCKEGTRRLLQELSKLGYRVSAKKAQLCREEVTYLGYLLKGGKRWLTPARKATVMKIPTPTTPRQVREFLGKAGFCRLFIPGFASLAAPLYPLTRPKVPFTWTEAHQEAFGRIKEALLSAPALALPDLTKPFALYVDEKEGVARGVLTQTLGPWRRPVAYLSKKLDPVASGWPTCLKAIAAVALLLKDADKLTLGQNVLVIAPHNLESIVRQPPDRWMTNARMTHYQSLLLNERVSFAPPAILNPATLLPVESDDTPIHICSEILAEETGTRPDLRDQPLPGVPAWYTDGSSFIMDGRRQAGAAIVDNKRTVWASNLPEGTSAQKAELIALTQALRLAEGKSINIYTDSRYAFATAHVHGAIYKQRGWLTSAGKDIKNKEEILALLEAIHLPKRVAIIHCPGHQRGTDPVATGNRKADEAAKQAAQSTRILTETTKNAGKRTADGSEFEKRTADGSEFESPKKKAKVE

SEQ ID NO: 1749 - protein, 2125 aa, synthetic construct
MPAAKRVKLDGGDKKYSIGLDIGTNSVGWAVITDEYKVPSKKFKVLGNTDRHSIKKNLIGALLFDSGETAEATRLKRTARRRYTRRKNRICYLQEIFSNEMAKVDDSFFHRLEESFLVEEDKKHERHPIFGNIVDEVAYHEKYPTIYHLRKKLVDSTDKADLRLIYLALAHMIKFRGHFLIEGDLNPDNSDVDKLFIQLVQTYNQLFEENPINASGVDAKAILSARLSKSRRLENLIAQLPGEKKNGLFGNLIALSLGLTPNFKSNFDLAEDAKLQLSKDTYDDDLDNLLAQIGDQYADLFLAAKNLSDAILLSDILRVNTEITKAPLSASMIKRYDEHHQDLTLLKALVRQQLPEKYKEIFFDQSKNGYAGYIDGGASQEEFYKFIKPILEKMDGTEELLVKLNREDLLRKQRTFDNGSIPHQIHLGELHAILRRQEDFYPFLKDNREKIEKILTFRIPYYVGPLARGNSRFAWMTRKSEETITPWNFEEVVDKGASAQSFIERMTNFDKNLPNEKVLPKHSLLYEYFTVYNELTKVKYVTEGMRKPAFLSGEQKKAIVDLLFKTNRKVTVKQLKEDYFKKIECFDSVEISGVEDRFNASLGTYHDLLKIIKDKDFLDNEENEDILEDIVLTLTLFEDREMIEERLKTYAHLFDDKVMKQLKRRRYTGWGRLSRKLINGIRDKQSGKTILDFLKSDGFANRNFMQLIHDDSLTFKEDIQKAQVSGQGDSLHEHIANLAGSPAIKKGILQTVKVVDELVKVMGRHKPENIVIEMARENQTTQKGQKNSRERMKRIEEGIKELGSQILKEHPVENTQLQNEKLYLYYLQNGRDMYVDQELDINRLSDYDVDHIVPQSFLKDDSIDNKVLTRSDKARGKSDNVPSEEVVKKMKNYWRQLLNAKLITQRKFDNLTKAERGGLSELDKAGFIKRQLVETRQITKHVAQILDSRMNTKYDENDKLIREVKVITLKSKLVSDFRKDFQFYKVREINNYHHAHDAYLNAVVGTALIKKYPKLESEFVYGDYKVYDVRKMIAKSEQEIGKATAKYFFYSNIMNFFKTEITLANGEIRKRPLIETNGETGEIVWDKGRDFATVRKVLSMPQVNIVKKTEVQTGGFSKESILPKRNSDKLIARKKDWDPKKYGGFDSPTVAYSVLVVAKVEKGKSKKLKSVKELLGITIMERSSFEKNPIDFLEAKGYKEVKKDLIIKLPKYSLFELENGRKRMLASAGELQKGNELALPSKYVNFLYLASHYEKLKGSPEDNEQKQLFVEQHKHYLDEIIEQISEFSKRVILADANLDKVLSAYNKHRDKPIREQAENIIHLFTLTNLGAPAAFKYFDTTIDRKRYTSTKEVLDATLIHQSITGLYETRIDLSQLGGDGGPAPGSSGGSGGLLGRDLLTKLKAQIQFSTEGPQVTWEDRPAMCLVLNLEEEYRLHEKPVPPSIDPSWLQLFPMVWAEKAGMGLANQVPPVVVELKSDASPVAVRQYPMSKEAREGIRPHIQRFLDLGILVPCQSPWNTPLLPVKKPGTNDYRPVQDLREVNKRVQDIHPTVPNPYNLLSSLPPSHTWYSVLDLKDAFFCLKLHPNSQPLFAFEWRDPEKGNTGQLTWTRLPQGFKNSPTLFNEALHRDLASFRALNPQVVMLQYVDDLLVAAPTYRDCKEGTRRLLQELSKLGYRVSAKKAQLCREEVTYLGYLLKGGKRWLTPARKATVMKIPTPTTPRQVREFLGKAGFCRLFIPGFASLAAPLYPLTRPKVPFTWTEAHQEAFGRIKEALLSAPALALPDLTKPFALYVDEKEGVARGVLTQTLGPWRRPVAYLSKKLDPVASGWPTCLKAIAAVALLLKDADKLTLGQNVLVIAPHNLESIVRQPPDRWMTNARMTHYQSLLLNERVSFAPPAILNPATLLPVESDDTPIHICSEILAEETGTRPDLRDQPLPGVPAWYTDGSSFIMDGRRQAGAAIVDNKRTVWASNLPEGTSAQKAELIALTQALRLAEGKSINIYTDSRYAFATAHVHGAIYKQRGWLTSAGKDIKNKEEILALLEAIHLPKRVAIIHCPGHQRGTDPVATGNRKADEAAKQAAQSTRILTETTKNAGKRTADGSEFEKRTADGSEFESPKKKAKVE

SEQ ID NO: 1750 - protein, 2122 aa, synthetic construct
MPAAKRVKLDGGDKKYSIGLDIGTNSVGWAVITDEYKVPSKKFKVLGNTDRHSIKKNLIGALLFDSGETAEATRLKRTARRRYTRRKNRICYLQEIFSNEMAKVDDSFFHRLEESFLVEEDKKHERHPIFGNIVDEVAYHEKYPTIYHLRKKLVDSTDKADLRLIYLALAHMIKFRGHFLIEGDLNPDNSDVDKLFIQLVQTYNQLFEENPINASGVDAKAILSARLSKSRRLENLIAQLPGEKKNGLFGNLIALSLGLTPNFKSNFDLAEDAKLQLSKDTYDDDLDNLLAQIGDQYADLFLAAKNLSDAILLSDILRVNTEITKAPLSASMIKRYDEHHQDLTLLKALVRQQLPEKYKEIFFDQSKNGYAGYIDGGASQEEFYKFIKPILEKMDGTEELLVKLNREDLLRKQRTFDNGSIPHQIHLGELHAILRRQEDFYPFLKDNREKIEKILTFRIPYYVGPLARGNSRFAWMTRKSEETITPWNFEEVVDKGASAQSFIERMTNFDKNLPNEKVLPKHSLLYEYFTVYNELTKVKYVTEGMRKPAFLSGEQKKAIVDLLFKTNRKVTVKQLKEDYFKKIECFDSVEISGVEDRFNASLGTYHDLLKIIKDKDFLDNEENEDILEDIVLTLTLFEDREMIEERLKTYAHLFDDKVMKQLKRRRYTGWGRLSRKLINGIRDKQSGKTILDFLKSDGFANRNFMQLIHDDSLTFKEDIQKAQVSGQGDSLHEHIANLAGSPAIKKGILQTVKVVDELVKVMGRHKPENIVIEMARENQTTQKGQKNSRERMKRIEEGIKELGSQILKEHPVENTQLQNEKLYLYYLQNGRDMYVDQELDINRLSDYDVDHIVPQSFLKDDSIDNKVLTRSDKARGKSDNVPSEEVVKKMKNYWRQLLNAKLITQRKFDNLTKAERGGLSELDKAGFIKRQLVETRQITKHVAQILDSRMNTKYDENDKLIREVKVITLKSKLVSDFRKDFQFYKVREINNYHHAHDAYLNAVVGTALIKKYPKLESEFVYGDYKVYDVRKMIAKSEQEIGKATAKYFFYSNIMNFFKTEITLANGEIRKRPLIETNGETGEIVWDKGRDFATVRKVLSMPQVNIVKKTEVQTGGFSKESILPKRNSDKLIARKKDWDPKKYGGFDSPTVAYSVLVVAKVEKGKSKKLKSVKELLGITIMERSSFEKNPIDFLEAKGYKEVKKDLIIKLPKYSLFELENGRKRMLASAGELQKGNELALPSKYVNFLYLASHYEKLKGSPEDNEQKQLFVEQHKHYLDEIIEQISEFSKRVILADANLDKVLSAYNKHRDKPIREQAENIIHLFTLTNLGAPAAFKYFDTTIDRKRYTSTKEVLDATLIHQSITGLYETRIDLSQLGGDGGGGSGGSGGLLGRDLLTKLKAQIQFSTEGPQVTWEDRPAMCLVLNLEEEYRLHEKPVPPSIDPSWLQLFPMVWAEKAGMGLANQVPPVVVELKSDASPVAVRQYPMSKEAREGIRPHIQRFLDLGILVPCQSPWNTPLLPVKKPGTNDYRPVQDLREVNKRVQDIHPTVPNPYNLLSSLPPSHTWYSVLDLKDAFFCLKLHPNSQPLFAFEWRDPEKGNTGQLTWTRLPQGFKNSPTLFNEALHRDLASFRALNPQVVMLQYVDDLLVAAPTYRDCKEGTRRLLQELSKLGYRVSAKKAQLCREEVTYLGYLLKGGKRWLTPARKATVMKIPTPTTPRQVREFLGKAGFCRLFIPGFASLAAPLYPLTRPKVPFTWTEAHQEAFGRIKEALLSAPALALPDLTKPFALYVDEKEGVARGVLTQTLGPWRRPVAYLSKKLDPVASGWPTCLKAIAAVALLLKDADKLTLGQNVLVIAPHNLESIVRQPPDRWMTNARMTHYQSLLLNERVSFAPPAILNPATLLPVESDDTPIHICSEILAEETGTRPDLRDQPLPGVPAWYTDGSSFIMDGRRQAGAAIVDNKRTVWASNLPEGTSAQKAELIALTQALRLAEGKSINIYTDSRYAFATAHVHGAIYKQRGWLTSAGKDIKNKEEILALLEAIHLPKRVAIIHCPGHQRGTDPVATGNRKADEAAKQAAQSTRILTETTKNAGKRTADGSEFEKRTADGSEFESPKKKAKVE

SEQ ID NO: 1751 - protein, 2216 aa, synthetic construct
MPAAKRVKLDGGDKKYSIGLDIGTNSVGWAVITDEYKVPSKKFKVLGNTDRHSIKKNLIGALLFDSGETAEATRLKRTARRRYTRRKNRICYLQEIFSNEMAKVDDSFFHRLEESFLVEEDKKHERHPIFGNIVDEVAYHEKYPTIYHLRKKLVDSTDKADLRLIYLALAHMIKFRGHFLIEGDLNPDNSDVDKLFIQLVQTYNQLFEENPINASGVDAKAILSARLSKSRRLENLIAQLPGEKKNGLFGNLIALSLGLTPNFKSNFDLAEDAKLQLSKDTYDDDLDNLLAQIGDQYADLFLAAKNLSDAILLSDILRVNTEITKAPLSASMIKRYDEHHQDLTLLKALVRQQLPEKYKEIFFDQSKNGYAGYIDGGASQEEFYKFIKPILEKMDGTEELLVKLNREDLLRKQRTFDNGSIPHQIHLGELHAILRRQEDFYPFLKDNREKIEKILTFRIPYYVGPLARGNSRFAWMTRKSEETITPWNFEEVVDKGASAQSFIERMTNFDKNLPNEKVLPKHSLLYEYFTVYNELTKVKYVTEGMRKPAFLSGEQKKAIVDLLFKTNRKVTVKQLKEDYFKKIECFDSVEISGVEDRFNASLGTYHDLLKIIKDKDFLDNEENEDILEDIVLTLTLFEDREMIEERLKTYAHLFDDKVMKQLKRRRYTGWGRLSRKLINGIRDKQSGKTILDFLKSDGFANRNFMQLIHDDSLTFKEDIQKAQVSGQGDSLHEHIANLAGSPAIKKGILQTVKVVDELVKVMGRHKPENIVIEMARENQTTQKGQKNSRERMKRIEEGIKELGSQILKEHPVENTQLQNEKLYLYYLQNGRDMYVDQELDINRLSDYDVDHIVPQSFLKDDSIDNKVLTRSDKARGKSDNVPSEEVVKKMKNYWRQLLNAKLITQRKFDNLTKAERGGLSELDKAGFIKRQLVETRQITKHVAQILDSRMNTKYDENDKLIREVKVITLKSKLVSDFRKDFQFYKVREINNYHHAHDAYLNAVVGTALIKKYPKLESEFVYGDYKVYDVRKMIAKSEQEIGKATAKYFFYSNIMNFFKTEITLANGEIRKRPLIETNGETGEIVWDKGRDFATVRKVLSMPQVNIVKKTEVQTGGFSKESILPKRNSDKLIARKKDWDPKKYGGFDSPTVAYSVLVVAKVEKGKSKKLKSVKELLGITIMERSSFEKNPIDFLEAKGYKEVKKDLIIKLPKYSLFELENGRKRMLASAGELQKGNELALPSKYVNFLYLASHYEKLKGSPEDNEQKQLFVEQHKHYLDEIIEQISEFSKRVILADANLDKVLSAYNKHRDKPIREQAENIIHLFTLTNLGAPAAFKYFDTTIDRKRYTSTKEVLDATLIHQSITGLYETRIDLSQLGGDGGGGGGGSGSSGGTLGDQGSRGSDPLPEPRVTLTVEGIPTEFLVNTGAEHSVLTKPMGKMGSKRTVVAGATGSKVYPWTTKRLLKIGQKQVTHSFLVIPECPAPLLGRDLLTKLKAQIQFSTEGPQVTWEDRPAMCLVLNLEEEYRLHEKPVPPSIDPSWLQLFPMVWAEKAGMGLANQVPPVVVELKSDASPVAVRQYPMSKEAREGIRPHIQRFLDLGILVPCQSPWNTPLLPVKKPGTNDYRPVQDLREVNKRVQDIHPTVPNPYNLLSSLPPSHTWYSVLDLKDAFFCLKLHPNSQPLFAFEWRDPEKGNTGQLTWTRLPQGFKNSPTLFNEALHRDLASFRALNPQVVMLQYVDDLLVAAPTYRDCKEGTRRLLQELSKLGYRVSAKKAQLCREEVTYLGYLLKGGKRWLTPARKATVMKIPTPTTPRQVREFLGTAGFCRLWIPGFASLAAPLYPLTRPKVPFTWTEAHQEAFGRIKEALLSAPALALPDLTKPFALYVDEKEGVARGVLTQTLGPWRRPVAYLSKKLDPVASGWPTCLKAIAAVALLLKDADKLTLGQNVLVIAPHNLESIVRQPPDRWMTNARMTHYQSLLLNERVSFAPPAILNPATLLPVESDDTPIHICSEILAEETGTRPDLRDQPLPGVPAWYTDGSSFIMDGRRQAGAAIVDNKRTVWASNLPEGTSAQKAELIALTQALRLAEGKSINIYTDSRYAFATAHVHGAIYKQRGWLTSAGKDIKNKEEILALLEAIHLPKRVAIIHCPGHQRGTDPVATGNRKADEAAKQAAQSTRILTETTKNAGKRTADGSEFEKRTADGSEFESPKKKAKVE

SEQ ID NO: 1752 - protein, 2237 aa, synthetic construct
MPAAKRVKLDGGDKKYSIGLDIGTNSVGWAVITDEYKVPSKKFKVLGNTDRHSIKKNLIGALLFDSGETAEATRLKRTARRRYTRRKNRICYLQEIFSNEMAKVDDSFFHRLEESFLVEEDKKHERHPIFGNIVDEVAYHEKYPTIYHLRKKLVDSTDKADLRLIYLALAHMIKFRGHFLIEGDLNPDNSDVDKLFIQLVQTYNQLFEENPINASGVDAKAILSARLSKSRRLENLIAQLPGEKKNGLFGNLIALSLGLTPNFKSNFDLAEDAKLQLSKDTYDDDLDNLLAQIGDQYADLFLAAKNLSDAILLSDILRVNTEITKAPLSASMIKRYDEHHQDLTLLKALVRQQLPEKYKEIFFDQSKNGYAGYIDGGASQEEFYKFIKPILEKMDGTEELLVKLNREDLLRKQRTFDNGSIPHQIHLGELHAILRRQEDFYPFLKDNREKIEKILTFRIPYYVGPLARGNSRFAWMTRKSEETITPWNFEEVVDKGASAQSFIERMTNFDKNLPNEKVLPKHSLLYEYFTVYNELTKVKYVTEGMRKPAFLSGEQKKAIVDLLFKTNRKVTVKQLKEDYFKKIECFDSVEISGVEDRFNASLGTYHDLLKIIKDKDFLDNEENEDILEDIVLTLTLFEDREMIEERLKTYAHLFDDKVMKQLKRRRYTGWGRLSRKLINGIRDKQSGKTILDFLKSDGFANRNFMQLIHDDSLTFKEDIQKAQVSGQGDSLHEHIANLAGSPAIKKGILQTVKVVDELVKVMGRHKPENIVIEMARENQTTQKGQKNSRERMKRIEEGIKELGSQILKEHPVENTQLQNEKLYLYYLQNGRDMYVDQELDINRLSDYDVDHIVPQSFLKDDSIDNKVLTRSDKARGKSDNVPSEEVVKKMKNYWRQLLNAKLITQRKFDNLTKAERGGLSELDKAGFIKRQLVETRQITKHVAQILDSRMNTKYDENDKLIREVKVITLKSKLVSDFRKDFQFYKVREINNYHHAHDAYLNAVVGTALIKKYPKLESEFVYGDYKVYDVRKMIAKSEQEIGKATAKYFFYSNIMNFFKTEITLANGEIRKRPLIETNGETGEIVWDKGRDFATVRKVLSMPQVNIVKKTEVQTGGFSKESILPKRNSDKLIARKKDWDPKKYGGFDSPTVAYSVLVVAKVEKGKSKKLKSVKELLGITIMERSSFEKNPIDFLEAKGYKEVKKDLIIKLPKYSLFELENGRKRMLASAGELQKGNELALPSKYVNFLYLASHYEKLKGSPEDNEQKQLFVEQHKHYLDEIIEQISEFSKRVILADANLDKVLSAYNKHRDKPIREQAENIIHLFTLTNLGAPAAFKYFDTTIDRKRYTSTKEVLDATLIHQSITGLYETRIDLSQLGGDGGGGGGSGGGGSGGGGSGGGGSGGGGSGGGGSGGTLGDQGSRGSDPLPEPRVTLTVEGIPTEFLVNTGAEHSVLTKPMGKMGSKRTVVAGATGSKVYPWTTKRLLKIGQKQVTHSFLVIPECPAPLLGRDLLTKLKAQIQFSTEGPQVTWEDRPAMCLVLNLEEEYRLHEKPVPPSIDPSWLQLFPMVWAEKAGMGLANQVPPVVVELKSDASPVAVRQYPMSKEAREGIRPHIQRFLDLGILVPCQSPWNTPLLPVKKPGTNDYRPVQDLREVNKRVQDIHPTVPNPYNLLSSLPPSHTWYSVLDLKDAFFCLKLHPNSQPLFAFEWRDPEKGNTGQLTWTRLPQGFKNSPTLFNEALHRDLASFRALNPQVVMLQYVDDLLVAAPTYRDCKEGTRRLLQELSKLGYRVSAKKAQLCREEVTYLGYLLKGGKRWLTPARKATVMKIPTPTTPRQVREFLGTAGFCRLWIPGFASLAAPLYPLTRPKVPFTWTEAHQEAFGRIKEALLSAPALALPDLTKPFALYVDEKEGVARGVLTQTLGPWRRPVAYLSKKLDPVASGWPTCLKAIAAVALLLKDADKLTLGQNVLVIAPHNLESIVRQPPDRWMTNARMTHYQSLLLNERVSFAPPAILNPATLLPVESDDTPIHICSEILAEETGTRPDLRDQPLPGVPAWYTDGSSFIMDGRRQAGAAIVDNKRTVWASNLPEGTSAQKAELIALTQALRLAEGKSINIYTDSRYAFATAHVHGAIYKQRGWLTSAGKDIKNKEEILALLEAIHLPKRVAIIHCPGHQRGTDPVATGNRKADEAAKQAAQSTRILTETTKNAGKRTADGSEFEKRTADGSEFESPKKKAKVE

SEQ ID NO: 1753 - protein, 2218 aa, synthetic construct
MPAAKRVKLDGGDKKYSIGLDIGTNSVGWAVITDEYKVPSKKFKVLGNTDRHSIKKNLIGALLFDSGETAEATRLKRTARRRYTRRKNRICYLQEIFSNEMAKVDDSFFHRLEESFLVEEDKKHERHPIFGNIVDEVAYHEKYPTIYHLRKKLVDSTDKADLRLIYLALAHMIKFRGHFLIEGDLNPDNSDVDKLFIQLVQTYNQLFEENPINASGVDAKAILSARLSKSRRLENLIAQLPGEKKNGLFGNLIALSLGLTPNFKSNFDLAEDAKLQLSKDTYDDDLDNLLAQIGDQYADLFLAAKNLSDAILLSDILRVNTEITKAPLSASMIKRYDEHHQDLTLLKALVRQQLPEKYKEIFFDQSKNGYAGYIDGGASQEEFYKFIKPILEKMDGTEELLVKLNREDLLRKQRTFDNGSIPHQIHLGELHAILRRQEDFYPFLKDNREKIEKILTFRIPYYVGPLARGNSRFAWMTRKSEETITPWNFEEVVDKGASAQSFIERMTNFDKNLPNEKVLPKHSLLYEYFTVYNELTKVKYVTEGMRKPAFLSGEQKKAIVDLLFKTNRKVTVKQLKEDYFKKIECFDSVEISGVEDRFNASLGTYHDLLKIIKDKDFLDNEENEDILEDIVLTLTLFEDREMIEERLKTYAHLFDDKVMKQLKRRRYTGWGRLSRKLINGIRDKQSGKTILDFLKSDGFANRNFMQLIHDDSLTFKEDIQKAQVSGQGDSLHEHIANLAGSPAIKKGILQTVKVVDELVKVMGRHKPENIVIEMARENQTTQKGQKNSRERMKRIEEGIKELGSQILKEHPVENTQLQNEKLYLYYLQNGRDMYVDQELDINRLSDYDVDHIVPQSFLKDDSIDNKVLTRSDKARGKSDNVPSEEVVKKMKNYWRQLLNAKLITQRKFDNLTKAERGGLSELDKAGFIKRQLVETRQITKHVAQILDSRMNTKYDENDKLIREVKVITLKSKLVSDFRKDFQFYKVREINNYHHAHDAYLNAVVGTALIKKYPKLESEFVYGDYKVYDVRKMIAKSEQEIGKATAKYFFYSNIMNFFKTEITLANGEIRKRPLIETNGETGEIVWDKGRDFATVRKVLSMPQVNIVKKTEVQTGGFSKESILPKRNSDKLIARKKDWDPKKYGGFDSPTVAYSVLVVAKVEKGKSKKLKSVKELLGITIMERSSFEKNPIDFLEAKGYKEVKKDLIIKLPKYSLFELENGRKRMLASAGELQKGNELALPSKYVNFLYLASHYEKLKGSPEDNEQKQLFVEQHKHYLDEIIEQISEFSKRVILADANLDKVLSAYNKHRDKPIREQAENIIHLFTLTNLGAPAAFKYFDTTIDRKRYTSTKEVLDATLIHQSITGLYETRIDLSQLGGDGGEAAAKGGGPAPGGTLGDQGSRGSDPLPEPRVTLTVEGIPTEFLVNTGAEHSVLTKPMGKMGSKRTVVAGATGSKVYPWTTKRLLKIGQKQVTHSFLVIPECPAPLLGRDLLTKLKAQIQFSTEGPQVTWEDRPAMCLVLNLEEEYRLHEKPVPPSIDPSWLQLFPMVWAEKAGMGLANQVPPVVVELKSDASPVAVRQYPMSKEAREGIRPHIQRFLDLGILVPCQSPWNTPLLPVKKPGTNDYRPVQDLREVNKRVQDIHPTVPNPYNLLSSLPPSHTWYSVLDLKDAFFCLKLHPNSQPLFAFEWRDPEKGNTGQLTWTRLPQGFKNSPTLFNEALHRDLASFRALNPQVVMLQYVDDLLVAAPTYRDCKEGTRRLLQELSKLGYRVSAKKAQLCREEVTYLGYLLKGGKRWLTPARKATVMKIPTPTTPRQVREFLGTAGFCRLWIPGFASLAAPLYPLTRPKVPFTWTEAHQEAFGRIKEALLSAPALALPDLTKPFALYVDEKEGVARGVLTQTLGPWRRPVAYLSKKLDPVASGWPTCLKAIAAVALLLKDADKLTLGQNVLVIAPHNLESIVRQPPDRWMTNARMTHYQSLLLNERVSFAPPAILNPATLLPVESDDTPIHICSEILAEETGTRPDLRDQPLPGVPAWYTDGSSFIMDGRRQAGAAIVDNKRTVWASNLPEGTSAQKAELIALTQALRLAEGKSINIYTDSRYAFATAHVHGAIYKQRGWLTSAGKDIKNKEEILALLEAIHLPKRVAIIHCPGHQRGTDPVATGNRKADEAAKQAAQSTRILTETTKNAGKRTADGSEFEKRTADGSEFESPKKKAKVE

SEQ ID NO: 1754 - protein, 2218 aa, synthetic construct
MPAAKRVKLDGGDKKYSIGLDIGTNSVGWAVITDEYKVPSKKFKVLGNTDRHSIKKNLIGALLFDSGETAEATRLKRTARRRYTRRKNRICYLQEIFSNEMAKVDDSFFHRLEESFLVEEDKKHERHPIFGNIVDEVAYHEKYPTIYHLRKKLVDSTDKADLRLIYLALAHMIKFRGHFLIEGDLNPDNSDVDKLFIQLVQTYNQLFEENPINASGVDAKAILSARLSKSRRLENLIAQLPGEKKNGLFGNLIALSLGLTPNFKSNFDLAEDAKLQLSKDTYDDDLDNLLAQIGDQYADLFLAAKNLSDAILLSDILRVNTEITKAPLSASMIKRYDEHHQDLTLLKALVRQQLPEKYKEIFFDQSKNGYAGYIDGGASQEEFYKFIKPILEKMDGTEELLVKLNREDLLRKQRTFDNGSIPHQIHLGELHAILRRQEDFYPFLKDNREKIEKILTFRIPYYVGPLARGNSRFAWMTRKSEETITPWNFEEVVDKGASAQSFIERMTNFDKNLPNEKVLPKHSLLYEYFTVYNELTKVKYVTEGMRKPAFLSGEQKKAIVDLLFKTNRKVTVKQLKEDYFKKIECFDSVEISGVEDRFNASLGTYHDLLKIIKDKDFLDNEENEDILEDIVLTLTLFEDREMIEERLKTYAHLFDDKVMKQLKRRRYTGWGRLSRKLINGIRDKQSGKTILDFLKSDGFANRNFMQLIHDDSLTFKEDIQKAQVSGQGDSLHEHIANLAGSPAIKKGILQTVKVVDELVKVMGRHKPENIVIEMARENQTTQKGQKNSRERMKRIEEGIKELGSQILKEHPVENTQLQNEKLYLYYLQNGRDMYVDQELDINRLSDYDVDHIVPQSFLKDDSIDNKVLTRSDKARGKSDNVPSEEVVKKMKNYWRQLLNAKLITQRKFDNLTKAERGGLSELDKAGFIKRQLVETRQITKHVAQILDSRMNTKYDENDKLIREVKVITLKSKLVSDFRKDFQFYKVREINNYHHAHDAYLNAVVGTALIKKYPKLESEFVYGDYKVYDVRKMIAKSEQEIGKATAKYFFYSNIMNFFKTEITLANGEIRKRPLIETNGETGEIVWDKGRDFATVRKVLSMPQVNIVKKTEVQTGGFSKESILPKRNSDKLIARKKDWDPKKYGGFDSPTVAYSVLVVAKVEKGKSKKLKSVKELLGITIMERSSFEKNPIDFLEAKGYKEVKKDLIIKLPKYSLFELENGRKRMLASAGELQKGNELALPSKYVNFLYLASHYEKLKGSPEDNEQKQLFVEQHKHYLDEIIEQISEFSKRVILADANLDKVLSAYNKHRDKPIREQAENIIHLFTLTNLGAPAAFKYFDTTIDRKRYTSTKEVLDATLIHQSITGLYETRIDLSQLGGDGGPAPGGSEAAAKGGTLGDQGSRGSDPLPEPRVTLTVEGIPTEFLVNTGAEHSVLTKPMGKMGSKRTVVAGATGSKVYPWTTKRLLKIGQKQVTHSFLVIPECPAPLLGRDLLTKLKAQIQFSTEGPQVTWEDRPAMCLVLNLEEEYRLHEKPVPPSIDPSWLQLFPMVWAEKAGMGLANQVPPVVVELKSDASPVAVRQYPMSKEAREGIRPHIQRFLDLGILVPCQSPWNTPLLPVKKPGTNDYRPVQDLREVNKRVQDIHPTVPNPYNLLSSLPPSHTWYSVLDLKDAFFCLKLHPNSQPLFAFEWRDPEKGNTGQLTWTRLPQGFKNSPTLFNEALHRDLASFRALNPQVVMLQYVDDLLVAAPTYRDCKEGTRRLLQELSKLGYRVSAKKAQLCREEVTYLGYLLKGGKRWLTPARKATVMKIPTPTTPRQVREFLGTAGFCRLWIPGFASLAAPLYPLTRPKVPFTWTEAHQEAFGRIKEALLSAPALALPDLTKPFALYVDEKEGVARGVLTQTLGPWRRPVAYLSKKLDPVASGWPTCLKAIAAVALLLKDADKLTLGQNVLVIAPHNLESIVRQPPDRWMTNARMTHYQSLLLNERVSFAPPAILNPATLLPVESDDTPIHICSEILAEETGTRPDLRDQPLPGVPAWYTDGSSFIMDGRRQAGAAIVDNKRTVWASNLPEGTSAQKAELIALTQALRLAEGKSINIYTDSRYAFATAHVHGAIYKQRGWLTSAGKDIKNKEEILALLEAIHLPKRVAIIHCPGHQRGTDPVATGNRKADEAAKQAAQSTRILTETTKNAGKRTADGSEFEKRTADGSEFESPKKKAKVE

SEQ ID NO: 1755 - protein, 2219 aa, synthetic construct
MPAAKRVKLDGGDKKYSIGLDIGTNSVGWAVITDEYKVPSKKFKVLGNTDRHSIKKNLIGALLFDSGETAEATRLKRTARRRYTRRKNRICYLQEIFSNEMAKVDDSFFHRLEESFLVEEDKKHERHPIFGNIVDEVAYHEKYPTIYHLRKKLVDSTDKADLRLIYLALAHMIKFRGHFLIEGDLNPDNSDVDKLFIQLVQTYNQLFEENPINASGVDAKAILSARLSKSRRLENLIAQLPGEKKNGLFGNLIALSLGLTPNFKSNFDLAEDAKLQLSKDTYDDDLDNLLAQIGDQYADLFLAAKNLSDAILLSDILRVNTEITKAPLSASMIKRYDEHHQDLTLLKALVRQQLPEKYKEIFFDQSKNGYAGYIDGGASQEEFYKFIKPILEKMDGTEELLVKLNREDLLRKQRTFDNGSIPHQIHLGELHAILRRQEDFYPFLKDNREKIEKILTFRIPYYVGPLARGNSRFAWMTRKSEETITPWNFEEVVDKGASAQSFIERMTNFDKNLPNEKVLPKHSLLYEYFTVYNELTKVKYVTEGMRKPAFLSGEQKKAIVDLLFKTNRKVTVKQLKEDYFKKIECFDSVEISGVEDRFNASLGTYHDLLKIIKDKDFLDNEENEDILEDIVLTLTLFEDREMIEERLKTYAHLFDDKVMKQLKRRRYTGWGRLSRKLINGIRDKQSGKTILDFLKSDGFANRNFMQLIHDDSLTFKEDIQKAQVSGQGDSLHEHIANLAGSPAIKKGILQTVKVVDELVKVMGRHKPENIVIEMARENQTTQKGQKNSRERMKRIEEGIKELGSQILKEHPVENTQLQNEKLYLYYLQNGRDMYVDQELDINRLSDYDVDHIVPQSFLKDDSIDNKVLTRSDKARGKSDNVPSEEVVKKMKNYWRQLLNAKLITQRKFDNLTKAERGGLSELDKAGFIKRQLVETRQITKHVAQILDSRMNTKYDENDKLIREVKVITLKSKLVSDFRKDFQFYKVREINNYHHAHDAYLNAVVGTALIKKYPKLESEFVYGDYKVYDVRKMIAKSEQEIGKATAKYFFYSNIMNFFKTEITLANGEIRKRPLIETNGETGEIVWDKGRDFATVRKVLSMPQVNIVKKTEVQTGGFSKESILPKRNSDKLIARKKDWDPKKYGGFDSPTVAYSVLVVAKVEKGKSKKLKSVKELLGITIMERSSFEKNPIDFLEAKGYKEVKKDLIIKLPKYSLFELENGRKRMLASAGELQKGNELALPSKYVNFLYLASHYEKLKGSPEDNEQKQLFVEQHKHYLDEIIEQISEFSKRVILADANLDKVLSAYNKHRDKPIREQAENIIHLFTLTNLGAPAAFKYFDTTIDRKRYTSTKEVLDATLIHQSITGLYETRIDLSQLGGDGGGGSGGSGGSGGSGGTLGDQGSRGSDPLPEPRVTLTVEGIPTEFLVNTGAEHSVLTKPMGKMGSKRTVVAGATGSKVYPWTTKRLLKIGQKQVTHSFLVIPECPAPLLGRDLLTKLKAQIQFSTEGPQVTWEDRPAMCLVLNLEEEYRLHEKPVPPSIDPSWLQLFPMVWAEKAGMGLANQVPPVVVELKSDASPVAVRQYPMSKEAREGIRPHIQRFLDLGILVPCQSPWNTPLLPVKKPGTNDYRPVQDLREVNKRVQDIHPTVPNPYNLLSSLPPSHTWYSVLDLKDAFFCLKLHPNSQPLFAFEWRDPEKGNTGQLTWTRLPQGFKNSPTLFNEALHRDLASFRALNPQVVMLQYVDDLLVAAPTYRDCKEGTRRLLQELSKLGYRVSAKKAQLCREEVTYLGYLLKGGKRWLTPARKATVMKIPTPTTPRQVREFLGTAGFCRLWIPGFASLAAPLYPLTRPKVPFTWTEAHQEAFGRIKEALLSAPALALPDLTKPFALYVDEKEGVARGVLTQTLGPWRRPVAYLSKKLDPVASGWPTCLKAIAAVALLLKDADKLTLGQNVLVIAPHNLESIVRQPPDRWMTNARMTHYQSLLLNERVSFAPPAILNPATLLPVESDDTPIHICSEILAEETGTRPDLRDQPLPGVPAWYTDGSSFIMDGRRQAGAAIVDNKRTVWASNLPEGTSAQKAELIALTQALRLAEGKSINIYTDSRYAFATAHVHGAIYKQRGWLTSAGKDIKNKEEILALLEAIHLPKRVAIIHCPGHQRGTDPVATGNRKADEAAKQAAQSTRILTETTKNAGKRTADGSEFEKRTADGSEFESPKKKAKVE

SEQ ID NO: 1756 - protein, 2218 aa, synthetic construct
MPAAKRVKLDGGDKKYSIGLDIGTNSVGWAVITDEYKVPSKKFKVLGNTDRHSIKKNLIGALLFDSGETAEATRLKRTARRRYTRRKNRICYLQEIFSNEMAKVDDSFFHRLEESFLVEEDKKHERHPIFGNIVDEVAYHEKYPTIYHLRKKLVDSTDKADLRLIYLALAHMIKFRGHFLIEGDLNPDNSDVDKLFIQLVQTYNQLFEENPINASGVDAKAILSARLSKSRRLENLIAQLPGEKKNGLFGNLIALSLGLTPNFKSNFDLAEDAKLQLSKDTYDDDLDNLLAQIGDQYADLFLAAKNLSDAILLSDILRVNTEITKAPLSASMIKRYDEHHQDLTLLKALVRQQLPEKYKEIFFDQSKNGYAGYIDGGASQEEFYKFIKPILEKMDGTEELLVKLNREDLLRKQRTFDNGSIPHQIHLGELHAILRRQEDFYPFLKDNREKIEKILTFRIPYYVGPLARGNSRFAWMTRKSEETITPWNFEEVVDKGASAQSFIERMTNFDKNLPNEKVLPKHSLLYEYFTVYNELTKVKYVTEGMRKPAFLSGEQKKAIVDLLFKTNRKVTVKQLKEDYFKKIECFDSVEISGVEDRFNASLGTYHDLLKIIKDKDFLDNEENEDILEDIVLTLTLFEDREMIEERLKTYAHLFDDKVMKQLKRRRYTGWGRLSRKLINGIRDKQSGKTILDFLKSDGFANRNFMQLIHDDSLTFKEDIQKAQVSGQGDSLHEHIANLAGSPAIKKGILQTVKVVDELVKVMGRHKPENIVIEMARENQTTQKGQKNSRERMKRIEEGIKELGSQILKEHPVENTQLQNEKLYLYYLQNGRDMYVDQELDINRLSDYDVDHIVPQSFLKDDSIDNKVLTRSDKARGKSDNVPSEEVVKKMKNYWRQLLNAKLITQRKFDNLTKAERGGLSELDKAGFIKRQLVETRQITKHVAQILDSRMNTKYDENDKLIREVKVITLKSKLVSDFRKDFQFYKVREINNYHHAHDAYLNAVVGTALIKKYPKLESEFVYGDYKVYDVRKMIAKSEQEIGKATAKYFFYSNIMNFFKTEITLANGEIRKRPLIETNGETGEIVWDKGRDFATVRKVLSMPQVNIVKKTEVQTGGFSKESILPKRNSDKLIARKKDWDPKKYGGFDSPTVAYSVLVVAKVEKGKSKKLKSVKELLGITIMERSSFEKNPIDFLEAKGYKEVKKDLIIKLPKYSLFELENGRKRMLASAGELQKGNELALPSKYVNFLYLASHYEKLKGSPEDNEQKQLFVEQHKHYLDEIIEQISEFSKRVILADANLDKVLSAYNKHRDKPIREQAENIIHLFTLTNLGAPAAFKYFDTTIDRKRYTSTKEVLDATLIHQSITGLYETRIDLSQLGGDGGEAAAKGSSGGGGGTLGDQGSRGSDPLPEPRVTLTVEGIPTEFLVNTGAEHSVLTKPMGKMGSKRTVVAGATGSKVYPWTTKRLLKIGQKQVTHSFLVIPECPAPLLGRDLLTKLKAQIQFSTEGPQVTWEDRPAMCLVLNLEEEYRLHEKPVPPSIDPSWLQLFPMVWAEKAGMGLANQVPPVVVELKSDASPVAVRQYPMSKEAREGIRPHIQRFLDLGILVPCQSPWNTPLLPVKKPGTNDYRPVQDLREVNKRVQDIHPTVPNPYNLLSSLPPSHTWYSVLDLKDAFFCLKLHPNSQPLFAFEWRDPEKGNTGQLTWTRLPQGFKNSPTLFNEALHRDLASFRALNPQVVMLQYVDDLLVAAPTYRDCKEGTRRLLQELSKLGYRVSAKKAQLCREEVTYLGYLLKGGKRWLTPARKATVMKIPTPTTPRQVREFLGTAGFCRLWIPGFASLAAPLYPLTRPKVPFTWTEAHQEAFGRIKEALLSAPALALPDLTKPFALYVDEKEGVARGVLTQTLGPWRRPVAYLSKKLDPVASGWPTCLKAIAAVALLLKDADKLTLGQNVLVIAPHNLESIVRQPPDRWMTNARMTHYQSLLLNERVSFAPPAILNPATLLPVESDDTPIHICSEILAEETGTRPDLRDQPLPGVPAWYTDGSSFIMDGRRQAGAAIVDNKRTVWASNLPEGTSAQKAELIALTQALRLAEGKSINIYTDSRYAFATAHVHGAIYKQRGWLTSAGKDIKNKEEILALLEAIHLPKRVAIIHCPGHQRGTDPVATGNRKADEAAKQAAQSTRILTETTKNAGKRTADGSEFEKRTADGSEFESPKKKAKVE

SEQ ID NO: 1757 - protein, 2216 aa, synthetic construct
MPAAKRVKLDGGDKKYSIGLDIGTNSVGWAVITDEYKVPSKKFKVLGNTDRHSIKKNLIGALLFDSGETAEATRLKRTARRRYTRRKNRICYLQEIFSNEMAKVDDSFFHRLEESFLVEEDKKHERHPIFGNIVDEVAYHEKYPTIYHLRKKLVDSTDKADLRLIYLALAHMIKFRGHFLIEGDLNPDNSDVDKLFIQLVQTYNQLFEENPINASGVDAKAILSARLSKSRRLENLIAQLPGEKKNGLFGNLIALSLGLTPNFKSNFDLAEDAKLQLSKDTYDDDLDNLLAQIGDQYADLFLAAKNLSDAILLSDILRVNTEITKAPLSASMIKRYDEHHQDLTLLKALVRQQLPEKYKEIFFDQSKNGYAGYIDGGASQEEFYKFIKPILEKMDGTEELLVKLNREDLLRKQRTFDNGSIPHQIHLGELHAILRRQEDFYPFLKDNREKIEKILTFRIPYYVGPLARGNSRFAWMTRKSEETITPWNFEEVVDKGASAQSFIERMTNFDKNLPNEKVLPKHSLLYEYFTVYNELTKVKYVTEGMRKPAFLSGEQKKAIVDLLFKTNRKVTVKQLKEDYFKKIECFDSVEISGVEDRFNASLGTYHDLLKIIKDKDFLDNEENEDILEDIVLTLTLFEDREMIEERLKTYAHLFDDKVMKQLKRRRYTGWGRLSRKLINGIRDKQSGKTILDFLKSDGFANRNFMQLIHDDSLTFKEDIQKAQVSGQGDSLHEHIANLAGSPAIKKGILQTVKVVDELVKVMGRHKPENIVIEMARENQTTQKGQKNSRERMKRIEEGIKELGSQILKEHPVENTQLQNEKLYLYYLQNGRDMYVDQELDINRLSDYDVDHIVPQSFLKDDSIDNKVLTRSDKARGKSDNVPSEEVVKKMKNYWRQLLNAKLITQRKFDNLTKAERGGLSELDKAGFIKRQLVETRQITKHVAQILDSRMNTKYDENDKLIREVKVITLKSKLVSDFRKDFQFYKVREINNYHHAHDAYLNAVVGTALIKKYPKLESEFVYGDYKVYDVRKMIAKSEQEIGKATAKYFFYSNIMNFFKTEITLANGEIRKRPLIETNGETGEIVWDKGRDFATVRKVLSMPQVNIVKKTEVQTGGFSKESILPKRNSDKLIARKKDWDPKKYGGFDSPTVAYSVLVVAKVEKGKSKKLKSVKELLGITIMERSSFEKNPIDFLEAKGYKEVKKDLIIKLPKYSLFELENGRKRMLASAGELQKGNELALPSKYVNFLYLASHYEKLKGSPEDNEQKQLFVEQHKHYLDEIIEQISEFSKRVILADANLDKVLSAYNKHRDKPIREQAENIIHLFTLTNLGAPAAFKYFDTTIDRKRYTSTKEVLDATLIHQSITGLYETRIDLSQLGGDGGGGSPAPGSSGGTLGDQGSRGSDPLPEPRVTLTVEGIPTEFLVNTGAEHSVLTKPMGKMGSKRTVVAGATGSKVYPWTTKRLLKIGQKQVTHSFLVIPECPAPLLGRDLLTKLKAQIQFSTEGPQVTWEDRPAMCLVLNLEEEYRLHEKPVPPSIDPSWLQLFPMVWAEKAGMGLANQVPPVVVELKSDASPVAVRQYPMSKEAREGIRPHIQRFLDLGILVPCQSPWNTPLLPVKKPGTNDYRPVQDLREVNKRVQDIHPTVPNPYNLLSSLPPSHTWYSVLDLKDAFFCLKLHPNSQPLFAFEWRDPEKGNTGQLTWTRLPQGFKNSPTLFNEALHRDLASFRALNPQVVMLQYVDDLLVAAPTYRDCKEGTRRLLQELSKLGYRVSAKKAQLCREEVTYLGYLLKGGKRWLTPARKATVMKIPTPTTPRQVREFLGTAGFCRLWIPGFASLAAPLYPLTRPKVPFTWTEAHQEAFGRIKEALLSAPALALPDLTKPFALYVDEKEGVARGVLTQTLGPWRRPVAYLSKKLDPVASGWPTCLKAIAAVALLLKDADKLTLGQNVLVIAPHNLESIVRQPPDRWMTNARMTHYQSLLLNERVSFAPPAILNPATLLPVESDDTPIHICSEILAEETGTRPDLRDQPLPGVPAWYTDGSSFIMDGRRQAGAAIVDNKRTVWASNLPEGTSAQKAELIALTQALRLAEGKSINIYTDSRYAFATAHVHGAIYKQRGWLTSAGKDIKNKEEILALLEAIHLPKRVAIIHCPGHQRGTDPVATGNRKADEAAKQAAQSTRILTETTKNAGKRTADGSEFEKRTADGSEFESPKKKAKVE

SEQ ID NO: 1758 - protein, 2222 aa, synthetic construct
MPAAKRVKLDGGDKKYSIGLDIGTNSVGWAVITDEYKVPSKKFKVLGNTDRHSIKKNLIGALLFDSGETAEATRLKRTARRRYTRRKNRICYLQEIFSNEMAKVDDSFFHRLEESFLVEEDKKHERHPIFGNIVDEVAYHEKYPTIYHLRKKLVDSTDKADLRLIYLALAHMIKFRGHFLIEGDLNPDNSDVDKLFIQLVQTYNQLFEENPINASGVDAKAILSARLSKSRRLENLIAQLPGEKKNGLFGNLIALSLGLTPNFKSNFDLAEDAKLQLSKDTYDDDLDNLLAQIGDQYADLFLAAKNLSDAILLSDILRVNTEITKAPLSASMIKRYDEHHQDLTLLKALVRQQLPEKYKEIFFDQSKNGYAGYIDGGASQEEFYKFIKPILEKMDGTEELLVKLNREDLLRKQRTFDNGSIPHQIHLGELHAILRRQEDFYPFLKDNREKIEKILTFRIPYYVGPLARGNSRFAWMTRKSEETITPWNFEEVVDKGASAQSFIERMTNFDKNLPNEKVLPKHSLLYEYFTVYNELTKVKYVTEGMRKPAFLSGEQKKAIVDLLFKTNRKVTVKQLKEDYFKKIECFDSVEISGVEDRFNASLGTYHDLLKIIKDKDFLDNEENEDILEDIVLTLTLFEDREMIEERLKTYAHLFDDKVMKQLKRRRYTGWGRLSRKLINGIRDKQSGKTILDFLKSDGFANRNFMQLIHDDSLTFKEDIQKAQVSGQGDSLHEHIANLAGSPAIKKGILQTVKVVDELVKVMGRHKPENIVIEMARENQTTQKGQKNSRERMKRIEEGIKELGSQILKEHPVENTQLQNEKLYLYYLQNGRDMYVDQELDINRLSDYDVDHIVPQSFLKDDSIDNKVLTRSDKARGKSDNVPSEEVVKKMKNYWRQLLNAKLITQRKFDNLTKAERGGLSELDKAGFIKRQLVETRQITKHVAQILDSRMNTKYDENDKLIREVKVITLKSKLVSDFRKDFQFYKVREINNYHHAHDAYLNAVVGTALIKKYPKLESEFVYGDYKVYDVRKMIAKSEQEIGKATAKYFFYSNIMNFFKTEITLANGEIRKRPLIETNGETGEIVWDKGRDFATVRKVLSMPQVNIVKKTEVQTGGFSKESILPKRNSDKLIARKKDWDPKKYGGFDSPTVAYSVLVVAKVEKGKSKKLKSVKELLGITIMERSSFEKNPIDFLEAKGYKEVKKDLIIKLPKYSLFELENGRKRMLASAGELQKGNELALPSKYVNFLYLASHYEKLKGSPEDNEQKQLFVEQHKHYLDEIIEQISEFSKRVILADANLDKVLSAYNKHRDKPIREQAENIIHLFTLTNLGAPAAFKYFDTTIDRKRYTSTKEVLDATLIHQSITGLYETRIDLSQLGGDGGGGGGSGGGGSGGGGSGGTLGDQGSRGSDPLPEPRVTLTVEGIPTEFLVNTGAEHSVLTKPMGKMGSKRTVVAGATGSKVYPWTTKRLLKIGQKQVTHSFLVIPECPAPLLGRDLLTKLKAQIQFSTEGPQVTWEDRPAMCLVLNLEEEYRLHEKPVPPSIDPSWLQLFPMVWAEKAGMGLANQVPPVVVELKSDASPVAVRQYPMSKEAREGIRPHIQRFLDLGILVPCQSPWNTPLLPVKKPGTNDYRPVQDLREVNKRVQDIHPTVPNPYNLLSSLPPSHTWYSVLDLKDAFFCLKLHPNSQPLFAFEWRDPEKGNTGQLTWTRLPQGFKNSPTLFNEALHRDLASFRALNPQVVMLQYVDDLLVAAPTYRDCKEGTRRLLQELSKLGYRVSAKKAQLCREEVTYLGYLLKGGKRWLTPARKATVMKIPTPTTPRQVREFLGTAGFCRLWIPGFASLAAPLYPLTRPKVPFTWTEAHQEAFGRIKEALLSAPALALPDLTKPFALYVDEKEGVARGVLTQTLGPWRRPVAYLSKKLDPVASGWPTCLKAIAAVALLLKDADKLTLGQNVLVIAPHNLESIVRQPPDRWMTNARMTHYQSLLLNERVSFAPPAILNPATLLPVESDDTPIHICSEILAEETGTRPDLRDQPLPGVPAWYTDGSSFIMDGRRQAGAAIVDNKRTVWASNLPEGTSAQKAELIALTQALRLAEGKSINIYTDSRYAFATAHVHGAIYKQRGWLTSAGKDIKNKEEILALLEAIHLPKRVAIIHCPGHQRGTDPVATGNRKADEAAKQAAQSTRILTETTKNAGKRTADGSEFEKRTADGSEFESPKKKAKVE

SEQ ID NO: 1759 - protein, 2218 aa, synthetic construct
MPAAKRVKLDGGDKKYSIGLDIGTNSVGWAVITDEYKVPSKKFKVLGNTDRHSIKKNLIGALLFDSGETAEATRLKRTARRRYTRRKNRICYLQEIFSNEMAKVDDSFFHRLEESFLVEEDKKHERHPIFGNIVDEVAYHEKYPTIYHLRKKLVDSTDKADLRLIYLALAHMIKFRGHFLIEGDLNPDNSDVDKLFIQLVQTYNQLFEENPINASGVDAKAILSARLSKSRRLENLIAQLPGEKKNGLFGNLIALSLGLTPNFKSNFDLAEDAKLQLSKDTYDDDLDNLLAQIGDQYADLFLAAKNLSDAILLSDILRVNTEITKAPLSASMIKRYDEHHQDLTLLKALVRQQLPEKYKEIFFDQSKNGYAGYIDGGASQEEFYKFIKPILEKMDGTEELLVKLNREDLLRKQRTFDNGSIPHQIHLGELHAILRRQEDFYPFLKDNREKIEKILTFRIPYYVGPLARGNSRFAWMTRKSEETITPWNFEEVVDKGASAQSFIERMTNFDKNLPNEKVLPKHSLLYEYFTVYNELTKVKYVTEGMRKPAFLSGEQKKAIVDLLFKTNRKVTVKQLKEDYFKKIECFDSVEISGVEDRFNASLGTYHDLLKIIKDKDFLDNEENEDILEDIVLTLTLFEDREMIEERLKTYAHLFDDKVMKQLKRRRYTGWGRLSRKLINGIRDKQSGKTILDFLKSDGFANRNFMQLIHDDSLTFKEDIQKAQVSGQGDSLHEHIANLAGSPAIKKGILQTVKVVDELVKVMGRHKPENIVIEMARENQTTQKGQKNSRERMKRIEEGIKELGSQILKEHPVENTQLQNEKLYLYYLQNGRDMYVDQELDINRLSDYDVDHIVPQSFLKDDSIDNKVLTRSDKARGKSDNVPSEEVVKKMKNYWRQLLNAKLITQRKFDNLTKAERGGLSELDKAGFIKRQLVETRQITKHVAQILDSRMNTKYDENDKLIREVKVITLKSKLVSDFRKDFQFYKVREINNYHHAHDAYLNAVVGTALIKKYPKLESEFVYGDYKVYDVRKMIAKSEQEIGKATAKYFFYSNIMNFFKTEITLANGEIRKRPLIETNGETGEIVWDKGRDFATVRKVLSMPQVNIVKKTEVQTGGFSKESILPKRNSDKLIARKKDWDPKKYGGFDSPTVAYSVLVVAKVEKGKSKKLKSVKELLGITIMERSSFEKNPIDFLEAKGYKEVKKDLIIKLPKYSLFELENGRKRMLASAGELQKGNELALPSKYVNFLYLASHYEKLKGSPEDNEQKQLFVEQHKHYLDEIIEQISEFSKRVILADANLDKVLSAYNKHRDKPIREQAENIIHLFTLTNLGAPAAFKYFDTTIDRKRYTSTKEVLDATLIHQSITGLYETRIDLSQLGGDGGGSSGGGEAAAKGGTLGDQGSRGSDPLPEPRVTLTVEGIPTEFLVNTGAEHSVLTKPMGKMGSKRTVVAGATGSKVYPWTTKRLLKIGQKQVTHSFLVIPECPAPLLGRDLLTKLKAQIQFSTEGPQVTWEDRPAMCLVLNLEEEYRLHEKPVPPSIDPSWLQLFPMVWAEKAGMGLANQVPPVVVELKSDASPVAVRQYPMSKEAREGIRPHIQRFLDLGILVPCQSPWNTPLLPVKKPGTNDYRPVQDLREVNKRVQDIHPTVPNPYNLLSSLPPSHTWYSVLDLKDAFFCLKLHPNSQPLFAFEWRDPEKGNTGQLTWTRLPQGFKNSPTLFNEALHRDLASFRALNPQVVMLQYVDDLLVAAPTYRDCKEGTRRLLQELSKLGYRVSAKKAQLCREEVTYLGYLLKGGKRWLTPARKATVMKIPTPTTPRQVREFLGTAGFCRLWIPGFASLAAPLYPLTRPKVPFTWTEAHQEAFGRIKEALLSAPALALPDLTKPFALYVDEKEGVARGVLTQTLGPWRRPVAYLSKKLDPVASGWPTCLKAIAAVALLLKDADKLTLGQNVLVIAPHNLESIVRQPPDRWMTNARMTHYQSLLLNERVSFAPPAILNPATLLPVESDDTPIHICSEILAEETGTRPDLRDQPLPGVPAWYTDGSSFIMDGRRQAGAAIVDNKRTVWASNLPEGTSAQKAELIALTQALRLAEGKSINIYTDSRYAFATAHVHGAIYKQRGWLTSAGKDIKNKEEILALLEAIHLPKRVAIIHCPGHQRGTDPVATGNRKADEAAKQAAQSTRILTETTKNAGKRTADGSEFEKRTADGSEFESPKKKAKVE

SEQ ID NO: 1760 - protein, 2215 aa, synthetic construct
MPAAKRVKLDGGDKKYSIGLDIGTNSVGWAVITDEYKVPSKKFKVLGNTDRHSIKKNLIGALLFDSGETAEATRLKRTARRRYTRRKNRICYLQEIFSNEMAKVDDSFFHRLEESFLVEEDKKHERHPIFGNIVDEVAYHEKYPTIYHLRKKLVDSTDKADLRLIYLALAHMIKFRGHFLIEGDLNPDNSDVDKLFIQLVQTYNQLFEENPINASGVDAKAILSARLSKSRRLENLIAQLPGEKKNGLFGNLIALSLGLTPNFKSNFDLAEDAKLQLSKDTYDDDLDNLLAQIGDQYADLFLAAKNLSDAILLSDILRVNTEITKAPLSASMIKRYDEHHQDLTLLKALVRQQLPEKYKEIFFDQSKNGYAGYIDGGASQEEFYKFIKPILEKMDGTEELLVKLNREDLLRKQRTFDNGSIPHQIHLGELHAILRRQEDFYPFLKDNREKIEKILTFRIPYYVGPLARGNSRFAWMTRKSEETITPWNFEEVVDKGASAQSFIERMTNFDKNLPNEKVLPKHSLLYEYFTVYNELTKVKYVTEGMRKPAFLSGEQKKAIVDLLFKTNRKVTVKQLKEDYFKKIECFDSVEISGVEDRFNASLGTYHDLLKIIKDKDFLDNEENEDILEDIVLTLTLFEDREMIEERLKTYAHLFDDKVMKQLKRRRYTGWGRLSRKLINGIRDKQSGKTILDFLKSDGFANRNFMQLIHDDSLTFKEDIQKAQVSGQGDSLHEHIANLAGSPAIKKGILQTVKVVDELVKVMGRHKPENIVIEMARENQTTQKGQKNSRERMKRIEEGIKELGSQILKEHPVENTQLQNEKLYLYYLQNGRDMYVDQELDINRLSDYDVDHIVPQSFLKDDSIDNKVLTRSDKARGKSDNVPSEEVVKKMKNYWRQLLNAKLITQRKFDNLTKAERGGLSELDKAGFIKRQLVETRQITKHVAQILDSRMNTKYDENDKLIREVKVITLKSKLVSDFRKDFQFYKVREINNYHHAHDAYLNAVVGTALIKKYPKLESEFVYGDYKVYDVRKMIAKSEQEIGKATAKYFFYSNIMNFFKTEITLANGEIRKRPLIETNGETGEIVWDKGRDFATVRKVLSMPQVNIVKKTEVQTGGFSKESILPKRNSDKLIARKKDWDPKKYGGFDSPTVAYSVLVVAKVEKGKSKKLKSVKELLGITIMERSSFEKNPIDFLEAKGYKEVKKDLIIKLPKYSLFELENGRKRMLASAGELQKGNELALPSKYVNFLYLASHYEKLKGSPEDNEQKQLFVEQHKHYLDEIIEQISEFSKRVILADANLDKVLSAYNKHRDKPIREQAENIIHLFTLTNLGAPAAFKYFDTTIDRKRYTSTKEVLDATLIHQSITGLYETRIDLSQLGGDGGEAAAKGGGGGTLGDQGSRGSDPLPEPRVTLTVEGIPTEFLVNTGAEHSVLTKPMGKMGSKRTVVAGATGSKVYPWTTKRLLKIGQKQVTHSFLVIPECPAPLLGRDLLTKLKAQIQFSTEGPQVTWEDRPAMCLVLNLEEEYRLHEKPVPPSIDPSWLQLFPMVWAEKAGMGLANQVPPVVVELKSDASPVAVRQYPMSKEAREGIRPHIQRFLDLGILVPCQSPWNTPLLPVKKPGTNDYRPVQDLREVNKRVQDIHPTVPNPYNLLSSLPPSHTWYSVLDLKDAFFCLKLHPNSQPLFAFEWRDPEKGNTGQLTWTRLPQGFKNSPTLFNEALHRDLASFRALNPQVVMLQYVDDLLVAAPTYRDCKEGTRRLLQELSKLGYRVSAKKAQLCREEVTYLGYLLKGGKRWLTPARKATVMKIPTPTTPRQVREFLGTAGFCRLWIPGFASLAAPLYPLTRPKVPFTWTEAHQEAFGRIKEALLSAPALALPDLTKPFALYVDEKEGVARGVLTQTLGPWRRPVAYLSKKLDPVASGWPTCLKAIAAVALLLKDADKLTLGQNVLVIAPHNLESIVRQPPDRWMTNARMTHYQSLLLNERVSFAPPAILNPATLLPVESDDTPIHICSEILAEETGTRPDLRDQPLPGVPAWYTDGSSFIMDGRRQAGAAIVDNKRTVWASNLPEGTSAQKAELIALTQALRLAEGKSINIYTDSRYAFATAHVHGAIYKQRGWLTSAGKDIKNKEEILALLEAIHLPKRVAIIHCPGHQRGTDPVATGNRKADEAAKQAAQSTRILTETTKNAGKRTADGSEFEKRTADGSEFESPKKKAKVE

SEQ ID NO: 1761 - protein, 2213 aa, synthetic construct
MPAAKRVKLDGGDKKYSIGLDIGTNSVGWAVITDEYKVPSKKFKVLGNTDRHSIKKNLIGALLFDSGETAEATRLKRTARRRYTRRKNRICYLQEIFSNEMAKVDDSFFHRLEESFLVEEDKKHERHPIFGNIVDEVAYHEKYPTIYHLRKKLVDSTDKADLRLIYLALAHMIKFRGHFLIEGDLNPDNSDVDKLFIQLVQTYNQLFEENPINASGVDAKAILSARLSKSRRLENLIAQLPGEKKNGLFGNLIALSLGLTPNFKSNFDLAEDAKLQLSKDTYDDDLDNLLAQIGDQYADLFLAAKNLSDAILLSDILRVNTEITKAPLSASMIKRYDEHHQDLTLLKALVRQQLPEKYKEIFFDQSKNGYAGYIDGGASQEEFYKFIKPILEKMDGTEELLVKLNREDLLRKQRTFDNGSIPHQIHLGELHAILRRQEDFYPFLKDNREKIEKILTFRIPYYVGPLARGNSRFAWMTRKSEETITPWNFEEVVDKGASAQSFIERMTNFDKNLPNEKVLPKHSLLYEYFTVYNELTKVKYVTEGMRKPAFLSGEQKKAIVDLLFKTNRKVTVKQLKEDYFKKIECFDSVEISGVEDRFNASLGTYHDLLKIIKDKDFLDNEENEDILEDIVLTLTLFEDREMIEERLKTYAHLFDDKVMKQLKRRRYTGWGRLSRKLINGIRDKQSGKTILDFLKSDGFANRNFMQLIHDDSLTFKEDIQKAQVSGQGDSLHEHIANLAGSPAIKKGILQTVKVVDELVKVMGRHKPENIVIEMARENQTTQKGQKNSRERMKRIEEGIKELGSQILKEHPVENTQLQNEKLYLYYLQNGRDMYVDQELDINRLSDYDVDHIVPQSFLKDDSIDNKVLTRSDKARGKSDNVPSEEVVKKMKNYWRQLLNAKLITQRKFDNLTKAERGGLSELDKAGFIKRQLVETRQITKHVAQILDSRMNTKYDENDKLIREVKVITLKSKLVSDFRKDFQFYKVREINNYHHAHDAYLNAVVGTALIKKYPKLESEFVYGDYKVYDVRKMIAKSEQEIGKATAKYFFYSNIMNFFKTEITLANGEIRKRPLIETNGETGEIVWDKGRDFATVRKVLSMPQVNIVKKTEVQTGGFSKESILPKRNSDKLIARKKDWDPKKYGGFDSPTVAYSVLVVAKVEKGKSKKLKSVKELLGITIMERSSFEKNPIDFLEAKGYKEVKKDLIIKLPKYSLFELENGRKRMLASAGELQKGNELALPSKYVNFLYLASHYEKLKGSPEDNEQKQLFVEQHKHYLDEIIEQISEFSKRVILADANLDKVLSAYNKHRDKPIREQAENIIHLFTLTNLGAPAAFKYFDTTIDRKRYTSTKEVLDATLIHQSITGLYETRIDLSQLGGDGGGGSGGGGGTLGDQGSRGSDPLPEPRVTLTVEGIPTEFLVNTGAEHSVLTKPMGKMGSKRTVVAGATGSKVYPWTTKRLLKIGQKQVTHSFLVIPECPAPLLGRDLLTKLKAQIQFSTEGPQVTWEDRPAMCLVLNLEEEYRLHEKPVPPSIDPSWLQLFPMVWAEKAGMGLANQVPPVVVELKSDASPVAVRQYPMSKEAREGIRPHIQRFLDLGILVPCQSPWNTPLLPVKKPGTNDYRPVQDLREVNKRVQDIHPTVPNPYNLLSSLPPSHTWYSVLDLKDAFFCLKLHPNSQPLFAFEWRDPEKGNTGQLTWTRLPQGFKNSPTLFNEALHRDLASFRALNPQVVMLQYVDDLLVAAPTYRDCKEGTRRLLQELSKLGYRVSAKKAQLCREEVTYLGYLLKGGKRWLTPARKATVMKIPTPTTPRQVREFLGTAGFCRLWIPGFASLAAPLYPLTRPKVPFTWTEAHQEAFGRIKEALLSAPALALPDLTKPFALYVDEKEGVARGVLTQTLGPWRRPVAYLSKKLDPVASGWPTCLKAIAAVALLLKDADKLTLGQNVLVIAPHNLESIVRQPPDRWMTNARMTHYQSLLLNERVSFAPPAILNPATLLPVESDDTPIHICSEILAEETGTRPDLRDQPLPGVPAWYTDGSSFIMDGRRQAGAAIVDNKRTVWASNLPEGTSAQKAELIALTQALRLAEGKSINIYTDSRYAFATAHVHGAIYKQRGWLTSAGKDIKNKEEILALLEAIHLPKRVAIIHCPGHQRGTDPVATGNRKADEAAKQAAQSTRILTETTKNAGKRTADGSEFEKRTADGSEFESPKKKAKVE

SEQ ID NO: 1762 - protein, 2218 aa, synthetic construct
MPAAKRVKLDGGDKKYSIGLDIGTNSVGWAVITDEYKVPSKKFKVLGNTDRHSIKKNLIGALLFDSGETAEATRLKRTARRRYTRRKNRICYLQEIFSNEMAKVDDSFFHRLEESFLVEEDKKHERHPIFGNIVDEVAYHEKYPTIYHLRKKLVDSTDKADLRLIYLALAHMIKFRGHFLIEGDLNPDNSDVDKLFIQLVQTYNQLFEENPINASGVDAKAILSARLSKSRRLENLIAQLPGEKKNGLFGNLIALSLGLTPNFKSNFDLAEDAKLQLSKDTYDDDLDNLLAQIGDQYADLFLAAKNLSDAILLSDILRVNTEITKAPLSASMIKRYDEHHQDLTLLKALVRQQLPEKYKEIFFDQSKNGYAGYIDGGASQEEFYKFIKPILEKMDGTEELLVKLNREDLLRKQRTFDNGSIPHQIHLGELHAILRRQEDFYPFLKDNREKIEKILTFRIPYYVGPLARGNSRFAWMTRKSEETITPWNFEEVVDKGASAQSFIERMTNFDKNLPNEKVLPKHSLLYEYFTVYNELTKVKYVTEGMRKPAFLSGEQKKAIVDLLFKTNRKVTVKQLKEDYFKKIECFDSVEISGVEDRFNASLGTYHDLLKIIKDKDFLDNEENEDILEDIVLTLTLFEDREMIEERLKTYAHLFDDKVMKQLKRRRYTGWGRLSRKLINGIRDKQSGKTILDFLKSDGFANRNFMQLIHDDSLTFKEDIQKAQVSGQGDSLHEHIANLAGSPAIKKGILQTVKVVDELVKVMGRHKPENIVIEMARENQTTQKGQKNSRERMKRIEEGIKELGSQILKEHPVENTQLQNEKLYLYYLQNGRDMYVDQELDINRLSDYDVDHIVPQSFLKDDSIDNKVLTRSDKARGKSDNVPSEEVVKKMKNYWRQLLNAKLITQRKFDNLTKAERGGLSELDKAGFIKRQLVETRQITKHVAQILDSRMNTKYDENDKLIREVKVITLKSKLVSDFRKDFQFYKVREINNYHHAHDAYLNAVVGTALIKKYPKLESEFVYGDYKVYDVRKMIAKSEQEIGKATAKYFFYSNIMNFFKTEITLANGEIRKRPLIETNGETGEIVWDKGRDFATVRKVLSMPQVNIVKKTEVQTGGFSKESILPKRNSDKLIARKKDWDPKKYGGFDSPTVAYSVLVVAKVEKGKSKKLKSVKELLGITIMERSSFEKNPIDFLEAKGYKEVKKDLIIKLPKYSLFELENGRKRMLASAGELQKGNELALPSKYVNFLYLASHYEKLKGSPEDNEQKQLFVEQHKHYLDEIIEQISEFSKRVILADANLDKVLSAYNKHRDKPIREQAENIIHLFTLTNLGAPAAFKYFDTTIDRKRYTSTKEVLDATLIHQSITGLYETRIDLSQLGGDGGPAPEAAAKGSSGGTLGDQGSRGSDPLPEPRVTLTVEGIPTEFLVNTGAEHSVLTKPMGKMGSKRTVVAGATGSKVYPWTTKRLLKIGQKQVTHSFLVIPECPAPLLGRDLLTKLKAQIQFSTEGPQVTWEDRPAMCLVLNLEEEYRLHEKPVPPSIDPSWLQLFPMVWAEKAGMGLANQVPPVVVELKSDASPVAVRQYPMSKEAREGIRPHIQRFLDLGILVPCQSPWNTPLLPVKKPGTNDYRPVQDLREVNKRVQDIHPTVPNPYNLLSSLPPSHTWYSVLDLKDAFFCLKLHPNSQPLFAFEWRDPEKGNTGQLTWTRLPQGFKNSPTLFNEALHRDLASFRALNPQVVMLQYVDDLLVAAPTYRDCKEGTRRLLQELSKLGYRVSAKKAQLCREEVTYLGYLLKGGKRWLTPARKATVMKIPTPTTPRQVREFLGTAGFCRLWIPGFASLAAPLYPLTRPKVPFTWTEAHQEAFGRIKEALLSAPALALPDLTKPFALYVDEKEGVARGVLTQTLGPWRRPVAYLSKKLDPVASGWPTCLKAIAAVALLLKDADKLTLGQNVLVIAPHNLESIVRQPPDRWMTNARMTHYQSLLLNERVSFAPPAILNPATLLPVESDDTPIHICSEILAEETGTRPDLRDQPLPGVPAWYTDGSSFIMDGRRQAGAAIVDNKRTVWASNLPEGTSAQKAELIALTQALRLAEGKSINIYTDSRYAFATAHVHGAIYKQRGWLTSAGKDIKNKEEILALLEAIHLPKRVAIIHCPGHQRGTDPVATGNRKADEAAKQAAQSTRILTETTKNAGKRTADGSEFEKRTADGSEFESPKKKAKVE

SEQ ID NO: 1763 - protein, 2215 aa, synthetic construct
MPAAKRVKLDGGDKKYSIGLDIGTNSVGWAVITDEYKVPSKKFKVLGNTDRHSIKKNLIGALLFDSGETAEATRLKRTARRRYTRRKNRICYLQEIFSNEMAKVDDSFFHRLEESFLVEEDKKHERHPIFGNIVDEVAYHEKYPTIYHLRKKLVDSTDKADLRLIYLALAHMIKFRGHFLIEGDLNPDNSDVDKLFIQLVQTYNQLFEENPINASGVDAKAILSARLSKSRRLENLIAQLPGEKKNGLFGNLIALSLGLTPNFKSNFDLAEDAKLQLSKDTYDDDLDNLLAQIGDQYADLFLAAKNLSDAILLSDILRVNTEITKAPLSASMIKRYDEHHQDLTLLKALVRQQLPEKYKEIFFDQSKNGYAGYIDGGASQEEFYKFIKPILEKMDGTEELLVKLNREDLLRKQRTFDNGSIPHQIHLGELHAILRRQEDFYPFLKDNREKIEKILTFRIPYYVGPLARGNSRFAWMTRKSEETITPWNFEEVVDKGASAQSFIERMTNFDKNLPNEKVLPKHSLLYEYFTVYNELTKVKYVTEGMRKPAFLSGEQKKAIVDLLFKTNRKVTVKQLKEDYFKKIECFDSVEISGVEDRFNASLGTYHDLLKIIKDKDFLDNEENEDILEDIVLTLTLFEDREMIEERLKTYAHLFDDKVMKQLKRRRYTGWGRLSRKLINGIRDKQSGKTILDFLKSDGFANRNFMQLIHDDSLTFKEDIQKAQVSGQGDSLHEHIANLAGSPAIKKGILQTVKVVDELVKVMGRHKPENIVIEMARENQTTQKGQKNSRERMKRIEEGIKELGSQILKEHPVENTQLQNEKLYLYYLQNGRDMYVDQELDINRLSDYDVDHIVPQSFLKDDSIDNKVLTRSDKARGKSDNVPSEEVVKKMKNYWRQLLNAKLITQRKFDNLTKAERGGLSELDKAGFIKRQLVETRQITKHVAQILDSRMNTKYDENDKLIREVKVITLKSKLVSDFRKDFQFYKVREINNYHHAHDAYLNAVVGTALIKKYPKLESEFVYGDYKVYDVRKMIAKSEQEIGKATAKYFFYSNIMNFFKTEITLANGEIRKRPLIETNGETGEIVWDKGRDFATVRKVLSMPQVNIVKKTEVQTGGFSKESILPKRNSDKLIARKKDWDPKKYGGFDSPTVAYSVLVVAKVEKGKSKKLKSVKELLGITIMERSSFEKNPIDFLEAKGYKEVKKDLIIKLPKYSLFELENGRKRMLASAGELQKGNELALPSKYVNFLYLASHYEKLKGSPEDNEQKQLFVEQHKHYLDEIIEQISEFSKRVILADANLDKVLSAYNKHRDKPIREQAENIIHLFTLTNLGAPAAFKYFDTTIDRKRYTSTKEVLDATLIHQSITGLYETRIDLSQLGGDGGEAAAKGGSGGTLGDQGSRGSDPLPEPRVTLTVEGIPTEFLVNTGAEHSVLTKPMGKMGSKRTVVAGATGSKVYPWTTKRLLKIGQKQVTHSFLVIPECPAPLLGRDLLTKLKAQIQFSTEGPQVTWEDRPAMCLVLNLEEEYRLHEKPVPPSIDPSWLQLFPMVWAEKAGMGLANQVPPVVVELKSDASPVAVRQYPMSKEAREGIRPHIQRFLDLGILVPCQSPWNTPLLPVKKPGTNDYRPVQDLREVNKRVQDIHPTVPNPYNLLSSLPPSHTWYSVLDLKDAFFCLKLHPNSQPLFAFEWRDPEKGNTGQLTWTRLPQGFKNSPTLFNEALHRDLASFRALNPQVVMLQYVDDLLVAAPTYRDCKEGTRRLLQELSKLGYRVSAKKAQLCREEVTYLGYLLKGGKRWLTPARKATVMKIPTPTTPRQVREFLGTAGFCRLWIPGFASLAAPLYPLTRPKVPFTWTEAHQEAFGRIKEALLSAPALALPDLTKPFALYVDEKEGVARGVLTQTLGPWRRPVAYLSKKLDPVASGWPTCLKAIAAVALLLKDADKLTLGQNVLVIAPHNLESIVRQPPDRWMTNARMTHYQSLLLNERVSFAPPAILNPATLLPVESDDTPIHICSEILAEETGTRPDLRDQPLPGVPAWYTDGSSFIMDGRRQAGAAIVDNKRTVWASNLPEGTSAQKAELIALTQALRLAEGKSINIYTDSRYAFATAHVHGAIYKQRGWLTSAGKDIKNKEEILALLEAIHLPKRVAIIHCPGHQRGTDPVATGNRKADEAAKQAAQSTRILTETTKNAGKRTADGSEFEKRTADGSEFESPKKKAKVE

SEQ ID NO: 1764 - protein, 2216 aa, synthetic construct
MPAAKRVKLDGGDKKYSIGLDIGTNSVGWAVITDEYKVPSKKFKVLGNTDRHSIKKNLIGALLFDSGETAEATRLKRTARRRYTRRKNRICYLQEIFSNEMAKVDDSFFHRLEESFLVEEDKKHERHPIFGNIVDEVAYHEKYPTIYHLRKKLVDSTDKADLRLIYLALAHMIKFRGHFLIEGDLNPDNSDVDKLFIQLVQTYNQLFEENPINASGVDAKAILSARLSKSRRLENLIAQLPGEKKNGLFGNLIALSLGLTPNFKSNFDLAEDAKLQLSKDTYDDDLDNLLAQIGDQYADLFLAAKNLSDAILLSDILRVNTEITKAPLSASMIKRYDEHHQDLTLLKALVRQQLPEKYKEIFFDQSKNGYAGYIDGGASQEEFYKFIKPILEKMDGTEELLVKLNREDLLRKQRTFDNGSIPHQIHLGELHAILRRQEDFYPFLKDNREKIEKILTFRIPYYVGPLARGNSRFAWMTRKSEETITPWNFEEVVDKGASAQSFIERMTNFDKNLPNEKVLPKHSLLYEYFTVYNELTKVKYVTEGMRKPAFLSGEQKKAIVDLLFKTNRKVTVKQLKEDYFKKIECFDSVEISGVEDRFNASLGTYHDLLKIIKDKDFLDNEENEDILEDIVLTLTLFEDREMIEERLKTYAHLFDDKVMKQLKRRRYTGWGRLSRKLINGIRDKQSGKTILDFLKSDGFANRNFMQLIHDDSLTFKEDIQKAQVSGQGDSLHEHIANLAGSPAIKKGILQTVKVVDELVKVMGRHKPENIVIEMARENQTTQKGQKNSRERMKRIEEGIKELGSQILKEHPVENTQLQNEKLYLYYLQNGRDMYVDQELDINRLSDYDVDHIVPQSFLKDDSIDNKVLTRSDKARGKSDNVPSEEVVKKMKNYWRQLLNAKLITQRKFDNLTKAERGGLSELDKAGFIKRQLVETRQITKHVAQILDSRMNTKYDENDKLIREVKVITLKSKLVSDFRKDFQFYKVREINNYHHAHDAYLNAVVGTALIKKYPKLESEFVYGDYKVYDVRKMIAKSEQEIGKATAKYFFYSNIMNFFKTEITLANGEIRKRPLIETNGETGEIVWDKGRDFATVRKVLSMPQVNIVKKTEVQTGGFSKESILPKRNSDKLIARKKDWDPKKYGGFDSPTVAYSVLVVAKVEKGKSKKLKSVKELLGITIMERSSFEKNPIDFLEAKGYKEVKKDLIIKLPKYSLFELENGRKRMLASAGELQKGNELALPSKYVNFLYLASHYEKLKGSPEDNEQKQLFVEQHKHYLDEIIEQISEFSKRVILADANLDKVLSAYNKHRDKPIREQAENIIHLFTLTNLGAPAAFKYFDTTIDRKRYTSTKEVLDATLIHQSITGLYETRIDLSQLGGDGGGGGGSSGGSGGTLGDQGSRGSDPLPEPRVTLTVEGIPTEFLVNTGAEHSVLTKPMGKMGSKRTVVAGATGSKVYPWTTKRLLKIGQKQVTHSFLVIPECPAPLLGRDLLTKLKAQIQFSTEGPQVTWEDRPAMCLVLNLEEEYRLHEKPVPPSIDPSWLQLFPMVWAEKAGMGLANQVPPVVVELKSDASPVAVRQYPMSKEAREGIRPHIQRFLDLGILVPCQSPWNTPLLPVKKPGTNDYRPVQDLREVNKRVQDIHPTVPNPYNLLSSLPPSHTWYSVLDLKDAFFCLKLHPNSQPLFAFEWRDPEKGNTGQLTWTRLPQGFKNSPTLFNEALHRDLASFRALNPQVVMLQYVDDLLVAAPTYRDCKEGTRRLLQELSKLGYRVSAKKAQLCREEVTYLGYLLKGGKRWLTPARKATVMKIPTPTTPRQVREFLGTAGFCRLWIPGFASLAAPLYPLTRPKVPFTWTEAHQEAFGRIKEALLSAPALALPDLTKPFALYVDEKEGVARGVLTQTLGPWRRPVAYLSKKLDPVASGWPTCLKAIAAVALLLKDADKLTLGQNVLVIAPHNLESIVRQPPDRWMTNARMTHYQSLLLNERVSFAPPAILNPATLLPVESDDTPIHICSEILAEETGTRPDLRDQPLPGVPAWYTDGSSFIMDGRRQAGAAIVDNKRTVWASNLPEGTSAQKAELIALTQALRLAEGKSINIYTDSRYAFATAHVHGAIYKQRGWLTSAGKDIKNKEEILALLEAIHLPKRVAIIHCPGHQRGTDPVATGNRKADEAAKQAAQSTRILTETTKNAGKRTADGSEFEKRTADGSEFESPKKKAKVE

SEQ ID NO: 1765 - protein, 2216 aa, synthetic construct
MPAAKRVKLDGGDKKYSIGLDIGTNSVGWAVITDEYKVPSKKFKVLGNTDRHSIKKNLIGALLFDSGETAEATRLKRTARRRYTRRKNRICYLQEIFSNEMAKVDDSFFHRLEESFLVEEDKKHERHPIFGNIVDEVAYHEKYPTIYHLRKKLVDSTDKADLRLIYLALAHMIKFRGHFLIEGDLNPDNSDVDKLFIQLVQTYNQLFEENPINASGVDAKAILSARLSKSRRLENLIAQLPGEKKNGLFGNLIALSLGLTPNFKSNFDLAEDAKLQLSKDTYDDDLDNLLAQIGDQYADLFLAAKNLSDAILLSDILRVNTEITKAPLSASMIKRYDEHHQDLTLLKALVRQQLPEKYKEIFFDQSKNGYAGYIDGGASQEEFYKFIKPILEKMDGTEELLVKLNREDLLRKQRTFDNGSIPHQIHLGELHAILRRQEDFYPFLKDNREKIEKILTFRIPYYVGPLARGNSRFAWMTRKSEETITPWNFEEVVDKGASAQSFIERMTNFDKNLPNEKVLPKHSLLYEYFTVYNELTKVKYVTEGMRKPAFLSGEQKKAIVDLLFKTNRKVTVKQLKEDYFKKIECFDSVEISGVEDRFNASLGTYHDLLKIIKDKDFLDNEENEDILEDIVLTLTLFEDREMIEERLKTYAHLFDDKVMKQLKRRRYTGWGRLSRKLINGIRDKQSGKTILDFLKSDGFANRNFMQLIHDDSLTFKEDIQKAQVSGQGDSLHEHIANLAGSPAIKKGILQTVKVVDELVKVMGRHKPENIVIEMARENQTTQKGQKNSRERMKRIEEGIKELGSQILKEHPVENTQLQNEKLYLYYLQNGRDMYVDQELDINRLSDYDVDHIVPQSFLKDDSIDNKVLTRSDKARGKSDNVPSEEVVKKMKNYWRQLLNAKLITQRKFDNLTKAERGGLSELDKAGFIKRQLVETRQITKHVAQILDSRMNTKYDENDKLIREVKVITLKSKLVSDFRKDFQFYKVREINNYHHAHDAYLNAVVGTALIKKYPKLESEFVYGDYKVYDVRKMIAKSEQEIGKATAKYFFYSNIMNFFKTEITLANGEIRKRPLIETNGETGEIVWDKGRDFATVRKVLSMPQVNIVKKTEVQTGGFSKESILPKRNSDKLIARKKDWDPKKYGGFDSPTVAYSVLVVAKVEKGKSKKLKSVKELLGITIMERSSFEKNPIDFLEAKGYKEVKKDLIIKLPKYSLFELENGRKRMLASAGELQKGNELALPSKYVNFLYLASHYEKLKGSPEDNEQKQLFVEQHKHYLDEIIEQISEFSKRVILADANLDKVLSAYNKHRDKPIREQAENIIHLFTLTNLGAPAAFKYFDTTIDRKRYTSTKEVLDATLIHQSITGLYETRIDLSQLGGDGGPAPGSSGGSGGTLGDQGSRGSDPLPEPRVTLTVEGIPTEFLVNTGAEHSVLTKPMGKMGSKRTVVAGATGSKVYPWTTKRLLKIGQKQVTHSFLVIPECPAPLLGRDLLTKLKAQIQFSTEGPQVTWEDRPAMCLVLNLEEEYRLHEKPVPPSIDPSWLQLFPMVWAEKAGMGLANQVPPVVVELKSDASPVAVRQYPMSKEAREGIRPHIQRFLDLGILVPCQSPWNTPLLPVKKPGTNDYRPVQDLREVNKRVQDIHPTVPNPYNLLSSLPPSHTWYSVLDLKDAFFCLKLHPNSQPLFAFEWRDPEKGNTGQLTWTRLPQGFKNSPTLFNEALHRDLASFRALNPQVVMLQYVDDLLVAAPTYRDCKEGTRRLLQELSKLGYRVSAKKAQLCREEVTYLGYLLKGGKRWLTPARKATVMKIPTPTTPRQVREFLGTAGFCRLWIPGFASLAAPLYPLTRPKVPFTWTEAHQEAFGRIKEALLSAPALALPDLTKPFALYVDEKEGVARGVLTQTLGPWRRPVAYLSKKLDPVASGWPTCLKAIAAVALLLKDADKLTLGQNVLVIAPHNLESIVRQPPDRWMTNARMTHYQSLLLNERVSFAPPAILNPATLLPVESDDTPIHICSEILAEETGTRPDLRDQPLPGVPAWYTDGSSFIMDGRRQAGAAIVDNKRTVWASNLPEGTSAQKAELIALTQALRLAEGKSINIYTDSRYAFATAHVHGAIYKQRGWLTSAGKDIKNKEEILALLEAIHLPKRVAIIHCPGHQRGTDPVATGNRKADEAAKQAAQSTRILTETTKNAGKRTADGSEFEKRTADGSEFESPKKKAKVE

SEQ ID NO: 1766 - protein, 2216 aa, synthetic construct
MPAAKRVKLDGGDKKYSIGLDIGTNSVGWAVITDEYKVPSKKFKVLGNTDRHSIKKNLIGALLFDSGETAEATRLKRTARRRYTRRKNRICYLQEIFSNEMAKVDDSFFHRLEESFLVEEDKKHERHPIFGNIVDEVAYHEKYPTIYHLRKKLVDSTDKADLRLIYLALAHMIKFRGHFLIEGDLNPDNSDVDKLFIQLVQTYNQLFEENPINASGVDAKAILSARLSKSRRLENLIAQLPGEKKNGLFGNLIALSLGLTPNFKSNFDLAEDAKLQLSKDTYDDDLDNLLAQIGDQYADLFLAAKNLSDAILLSDILRVNTEITKAPLSASMIKRYDEHHQDLTLLKALVRQQLPEKYKEIFFDQSKNGYAGYIDGGASQEEFYKFIKPILEKMDGTEELLVKLNREDLLRKQRTFDNGSIPHQIHLGELHAILRRQEDFYPFLKDNREKIEKILTFRIPYYVGPLARGNSRFAWMTRKSEETITPWNFEEVVDKGASAQSFIERMTNFDKNLPNEKVLPKHSLLYEYFTVYNELTKVKYVTEGMRKPAFLSGEQKKAIVDLLFKTNRKVTVKQLKEDYFKKIECFDSVEISGVEDRFNASLGTYHDLLKIIKDKDFLDNEENEDILEDIVLTLTLFEDREMIEERLKTYAHLFDDKVMKQLKRRRYTGWGRLSRKLINGIRDKQSGKTILDFLKSDGFANRNFMQLIHDDSLTFKEDIQKAQVSGQGDSLHEHIANLAGSPAIKKGILQTVKVVDELVKVMGRHKPENIVIEMARENQTTQKGQKNSRERMKRIEEGIKELGSQILKEHPVENTQLQNEKLYLYYLQNGRDMYVDQELDINRLSDYDVDHIVPQSFLKDDSIDNKVLTRSDKARGKSDNVPSEEVVKKMKNYWRQLLNAKLITQRKFDNLTKAERGGLSELDKAGFIKRQLVETRQITKHVAQILDSRMNTKYDENDKLIREVKVITLKSKLVSDFRKDFQFYKVREINNYHHAHDAYLNAVVGTALIKKYPKLESEFVYGDYKVYDVRKMIAKSEQEIGKATAKYFFYSNIMNFFKTEITLANGEIRKRPLIETNGETGEIVWDKGRDFATVRKVLSMPQVNIVKKTEVQTGGFSKESILPKRNSDKLIARKKDWDPKKYGGFDSPTVAYSVLVVAKVEKGKSKKLKSVKELLGITIMERSSFEKNPIDFLEAKGYKEVKKDLIIKLPKYSLFELENGRKRMLASAGELQKGNELALPSKYVNFLYLASHYEKLKGSPEDNEQKQLFVEQHKHYLDEIIEQISEFSKRVILADANLDKVLSAYNKHRDKPIREQAENIIHLFTLTNLGAPAAFKYFDTTIDRKRYTSTKEVLDATLIHQSITGLYETRIDLSQLGGDGGGGSGGSGGSGGTLGDQGSRGSDPLPEPRVTLTVEGIPTEFLVNTGAEHSVLTKPMGKMGSKRTVVAGATGSKVYPWTTKRLLKIGQKQVTHSFLVIPECPAPLLGRDLLTKLKAQIQFSTEGPQVTWEDRPAMCLVLNLEEEYRLHEKPVPPSIDPSWLQLFPMVWAEKAGMGLANQVPPVVVELKSDASPVAVRQYPMSKEAREGIRPHIQRFLDLGILVPCQSPWNTPLLPVKKPGTNDYRPVQDLREVNKRVQDIHPTVPNPYNLLSSLPPSHTWYSVLDLKDAFFCLKLHPNSQPLFAFEWRDPEKGNTGQLTWTRLPQGFKNSPTLFNEALHRDLASFRALNPQVVMLQYVDDLLVAAPTYRDCKEGTRRLLQELSKLGYRVSAKKAQLCREEVTYLGYLLKGGKRWLTPARKATVMKIPTPTTPRQVREFLGTAGFCRLWIPGFASLAAPLYPLTRPKVPFTWTEAHQEAFGRIKEALLSAPALALPDLTKPFALYVDEKEGVARGVLTQTLGPWRRPVAYLSKKLDPVASGWPTCLKAIAAVALLLKDADKLTLGQNVLVIAPHNLESIVRQPPDRWMTNARMTHYQSLLLNERVSFAPPAILNPATLLPVESDDTPIHICSEILAEETGTRPDLRDQPLPGVPAWYTDGSSFIMDGRRQAGAAIVDNKRTVWASNLPEGTSAQKAELIALTQALRLAEGKSINIYTDSRYAFATAHVHGAIYKQRGWLTSAGKDIKNKEEILALLEAIHLPKRVAIIHCPGHQRGTDPVATGNRKADEAAKQAAQSTRILTETTKNAGKRTADGSEFEKRTADGSEFESPKKKAKVE

SEQ ID NO: 1767 - protein, 2222 aa, synthetic construct
MPAAKRVKLDGGDKKYSIGLDIGTNSVGWAVITDEYKVPSKKFKVLGNTDRHSIKKNLIGALLFDSGETAEATRLKRTARRRYTRRKNRICYLQEIFSNEMAKVDDSFFHRLEESFLVEEDKKHERHPIFGNIVDEVAYHEKYPTIYHLRKKLVDSTDKADLRLIYLALAHMIKFRGHFLIEGDLNPDNSDVDKLFIQLVQTYNQLFEENPINASGVDAKAILSARLSKSRRLENLIAQLPGEKKNGLFGNLIALSLGLTPNFKSNFDLAEDAKLQLSKDTYDDDLDNLLAQIGDQYADLFLAAKNLSDAILLSDILRVNTEITKAPLSASMIKRYDEHHQDLTLLKALVRQQLPEKYKEIFFDQSKNGYAGYIDGGASQEEFYKFIKPILEKMDGTEELLVKLNREDLLRKQRTFDNGSIPHQIHLGELHAILRRQEDFYPFLKDNREKIEKILTFRIPYYVGPLARGNSRFAWMTRKSEETITPWNFEEVVDKGASAQSFIERMTNFDKNLPNEKVLPKHSLLYEYFTVYNELTKVKYVTEGMRKPAFLSGEQKKAIVDLLFKTNRKVTVKQLKEDYFKKIECFDSVEISGVEDRFNASLGTYHDLLKIIKDKDFLDNEENEDILEDIVLTLTLFEDREMIEERLKTYAHLFDDKVMKQLKRRRYTGWGRLSRKLINGIRDKQSGKTILDFLKSDGFANRNFMQLIHDDSLTFKEDIQKAQVSGQGDSLHEHIANLAGSPAIKKGILQTVKVVDELVKVMGRHKPENIVIEMARENQTTQKGQKNSRERMKRIEEGIKELGSQILKEHPVENTQLQNEKLYLYYLQNGRDMYVDQELDINRLSDYDVDHIVPQSFLKDDSIDNKVLTRSDKARGKSDNVPSEEVVKKMKNYWRQLLNAKLITQRKFDNLTKAERGGLSELDKAGFIKRQLVETRQITKHVAQILDSRMNTKYDENDKLIREVKVITLKSKLVSDFRKDFQFYKVREINNYHHAHDAYLNAVVGTALIKKYPKLESEFVYGDYKVYDVRKMIAKSEQEIGKATAKYFFYSNIMNFFKTEITLANGEIRKRPLIETNGETGEIVWDKGRDFATVRKVLSMPQVNIVKKTEVQTGGFSKESILPKRNSDKLIARKKDWDPKKYGGFDSPTVAYSVLVVAKVEKGKSKKLKSVKELLGITIMERSSFEKNPIDFLEAKGYKEVKKDLIIKLPKYSLFELENGRKRMLASAGELQKGNELALPSKYVNFLYLASHYEKLKGSPEDNEQKQLFVEQHKHYLDEIIEQISEFSKRVILADANLDKVLSAYNKHRDKPIREQAENIIHLFTLTNLGAPAAFKYFDTTIDRKRYTSTKEVLDATLIHQSITGLYETRIDLSQLGGDGGGGGGSEAAAKGGGGSGGTLGDQGSRGSDPLPEPRVTLTVEGIPTEFLVNTGAEHSVLTKPMGKMGSKRTVVAGATGSKVYPWTTKRLLKIGQKQVTHSFLVIPECPAPLLGRDLLTKLKAQIQFSTEGPQVTWEDRPAMCLVLNLEEEYRLHEKPVPPSIDPSWLQLFPMVWAEKAGMGLANQVPPVVVELKSDASPVAVRQYPMSKEAREGIRPHIQRFLDLGILVPCQSPWNTPLLPVKKPGTNDYRPVQDLREVNKRVQDIHPTVPNPYNLLSSLPPSHTWYSVLDLKDAFFCLKLHPNSQPLFAFEWRDPEKGNTGQLTWTRLPQGFKNSPTLFNEALHRDLASFRALNPQVVMLQYVDDLLVAAPTYRDCKEGTRRLLQELSKLGYRVSAKKAQLCREEVTYLGYLLKGGKRWLTPARKATVMKIPTPTTPRQVREFLGTAGFCRLWIPGFASLAAPLYPLTRPKVPFTWTEAHQEAFGRIKEALLSAPALALPDLTKPFALYVDEKEGVARGVLTQTLGPWRRPVAYLSKKLDPVASGWPTCLKAIAAVALLLKDADKLTLGQNVLVIAPHNLESIVRQPPDRWMTNARMTHYQSLLLNERVSFAPPAILNPATLLPVESDDTPIHICSEILAEETGTRPDLRDQPLPGVPAWYTDGSSFIMDGRRQAGAAIVDNKRTVWASNLPEGTSAQKAELIALTQALRLAEGKSINIYTDSRYAFATAHVHGAIYKQRGWLTSAGKDIKNKEEILALLEAIHLPKRVAIIHCPGHQRGTDPVATGNRKADEAAKQAAQSTRILTETTKNAGKRTADGSEFEKRTADGSEFESPKKKAKVE

SEQ ID NO: 1768 - protein, 2213 aa, synthetic construct
MPAAKRVKLDGGDKKYSIGLDIGTNSVGWAVITDEYKVPSKKFKVLGNTDRHSIKKNLIGALLFDSGETAEATRLKRTARRRYTRRKNRICYLQEIFSNEMAKVDDSFFHRLEESFLVEEDKKHERHPIFGNIVDEVAYHEKYPTIYHLRKKLVDSTDKADLRLIYLALAHMIKFRGHFLIEGDLNPDNSDVDKLFIQLVQTYNQLFEENPINASGVDAKAILSARLSKSRRLENLIAQLPGEKKNGLFGNLIALSLGLTPNFKSNFDLAEDAKLQLSKDTYDDDLDNLLAQIGDQYADLFLAAKNLSDAILLSDILRVNTEITKAPLSASMIKRYDEHHQDLTLLKALVRQQLPEKYKEIFFDQSKNGYAGYIDGGASQEEFYKFIKPILEKMDGTEELLVKLNREDLLRKQRTFDNGSIPHQIHLGELHAILRRQEDFYPFLKDNREKIEKILTFRIPYYVGPLARGNSRFAWMTRKSEETITPWNFEEVVDKGASAQSFIERMTNFDKNLPNEKVLPKHSLLYEYFTVYNELTKVKYVTEGMRKPAFLSGEQKKAIVDLLFKTNRKVTVKQLKEDYFKKIECFDSVEISGVEDRFNASLGTYHDLLKIIKDKDFLDNEENEDILEDIVLTLTLFEDREMIEERLKTYAHLFDDKVMKQLKRRRYTGWGRLSRKLINGIRDKQSGKTILDFLKSDGFANRNFMQLIHDDSLTFKEDIQKAQVSGQGDSLHEHIANLAGSPAIKKGILQTVKVVDELVKVMGRHKPENIVIEMARENQTTQKGQKNSRERMKRIEEGIKELGSQILKEHPVENTQLQNEKLYLYYLQNGRDMYVDQELDINRLSDYDVDHIVPQSFLKDDSIDNKVLTRSDKARGKSDNVPSEEVVKKMKNYWRQLLNAKLITQRKFDNLTKAERGGLSELDKAGFIKRQLVETRQITKHVAQILDSRMNTKYDENDKLIREVKVITLKSKLVSDFRKDFQFYKVREINNYHHAHDAYLNAVVGTALIKKYPKLESEFVYGDYKVYDVRKMIAKSEQEIGKATAKYFFYSNIMNFFKTEITLANGEIRKRPLIETNGETGEIVWDKGRDFATVRKVLSMPQVNIVKKTEVQTGGFSKESILPKRNSDKLIARKKDWDPKKYGGFDSPTVAYSVLVVAKVEKGKSKKLKSVKELLGITIMERSSFEKNPIDFLEAKGYKEVKKDLIIKLPKYSLFELENGRKRMLASAGELQKGNELALPSKYVNFLYLASHYEKLKGSPEDNEQKQLFVEQHKHYLDEIIEQISEFSKRVILADANLDKVLSAYNKHRDKPIREQAENIIHLFTLTNLGAPAAFKYFDTTIDRKRYTSTKEVLDATLIHQSITGLYETRIDLSQLGGDGGGGSGSSGGTLGDQGSRGSDPLPEPRVTLTVEGIPTEFLVNTGAEHSVLTKPMGKMGSKRTVVAGATGSKVYPWTTKRLLKIGQKQVTHSFLVIPECPAPLLGRDLLTKLKAQIQFSTEGPQVTWEDRPAMCLVLNLEEEYRLHEKPVPPSIDPSWLQLFPMVWAEKAGMGLANQVPPVVVELKSDASPVAVRQYPMSKEAREGIRPHIQRFLDLGILVPCQSPWNTPLLPVKKPGTNDYRPVQDLREVNKRVQDIHPTVPNPYNLLSSLPPSHTWYSVLDLKDAFFCLKLHPNSQPLFAFEWRDPEKGNTGQLTWTRLPQGFKNSPTLFNEALHRDLASFRALNPQVVMLQYVDDLLVAAPTYRDCKEGTRRLLQELSKLGYRVSAKKAQLCREEVTYLGYLLKGGKRWLTPARKATVMKIPTPTTPRQVREFLGTAGFCRLWIPGFASLAAPLYPLTRPKVPFTWTEAHQEAFGRIKEALLSAPALALPDLTKPFALYVDEKEGVARGVLTQTLGPWRRPVAYLSKKLDPVASGWPTCLKAIAAVALLLKDADKLTLGQNVLVIAPHNLESIVRQPPDRWMTNARMTHYQSLLLNERVSFAPPAILNPATLLPVESDDTPIHICSEILAEETGTRPDLRDQPLPGVPAWYTDGSSFIMDGRRQAGAAIVDNKRTVWASNLPEGTSAQKAELIALTQALRLAEGKSINIYTDSRYAFATAHVHGAIYKQRGWLTSAGKDIKNKEEILALLEAIHLPKRVAIIHCPGHQRGTDPVATGNRKADEAAKQAAQSTRILTETTKNAGKRTADGSEFEKRTADGSEFESPKKKAKVE

SEQ ID NO: 1769 - protein, 2218 aa, synthetic construct
MPAAKRVKLDGGDKKYSIGLDIGTNSVGWAVITDEYKVPSKKFKVLGNTDRHSIKKNLIGALLFDSGETAEATRLKRTARRRYTRRKNRICYLQEIFSNEMAKVDDSFFHRLEESFLVEEDKKHERHPIFGNIVDEVAYHEKYPTIYHLRKKLVDSTDKADLRLIYLALAHMIKFRGHFLIEGDLNPDNSDVDKLFIQLVQTYNQLFEENPINASGVDAKAILSARLSKSRRLENLIAQLPGEKKNGLFGNLIALSLGLTPNFKSNFDLAEDAKLQLSKDTYDDDLDNLLAQIGDQYADLFLAAKNLSDAILLSDILRVNTEITKAPLSASMIKRYDEHHQDLTLLKALVRQQLPEKYKEIFFDQSKNGYAGYIDGGASQEEFYKFIKPILEKMDGTEELLVKLNREDLLRKQRTFDNGSIPHQIHLGELHAILRRQEDFYPFLKDNREKIEKILTFRIPYYVGPLARGNSRFAWMTRKSEETITPWNFEEVVDKGASAQSFIERMTNFDKNLPNEKVLPKHSLLYEYFTVYNELTKVKYVTEGMRKPAFLSGEQKKAIVDLLFKTNRKVTVKQLKEDYFKKIECFDSVEISGVEDRFNASLGTYHDLLKIIKDKDFLDNEENEDILEDIVLTLTLFEDREMIEERLKTYAHLFDDKVMKQLKRRRYTGWGRLSRKLINGIRDKQSGKTILDFLKSDGFANRNFMQLIHDDSLTFKEDIQKAQVSGQGDSLHEHIANLAGSPAIKKGILQTVKVVDELVKVMGRHKPENIVIEMARENQTTQKGQKNSRERMKRIEEGIKELGSQILKEHPVENTQLQNEKLYLYYLQNGRDMYVDQELDINRLSDYDVDHIVPQSFLKDDSIDNKVLTRSDKARGKSDNVPSEEVVKKMKNYWRQLLNAKLITQRKFDNLTKAERGGLSELDKAGFIKRQLVETRQITKHVAQILDSRMNTKYDENDKLIREVKVITLKSKLVSDFRKDFQFYKVREINNYHHAHDAYLNAVVGTALIKKYPKLESEFVYGDYKVYDVRKMIAKSEQEIGKATAKYFFYSNIMNFFKTEITLANGEIRKRPLIETNGETGEIVWDKGRDFATVRKVLSMPQVNIVKKTEVQTGGFSKESILPKRNSDKLIARKKDWDPKKYGGFDSPTVAYSVLVVAKVEKGKSKKLKSVKELLGITIMERSSFEKNPIDFLEAKGYKEVKKDLIIKLPKYSLFELENGRKRMLASAGELQKGNELALPSKYVNFLYLASHYEKLKGSPEDNEQKQLFVEQHKHYLDEIIEQISEFSKRVILADANLDKVLSAYNKHRDKPIREQAENIIHLFTLTNLGAPAAFKYFDTTIDRKRYTSTKEVLDATLIHQSITGLYETRIDLSQLGGDGGGGSEAAAKGSSGGTLGDQGSRGSDPLPEPRVTLTVEGIPTEFLVNTGAEHSVLTKPMGKMGSKRTVVAGATGSKVYPWTTKRLLKIGQKQVTHSFLVIPECPAPLLGRDLLTKLKAQIQFSTEGPQVTWEDRPAMCLVLNLEEEYRLHEKPVPPSIDPSWLQLFPMVWAEKAGMGLANQVPPVVVELKSDASPVAVRQYPMSKEAREGIRPHIQRFLDLGILVPCQSPWNTPLLPVKKPGTNDYRPVQDLREVNKRVQDIHPTVPNPYNLLSSLPPSHTWYSVLDLKDAFFCLKLHPNSQPLFAFEWRDPEKGNTGQLTWTRLPQGFKNSPTLFNEALHRDLASFRALNPQVVMLQYVDDLLVAAPTYRDCKEGTRRLLQELSKLGYRVSAKKAQLCREEVTYLGYLLKGGKRWLTPARKATVMKIPTPTTPRQVREFLGKAGFCRLFIPGFASLAAPLYPLTRPKVPFTWTEAHQEAFGRIKEALLSAPALALPDLTKPFALYVDEKEGVARGVLTQTLGPWRRPVAYLSKKLDPVASGWPTCLKAIAAVALLLKDADKLTLGQNVLVIAPHNLESIVRQPPDRWMTNARMTHYQSLLLNERVSFAPPAILNPATLLPVESDDTPIHICSEILAEETGTRPDLRDQPLPGVPAWYTDGSSFIMDGRRQAGAAIVDNKRTVWASNLPEGTSAQKAELIALTQALRLAEGKSINIYTDSRYAFATAHVHGAIYKQRGWLTSAGKDIKNKEEILALLEAIHLPKRVAIIHCPGHQRGTDPVATGNRKADEAAKQAAQSTRILTETTKNAGKRTADGSEFEKRTADGSEFESPKKKAKVE

SEQ ID NO: 1770 - protein, 2218 aa, synthetic construct
MPAAKRVKLDGGDKKYSIGLDIGTNSVGWAVITDEYKVPSKKFKVLGNTDRHSIKKNLIGALLFDSGETAEATRLKRTARRRYTRRKNRICYLQEIFSNEMAKVDDSFFHRLEESFLVEEDKKHERHPIFGNIVDEVAYHEKYPTIYHLRKKLVDSTDKADLRLIYLALAHMIKFRGHFLIEGDLNPDNSDVDKLFIQLVQTYNQLFEENPINASGVDAKAILSARLSKSRRLENLIAQLPGEKKNGLFGNLIALSLGLTPNFKSNFDLAEDAKLQLSKDTYDDDLDNLLAQIGDQYADLFLAAKNLSDAILLSDILRVNTEITKAPLSASMIKRYDEHHQDLTLLKALVRQQLPEKYKEIFFDQSKNGYAGYIDGGASQEEFYKFIKPILEKMDGTEELLVKLNREDLLRKQRTFDNGSIPHQIHLGELHAILRRQEDFYPFLKDNREKIEKILTFRIPYYVGPLARGNSRFAWMTRKSEETITPWNFEEVVDKGASAQSFIERMTNFDKNLPNEKVLPKHSLLYEYFTVYNELTKVKYVTEGMRKPAFLSGEQKKAIVDLLFKTNRKVTVKQLKEDYFKKIECFDSVEISGVEDRFNASLGTYHDLLKIIKDKDFLDNEENEDILEDIVLTLTLFEDREMIEERLKTYAHLFDDKVMKQLKRRRYTGWGRLSRKLINGIRDKQSGKTILDFLKSDGFANRNFMQLIHDDSLTFKEDIQKAQVSGQGDSLHEHIANLAGSPAIKKGILQTVKVVDELVKVMGRHKPENIVIEMARENQTTQKGQKNSRERMKRIEEGIKELGSQILKEHPVENTQLQNEKLYLYYLQNGRDMYVDQELDINRLSDYDVDHIVPQSFLKDDSIDNKVLTRSDKARGKSDNVPSEEVVKKMKNYWRQLLNAKLITQRKFDNLTKAERGGLSELDKAGFIKRQLVETRQITKHVAQILDSRMNTKYDENDKLIREVKVITLKSKLVSDFRKDFQFYKVREINNYHHAHDAYLNAVVGTALIKKYPKLESEFVYGDYKVYDVRKMIAKSEQEIGKATAKYFFYSNIMNFFKTEITLANGEIRKRPLIETNGETGEIVWDKGRDFATVRKVLSMPQVNIVKKTEVQTGGFSKESILPKRNSDKLIARKKDWDPKKYGGFDSPTVAYSVLVVAKVEKGKSKKLKSVKELLGITIMERSSFEKNPIDFLEAKGYKEVKKDLIIKLPKYSLFELENGRKRMLASAGELQKGNELALPSKYVNFLYLASHYEKLKGSPEDNEQKQLFVEQHKHYLDEIIEQISEFSKRVILADANLDKVLSAYNKHRDKPIREQAENIIHLFTLTNLGAPAAFKYFDTTIDRKRYTSTKEVLDATLIHQSITGLYETRIDLSQLGGDGGEAAAKGGGPAPGGTLGDQGSRGSDPLPEPRVTLTVEGIPTEFLVNTGAEHSVLTKPMGKMGSKRTVVAGATGSKVYPWTTKRLLKIGQKQVTHSFLVIPECPAPLLGRDLLTKLKAQIQFSTEGPQVTWEDRPAMCLVLNLEEEYRLHEKPVPPSIDPSWLQLFPMVWAEKAGMGLANQVPPVVVELKSDASPVAVRQYPMSKEAREGIRPHIQRFLDLGILVPCQSPWNTPLLPVKKPGTNDYRPVQDLREVNKRVQDIHPTVPNPYNLLSSLPPSHTWYSVLDLKDAFFCLKLHPNSQPLFAFEWRDPEKGNTGQLTWTRLPQGFKNSPTLFNEALHRDLASFRALNPQVVMLQYVDDLLVAAPTYRDCKEGTRRLLQELSKLGYRVSAKKAQLCREEVTYLGYLLKGGKRWLTPARKATVMKIPTPTTPRQVREFLGKAGFCRLFIPGFASLAAPLYPLTRPKVPFTWTEAHQEAFGRIKEALLSAPALALPDLTKPFALYVDEKEGVARGVLTQTLGPWRRPVAYLSKKLDPVASGWPTCLKAIAAVALLLKDADKLTLGQNVLVIAPHNLESIVRQPPDRWMTNARMTHYQSLLLNERVSFAPPAILNPATLLPVESDDTPIHICSEILAEETGTRPDLRDQPLPGVPAWYTDGSSFIMDGRRQAGAAIVDNKRTVWASNLPEGTSAQKAELIALTQALRLAEGKSINIYTDSRYAFATAHVHGAIYKQRGWLTSAGKDIKNKEEILALLEAIHLPKRVAIIHCPGHQRGTDPVATGNRKADEAAKQAAQSTRILTETTKNAGKRTADGSEFEKRTADGSEFESPKKKAKVE

SEQ ID NO: 1771 - protein, 2218 aa, synthetic construct
MPAAKRVKLDGGDKKYSIGLDIGTNSVGWAVITDEYKVPSKKFKVLGNTDRHSIKKNLIGALLFDSGETAEATRLKRTARRRYTRRKNRICYLQEIFSNEMAKVDDSFFHRLEESFLVEEDKKHERHPIFGNIVDEVAYHEKYPTIYHLRKKLVDSTDKADLRLIYLALAHMIKFRGHFLIEGDLNPDNSDVDKLFIQLVQTYNQLFEENPINASGVDAKAILSARLSKSRRLENLIAQLPGEKKNGLFGNLIALSLGLTPNFKSNFDLAEDAKLQLSKDTYDDDLDNLLAQIGDQYADLFLAAKNLSDAILLSDILRVNTEITKAPLSASMIKRYDEHHQDLTLLKALVRQQLPEKYKEIFFDQSKNGYAGYIDGGASQEEFYKFIKPILEKMDGTEELLVKLNREDLLRKQRTFDNGSIPHQIHLGELHAILRRQEDFYPFLKDNREKIEKILTFRIPYYVGPLARGNSRFAWMTRKSEETITPWNFEEVVDKGASAQSFIERMTNFDKNLPNEKVLPKHSLLYEYFTVYNELTKVKYVTEGMRKPAFLSGEQKKAIVDLLFKTNRKVTVKQLKEDYFKKIECFDSVEISGVEDRFNASLGTYHDLLKIIKDKDFLDNEENEDILEDIVLTLTLFEDREMIEERLKTYAHLFDDKVMKQLKRRRYTGWGRLSRKLINGIRDKQSGKTILDFLKSDGFANRNFMQLIHDDSLTFKEDIQKAQVSGQGDSLHEHIANLAGSPAIKKGILQTVKVVDELVKVMGRHKPENIVIEMARENQTTQKGQKNSRERMKRIEEGIKELGSQILKEHPVENTQLQNEKLYLYYLQNGRDMYVDQELDINRLSDYDVDHIVPQSFLKDDSIDNKVLTRSDKARGKSDNVPSEEVVKKMKNYWRQLLNAKLITQRKFDNLTKAERGGLSELDKAGFIKRQLVETRQITKHVAQILDSRMNTKYDENDKLIREVKVITLKSKLVSDFRKDFQFYKVREINNYHHAHDAYLNAVVGTALIKKYPKLESEFVYGDYKVYDVRKMIAKSEQEIGKATAKYFFYSNIMNFFKTEITLANGEIRKRPLIETNGETGEIVWDKGRDFATVRKVLSMPQVNIVKKTEVQTGGFSKESILPKRNSDKLIARKKDWDPKKYGGFDSPTVAYSVLVVAKVEKGKSKKLKSVKELLGITIMERSSFEKNPIDFLEAKGYKEVKKDLIIKLPKYSLFELENGRKRMLASAGELQKGNELALPSKYVNFLYLASHYEKLKGSPEDNEQKQLFVEQHKHYLDEIIEQISEFSKRVILADANLDKVLSAYNKHRDKPIREQAENIIHLFTLTNLGAPAAFKYFDTTIDRKRYTSTKEVLDATLIHQSITGLYETRIDLSQLGGDGGGGGEAAAKGGSGGTLGDQGSRGSDPLPEPRVTLTVEGIPTEFLVNTGAEHSVLTKPMGKMGSKRTVVAGATGSKVYPWTTKRLLKIGQKQVTHSFLVIPECPAPLLGRDLLTKLKAQIQFSTEGPQVTWEDRPAMCLVLNLEEEYRLHEKPVPPSIDPSWLQLFPMVWAEKAGMGLANQVPPVVVELKSDASPVAVRQYPMSKEAREGIRPHIQRFLDLGILVPCQSPWNTPLLPVKKPGTNDYRPVQDLREVNKRVQDIHPTVPNPYNLLSSLPPSHTWYSVLDLKDAFFCLKLHPNSQPLFAFEWRDPEKGNTGQLTWTRLPQGFKNSPTLFNEALHRDLASFRALNPQVVMLQYVDDLLVAAPTYRDCKEGTRRLLQELSKLGYRVSAKKAQLCREEVTYLGYLLKGGKRWLTPARKATVMKIPTPTTPRQVREFLGKAGFCRLFIPGFASLAAPLYPLTRPKVPFTWTEAHQEAFGRIKEALLSAPALALPDLTKPFALYVDEKEGVARGVLTQTLGPWRRPVAYLSKKLDPVASGWPTCLKAIAAVALLLKDADKLTLGQNVLVIAPHNLESIVRQPPDRWMTNARMTHYQSLLLNERVSFAPPAILNPATLLPVESDDTPIHICSEILAEETGTRPDLRDQPLPGVPAWYTDGSSFIMDGRRQAGAAIVDNKRTVWASNLPEGTSAQKAELIALTQALRLAEGKSINIYTDSRYAFATAHVHGAIYKQRGWLTSAGKDIKNKEEILALLEAIHLPKRVAIIHCPGHQRGTDPVATGNRKADEAAKQAAQSTRILTETTKNAGKRTADGSEFEKRTADGSEFESPKKKAKVE

SEQ ID NO: 1772 - protein, 2213 aa, synthetic construct
MPAAKRVKLDGGDKKYSIGLDIGTNSVGWAVITDEYKVPSKKFKVLGNTDRHSIKKNLIGALLFDSGETAEATRLKRTARRRYTRRKNRICYLQEIFSNEMAKVDDSFFHRLEESFLVEEDKKHERHPIFGNIVDEVAYHEKYPTIYHLRKKLVDSTDKADLRLIYLALAHMIKFRGHFLIEGDLNPDNSDVDKLFIQLVQTYNQLFEENPINASGVDAKAILSARLSKSRRLENLIAQLPGEKKNGLFGNLIALSLGLTPNFKSNFDLAEDAKLQLSKDTYDDDLDNLLAQIGDQYADLFLAAKNLSDAILLSDILRVNTEITKAPLSASMIKRYDEHHQDLTLLKALVRQQLPEKYKEIFFDQSKNGYAGYIDGGASQEEFYKFIKPILEKMDGTEELLVKLNREDLLRKQRTFDNGSIPHQIHLGELHAILRRQEDFYPFLKDNREKIEKILTFRIPYYVGPLARGNSRFAWMTRKSEETITPWNFEEVVDKGASAQSFIERMTNFDKNLPNEKVLPKHSLLYEYFTVYNELTKVKYVTEGMRKPAFLSGEQKKAIVDLLFKTNRKVTVKQLKEDYFKKIECFDSVEISGVEDRFNASLGTYHDLLKIIKDKDFLDNEENEDILEDIVLTLTLFEDREMIEERLKTYAHLFDDKVMKQLKRRRYTGWGRLSRKLINGIRDKQSGKTILDFLKSDGFANRNFMQLIHDDSLTFKEDIQKAQVSGQGDSLHEHIANLAGSPAIKKGILQTVKVVDELVKVMGRHKPENIVIEMARENQTTQKGQKNSRERMKRIEEGIKELGSQILKEHPVENTQLQNEKLYLYYLQNGRDMYVDQELDINRLSDYDVDHIVPQSFLKDDSIDNKVLTRSDKARGKSDNVPSEEVVKKMKNYWRQLLNAKLITQRKFDNLTKAERGGLSELDKAGFIKRQLVETRQITKHVAQILDSRMNTKYDENDKLIREVKVITLKSKLVSDFRKDFQFYKVREINNYHHAHDAYLNAVVGTALIKKYPKLESEFVYGDYKVYDVRKMIAKSEQEIGKATAKYFFYSNIMNFFKTEITLANGEIRKRPLIETNGETGEIVWDKGRDFATVRKVLSMPQVNIVKKTEVQTGGFSKESILPKRNSDKLIARKKDWDPKKYGGFDSPTVAYSVLVVAKVEKGKSKKLKSVKELLGITIMERSSFEKNPIDFLEAKGYKEVKKDLIIKLPKYSLFELENGRKRMLASAGELQKGNELALPSKYVNFLYLASHYEKLKGSPEDNEQKQLFVEQHKHYLDEIIEQISEFSKRVILADANLDKVLSAYNKHRDKPIREQAENIIHLFTLTNLGAPAAFKYFDTTIDRKRYTSTKEVLDATLIHQSITGLYETRIDLSQLGGDGGGGGGSSGGTLGDQGSRGSDPLPEPRVTLTVEGIPTEFLVNTGAEHSVLTKPMGKMGSKRTVVAGATGSKVYPWTTKRLLKIGQKQVTHSFLVIPECPAPLLGRDLLTKLKAQIQFSTEGPQVTWEDRPAMCLVLNLEEEYRLHEKPVPPSIDPSWLQLFPMVWAEKAGMGLANQVPPVVVELKSDASPVAVRQYPMSKEAREGIRPHIQRFLDLGILVPCQSPWNTPLLPVKKPGTNDYRPVQDLREVNKRVQDIHPTVPNPYNLLSSLPPSHTWYSVLDLKDAFFCLKLHPNSQPLFAFEWRDPEKGNTGQLTWTRLPQGFKNSPTLFNEALHRDLASFRALNPQVVMLQYVDDLLVAAPTYRDCKEGTRRLLQELSKLGYRVSAKKAQLCREEVTYLGYLLKGGKRWLTPARKATVMKIPTPTTPRQVREFLGKAGFCRLFIPGFASLAAPLYPLTRPKVPFTWTEAHQEAFGRIKEALLSAPALALPDLTKPFALYVDEKEGVARGVLTQTLGPWRRPVAYLSKKLDPVASGWPTCLKAIAAVALLLKDADKLTLGQNVLVIAPHNLESIVRQPPDRWMTNARMTHYQSLLLNERVSFAPPAILNPATLLPVESDDTPIHICSEILAEETGTRPDLRDQPLPGVPAWYTDGSSFIMDGRRQAGAAIVDNKRTVWASNLPEGTSAQKAELIALTQALRLAEGKSINIYTDSRYAFATAHVHGAIYKQRGWLTSAGKDIKNKEEILALLEAIHLPKRVAIIHCPGHQRGTDPVATGNRKADEAAKQAAQSTRILTETTKNAGKRTADGSEFEKRTADGSEFESPKKKAKVE

SEQ ID NO: 1773 - protein, 2217 aa, synthetic construct
MPAAKRVKLDGGDKKYSIGLDIGTNSVGWAVITDEYKVPSKKFKVLGNTDRHSIKKNLIGALLFDSGETAEATRLKRTARRRYTRRKNRICYLQEIFSNEMAKVDDSFFHRLEESFLVEEDKKHERHPIFGNIVDEVAYHEKYPTIYHLRKKLVDSTDKADLRLIYLALAHMIKFRGHFLIEGDLNPDNSDVDKLFIQLVQTYNQLFEENPINASGVDAKAILSARLSKSRRLENLIAQLPGEKKNGLFGNLIALSLGLTPNFKSNFDLAEDAKLQLSKDTYDDDLDNLLAQIGDQYADLFLAAKNLSDAILLSDILRVNTEITKAPLSASMIKRYDEHHQDLTLLKALVRQQLPEKYKEIFFDQSKNGYAGYIDGGASQEEFYKFIKPILEKMDGTEELLVKLNREDLLRKQRTFDNGSIPHQIHLGELHAILRRQEDFYPFLKDNREKIEKILTFRIPYYVGPLARGNSRFAWMTRKSEETITPWNFEEVVDKGASAQSFIERMTNFDKNLPNEKVLPKHSLLYEYFTVYNELTKVKYVTEGMRKPAFLSGEQKKAIVDLLFKTNRKVTVKQLKEDYFKKIECFDSVEISGVEDRFNASLGTYHDLLKIIKDKDFLDNEENEDILEDIVLTLTLFEDREMIEERLKTYAHLFDDKVMKQLKRRRYTGWGRLSRKLINGIRDKQSGKTILDFLKSDGFANRNFMQLIHDDSLTFKEDIQKAQVSGQGDSLHEHIANLAGSPAIKKGILQTVKVVDELVKVMGRHKPENIVIEMARENQTTQKGQKNSRERMKRIEEGIKELGSQILKEHPVENTQLQNEKLYLYYLQNGRDMYVDQELDINRLSDYDVDHIVPQSFLKDDSIDNKVLTRSDKARGKSDNVPSEEVVKKMKNYWRQLLNAKLITQRKFDNLTKAERGGLSELDKAGFIKRQLVETRQITKHVAQILDSRMNTKYDENDKLIREVKVITLKSKLVSDFRKDFQFYKVREINNYHHAHDAYLNAVVGTALIKKYPKLESEFVYGDYKVYDVRKMIAKSEQEIGKATAKYFFYSNIMNFFKTEITLANGEIRKRPLIETNGETGEIVWDKGRDFATVRKVLSMPQVNIVKKTEVQTGGFSKESILPKRNSDKLIARKKDWDPKKYGGFDSPTVAYSVLVVAKVEKGKSKKLKSVKELLGITIMERSSFEKNPIDFLEAKGYKEVKKDLIIKLPKYSLFELENGRKRMLASAGELQKGNELALPSKYVNFLYLASHYEKLKGSPEDNEQKQLFVEQHKHYLDEIIEQISEFSKRVILADANLDKVLSAYNKHRDKPIREQAENIIHLFTLTNLGAPAAFKYFDTTIDRKRYTSTKEVLDATLIHQSITGLYETRIDLSQLGGDGGEAAAKEAAAKGGTLGDQGSRGSDPLPEPRVTLTVEGIPTEFLVNTGAEHSVLTKPMGKMGSKRTVVAGATGSKVYPWTTKRLLKIGQKQVTHSFLVIPECPAPLLGRDLLTKLKAQIQFSTEGPQVTWEDRPAMCLVLNLEEEYRLHEKPVPPSIDPSWLQLFPMVWAEKAGMGLANQVPPVVVELKSDASPVAVRQYPMSKEAREGIRPHIQRFLDLGILVPCQSPWNTPLLPVKKPGTNDYRPVQDLREVNKRVQDIHPTVPNPYNLLSSLPPSHTWYSVLDLKDAFFCLKLHPNSQPLFAFEWRDPEKGNTGQLTWTRLPQGFKNSPTLFNEALHRDLASFRALNPQVVMLQYVDDLLVAAPTYRDCKEGTRRLLQELSKLGYRVSAKKAQLCREEVTYLGYLLKGGKRWLTPARKATVMKIPTPTTPRQVREFLGKAGFCRLFIPGFASLAAPLYPLTRPKVPFTWTEAHQEAFGRIKEALLSAPALALPDLTKPFALYVDEKEGVARGVLTQTLGPWRRPVAYLSKKLDPVASGWPTCLKAIAAVALLLKDADKLTLGQNVLVIAPHNLESIVRQPPDRWMTNARMTHYQSLLLNERVSFAPPAILNPATLLPVESDDTPIHICSEILAEETGTRPDLRDQPLPGVPAWYTDGSSFIMDGRRQAGAAIVDNKRTVWASNLPEGTSAQKAELIALTQALRLAEGKSINIYTDSRYAFATAHVHGAIYKQRGWLTSAGKDIKNKEEILALLEAIHLPKRVAIIHCPGHQRGTDPVATGNRKADEAAKQAAQSTRILTETTKNAGKRTADGSEFEKRTADGSEFESPKKKAKVE

SEQ ID NO: 1774 - protein, 2216 aa, synthetic construct
MPAAKRVKLDGGDKKYSIGLDIGTNSVGWAVITDEYKVPSKKFKVLGNTDRHSIKKNLIGALLFDSGETAEATRLKRTARRRYTRRKNRICYLQEIFSNEMAKVDDSFFHRLEESFLVEEDKKHERHPIFGNIVDEVAYHEKYPTIYHLRKKLVDSTDKADLRLIYLALAHMIKFRGHFLIEGDLNPDNSDVDKLFIQLVQTYNQLFEENPINASGVDAKAILSARLSKSRRLENLIAQLPGEKKNGLFGNLIALSLGLTPNFKSNFDLAEDAKLQLSKDTYDDDLDNLLAQIGDQYADLFLAAKNLSDAILLSDILRVNTEITKAPLSASMIKRYDEHHQDLTLLKALVRQQLPEKYKEIFFDQSKNGYAGYIDGGASQEEFYKFIKPILEKMDGTEELLVKLNREDLLRKQRTFDNGSIPHQIHLGELHAILRRQEDFYPFLKDNREKIEKILTFRIPYYVGPLARGNSRFAWMTRKSEETITPWNFEEVVDKGASAQSFIERMTNFDKNLPNEKVLPKHSLLYEYFTVYNELTKVKYVTEGMRKPAFLSGEQKKAIVDLLFKTNRKVTVKQLKEDYFKKIECFDSVEISGVEDRFNASLGTYHDLLKIIKDKDFLDNEENEDILEDIVLTLTLFEDREMIEERLKTYAHLFDDKVMKQLKRRRYTGWGRLSRKLINGIRDKQSGKTILDFLKSDGFANRNFMQLIHDDSLTFKEDIQKAQVSGQGDSLHEHIANLAGSPAIKKGILQTVKVVDELVKVMGRHKPENIVIEMARENQTTQKGQKNSRERMKRIEEGIKELGSQILKEHPVENTQLQNEKLYLYYLQNGRDMYVDQELDINRLSDYDVDHIVPQSFLKDDSIDNKVLTRSDKARGKSDNVPSEEVVKKMKNYWRQLLNAKLITQRKFDNLTKAERGGLSELDKAGFIKRQLVETRQITKHVAQILDSRMNTKYDENDKLIREVKVITLKSKLVSDFRKDFQFYKVREINNYHHAHDAYLNAVVGTALIKKYPKLESEFVYGDYKVYDVRKMIAKSEQEIGKATAKYFFYSNIMNFFKTEITLANGEIRKRPLIETNGETGEIVWDKGRDFATVRKVLSMPQVNIVKKTEVQTGGFSKESILPKRNSDKLIARKKDWDPKKYGGFDSPTVAYSVLVVAKVEKGKSKKLKSVKELLGITIMERSSFEKNPIDFLEAKGYKEVKKDLIIKLPKYSLFELENGRKRMLASAGELQKGNELALPSKYVNFLYLASHYEKLKGSPEDNEQKQLFVEQHKHYLDEIIEQISEFSKRVILADANLDKVLSAYNKHRDKPIREQAENIIHLFTLTNLGAPAAFKYFDTTIDRKRYTSTKEVLDATLIHQSITGLYETRIDLSQLGGDGGPAPGGGGSSGGTLGDQGSRGSDPLPEPRVTLTVEGIPTEFLVNTGAEHSVLTKPMGKMGSKRTVVAGATGSKVYPWTTKRLLKIGQKQVTHSFLVIPECPAPLLGRDLLTKLKAQIQFSTEGPQVTWEDRPAMCLVLNLEEEYRLHEKPVPPSIDPSWLQLFPMVWAEKAGMGLANQVPPVVVELKSDASPVAVRQYPMSKEAREGIRPHIQRFLDLGILVPCQSPWNTPLLPVKKPGTNDYRPVQDLREVNKRVQDIHPTVPNPYNLLSSLPPSHTWYSVLDLKDAFFCLKLHPNSQPLFAFEWRDPEKGNTGQLTWTRLPQGFKNSPTLFNEALHRDLASFRALNPQVVMLQYVDDLLVAAPTYRDCKEGTRRLLQELSKLGYRVSAKKAQLCREEVTYLGYLLKGGKRWLTPARKATVMKIPTPTTPRQVREFLGKAGFCRLFIPGFASLAAPLYPLTRPKVPFTWTEAHQEAFGRIKEALLSAPALALPDLTKPFALYVDEKEGVARGVLTQTLGPWRRPVAYLSKKLDPVASGWPTCLKAIAAVALLLKDADKLTLGQNVLVIAPHNLESIVRQPPDRWMTNARMTHYQSLLLNERVSFAPPAILNPATLLPVESDDTPIHICSEILAEETGTRPDLRDQPLPGVPAWYTDGSSFIMDGRRQAGAAIVDNKRTVWASNLPEGTSAQKAELIALTQALRLAEGKSINIYTDSRYAFATAHVHGAIYKQRGWLTSAGKDIKNKEEILALLEAIHLPKRVAIIHCPGHQRGTDPVATGNRKADEAAKQAAQSTRILTETTKNAGKRTADGSEFEKRTADGSEFESPKKKAKVE

SEQ ID NO: 1775 - protein, 2216 aa, synthetic construct
MPAAKRVKLDGGDKKYSIGLDIGTNSVGWAVITDEYKVPSKKFKVLGNTDRHSIKKNLIGALLFDSGETAEATRLKRTARRRYTRRKNRICYLQEIFSNEMAKVDDSFFHRLEESFLVEEDKKHERHPIFGNIVDEVAYHEKYPTIYHLRKKLVDSTDKADLRLIYLALAHMIKFRGHFLIEGDLNPDNSDVDKLFIQLVQTYNQLFEENPINASGVDAKAILSARLSKSRRLENLIAQLPGEKKNGLFGNLIALSLGLTPNFKSNFDLAEDAKLQLSKDTYDDDLDNLLAQIGDQYADLFLAAKNLSDAILLSDILRVNTEITKAPLSASMIKRYDEHHQDLTLLKALVRQQLPEKYKEIFFDQSKNGYAGYIDGGASQEEFYKFIKPILEKMDGTEELLVKLNREDLLRKQRTFDNGSIPHQIHLGELHAILRRQEDFYPFLKDNREKIEKILTFRIPYYVGPLARGNSRFAWMTRKSEETITPWNFEEVVDKGASAQSFIERMTNFDKNLPNEKVLPKHSLLYEYFTVYNELTKVKYVTEGMRKPAFLSGEQKKAIVDLLFKTNRKVTVKQLKEDYFKKIECFDSVEISGVEDRFNASLGTYHDLLKIIKDKDFLDNEENEDILEDIVLTLTLFEDREMIEERLKTYAHLFDDKVMKQLKRRRYTGWGRLSRKLINGIRDKQSGKTILDFLKSDGFANRNFMQLIHDDSLTFKEDIQKAQVSGQGDSLHEHIANLAGSPAIKKGILQTVKVVDELVKVMGRHKPENIVIEMARENQTTQKGQKNSRERMKRIEEGIKELGSQILKEHPVENTQLQNEKLYLYYLQNGRDMYVDQELDINRLSDYDVDHIVPQSFLKDDSIDNKVLTRSDKARGKSDNVPSEEVVKKMKNYWRQLLNAKLITQRKFDNLTKAERGGLSELDKAGFIKRQLVETRQITKHVAQILDSRMNTKYDENDKLIREVKVITLKSKLVSDFRKDFQFYKVREINNYHHAHDAYLNAVVGTALIKKYPKLESEFVYGDYKVYDVRKMIAKSEQEIGKATAKYFFYSNIMNFFKTEITLANGEIRKRPLIETNGETGEIVWDKGRDFATVRKVLSMPQVNIVKKTEVQTGGFSKESILPKRNSDKLIARKKDWDPKKYGGFDSPTVAYSVLVVAKVEKGKSKKLKSVKELLGITIMERSSFEKNPIDFLEAKGYKEVKKDLIIKLPKYSLFELENGRKRMLASAGELQKGNELALPSKYVNFLYLASHYEKLKGSPEDNEQKQLFVEQHKHYLDEIIEQISEFSKRVILADANLDKVLSAYNKHRDKPIREQAENIIHLFTLTNLGAPAAFKYFDTTIDRKRYTSTKEVLDATLIHQSITGLYETRIDLSQLGGDGGGGGGGSGSSGGTLGDQGSRGSDPLPEPRVTLTVEGIPTEFLVNTGAEHSVLTKPMGKMGSKRTVVAGATGSKVYPWTTKRLLKIGQKQVTHSFLVIPECPAPLLGRDLLTKLKAQIQFSTEGPQVTWEDRPAMCLVLNLEEEYRLHEKPVPPSIDPSWLQLFPMVWAEKAGMGLANQVPPVVVELKSDASPVAVRQYPMSKEAREGIRPHIQRFLDLGILVPCQSPWNTPLLPVKKPGTNDYRPVQDLREVNKRVQDIHPTVPNPYNLLSSLPPSHTWYSVLDLKDAFFCLKLHPNSQPLFAFEWRDPEKGNTGQLTWTRLPQGFKNSPTLFNEALHRDLASFRALNPQVVMLQYVDDLLVAAPTYRDCKEGTRRLLQELSKLGYRVSAKKAQLCREEVTYLGYLLKGGKRWLTPARKATVMKIPTPTTPRQVREFLGKAGFCRLFIPGFASLAAPLYPLTRPKVPFTWTEAHQEAFGRIKEALLSAPALALPDLTKPFALYVDEKEGVARGVLTQTLGPWRRPVAYLSKKLDPVASGWPTCLKAIAAVALLLKDADKLTLGQNVLVIAPHNLESIVRQPPDRWMTNARMTHYQSLLLNERVSFAPPAILNPATLLPVESDDTPIHICSEILAEETGTRPDLRDQPLPGVPAWYTDGSSFIMDGRRQAGAAIVDNKRTVWASNLPEGTSAQKAELIALTQALRLAEGKSINIYTDSRYAFATAHVHGAIYKQRGWLTSAGKDIKNKEEILALLEAIHLPKRVAIIHCPGHQRGTDPVATGNRKADEAAKQAAQSTRILTETTKNAGKRTADGSEFEKRTADGSEFESPKKKAKVE

SEQ ID NO: 1776 - protein, 2210 aa, synthetic construct
MPAAKRVKLDGGDKKYSIGLDIGTNSVGWAVITDEYKVPSKKFKVLGNTDRHSIKKNLIGALLFDSGETAEATRLKRTARRRYTRRKNRICYLQEIFSNEMAKVDDSFFHRLEESFLVEEDKKHERHPIFGNIVDEVAYHEKYPTIYHLRKKLVDSTDKADLRLIYLALAHMIKFRGHFLIEGDLNPDNSDVDKLFIQLVQTYNQLFEENPINASGVDAKAILSARLSKSRRLENLIAQLPGEKKNGLFGNLIALSLGLTPNFKSNFDLAEDAKLQLSKDTYDDDLDNLLAQIGDQYADLFLAAKNLSDAILLSDILRVNTEITKAPLSASMIKRYDEHHQDLTLLKALVRQQLPEKYKEIFFDQSKNGYAGYIDGGASQEEFYKFIKPILEKMDGTEELLVKLNREDLLRKQRTFDNGSIPHQIHLGELHAILRRQEDFYPFLKDNREKIEKILTFRIPYYVGPLARGNSRFAWMTRKSEETITPWNFEEVVDKGASAQSFIERMTNFDKNLPNEKVLPKHSLLYEYFTVYNELTKVKYVTEGMRKPAFLSGEQKKAIVDLLFKTNRKVTVKQLKEDYFKKIECFDSVEISGVEDRFNASLGTYHDLLKIIKDKDFLDNEENEDILEDIVLTLTLFEDREMIEERLKTYAHLFDDKVMKQLKRRRYTGWGRLSRKLINGIRDKQSGKTILDFLKSDGFANRNFMQLIHDDSLTFKEDIQKAQVSGQGDSLHEHIANLAGSPAIKKGILQTVKVVDELVKVMGRHKPENIVIEMARENQTTQKGQKNSRERMKRIEEGIKELGSQILKEHPVENTQLQNEKLYLYYLQNGRDMYVDQELDINRLSDYDVDHIVPQSFLKDDSIDNKVLTRSDKARGKSDNVPSEEVVKKMKNYWRQLLNAKLITQRKFDNLTKAERGGLSELDKAGFIKRQLVETRQITKHVAQILDSRMNTKYDENDKLIREVKVITLKSKLVSDFRKDFQFYKVREINNYHHAHDAYLNAVVGTALIKKYPKLESEFVYGDYKVYDVRKMIAKSEQEIGKATAKYFFYSNIMNFFKTEITLANGEIRKRPLIETNGETGEIVWDKGRDFATVRKVLSMPQVNIVKKTEVQTGGFSKESILPKRNSDKLIARKKDWDPKKYGGFDSPTVAYSVLVVAKVEKGKSKKLKSVKELLGITIMERSSFEKNPIDFLEAKGYKEVKKDLIIKLPKYSLFELENGRKRMLASAGELQKGNELALPSKYVNFLYLASHYEKLKGSPEDNEQKQLFVEQHKHYLDEIIEQISEFSKRVILADANLDKVLSAYNKHRDKPIREQAENIIHLFTLTNLGAPAAFKYFDTTIDRKRYTSTKEVLDATLIHQSITGLYETRIDLSQLGGDGGGSSGGTLGDQGSRGSDPLPEPRVTLTVEGIPTEFLVNTGAEHSVLTKPMGKMGSKRTVVAGATGSKVYPWTTKRLLKIGQKQVTHSFLVIPECPAPLLGRDLLTKLKAQIQFSTEGPQVTWEDRPAMCLVLNLEEEYRLHEKPVPPSIDPSWLQLFPMVWAEKAGMGLANQVPPVVVELKSDASPVAVRQYPMSKEAREGIRPHIQRFLDLGILVPCQSPWNTPLLPVKKPGTNDYRPVQDLREVNKRVQDIHPTVPNPYNLLSSLPPSHTWYSVLDLKDAFFCLKLHPNSQPLFAFEWRDPEKGNTGQLTWTRLPQGFKNSPTLFNEALHRDLASFRALNPQVVMLQYVDDLLVAAPTYRDCKEGTRRLLQELSKLGYRVSAKKAQLCREEVTYLGYLLKGGKRWLTPARKATVMKIPTPTTPRQVREFLGKAGFCRLFIPGFASLAAPLYPLTRPKVPFTWTEAHQEAFGRIKEALLSAPALALPDLTKPFALYVDEKEGVARGVLTQTLGPWRRPVAYLSKKLDPVASGWPTCLKAIAAVALLLKDADKLTLGQNVLVIAPHNLESIVRQPPDRWMTNARMTHYQSLLLNERVSFAPPAILNPATLLPVESDDTPIHICSEILAEETGTRPDLRDQPLPGVPAWYTDGSSFIMDGRRQAGAAIVDNKRTVWASNLPEGTSAQKAELIALTQALRLAEGKSINIYTDSRYAFATAHVHGAIYKQRGWLTSAGKDIKNKEEILALLEAIHLPKRVAIIHCPGHQRGTDPVATGNRKADEAAKQAAQSTRILTETTKNAGKRTADGSEFEKRTADGSEFESPKKKAKVE

SEQ ID NO: 1777 - protein, 2222 aa, synthetic construct
MPAAKRVKLDGGDKKYSIGLDIGTNSVGWAVITDEYKVPSKKFKVLGNTDRHSIKKNLIGALLFDSGETAEATRLKRTARRRYTRRKNRICYLQEIFSNEMAKVDDSFFHRLEESFLVEEDKKHERHPIFGNIVDEVAYHEKYPTIYHLRKKLVDSTDKADLRLIYLALAHMIKFRGHFLIEGDLNPDNSDVDKLFIQLVQTYNQLFEENPINASGVDAKAILSARLSKSRRLENLIAQLPGEKKNGLFGNLIALSLGLTPNFKSNFDLAEDAKLQLSKDTYDDDLDNLLAQIGDQYADLFLAAKNLSDAILLSDILRVNTEITKAPLSASMIKRYDEHHQDLTLLKALVRQQLPEKYKEIFFDQSKNGYAGYIDGGASQEEFYKFIKPILEKMDGTEELLVKLNREDLLRKQRTFDNGSIPHQIHLGELHAILRRQEDFYPFLKDNREKIEKILTFRIPYYVGPLARGNSRFAWMTRKSEETITPWNFEEVVDKGASAQSFIERMTNFDKNLPNEKVLPKHSLLYEYFTVYNELTKVKYVTEGMRKPAFLSGEQKKAIVDLLFKTNRKVTVKQLKEDYFKKIECFDSVEISGVEDRFNASLGTYHDLLKIIKDKDFLDNEENEDILEDIVLTLTLFEDREMIEERLKTYAHLFDDKVMKQLKRRRYTGWGRLSRKLINGIRDKQSGKTILDFLKSDGFANRNFMQLIHDDSLTFKEDIQKAQVSGQGDSLHEHIANLAGSPAIKKGILQTVKVVDELVKVMGRHKPENIVIEMARENQTTQKGQKNSRERMKRIEEGIKELGSQILKEHPVENTQLQNEKLYLYYLQNGRDMYVDQELDINRLSDYDVDHIVPQSFLKDDSIDNKVLTRSDKARGKSDNVPSEEVVKKMKNYWRQLLNAKLITQRKFDNLTKAERGGLSELDKAGFIKRQLVETRQITKHVAQILDSRMNTKYDENDKLIREVKVITLKSKLVSDFRKDFQFYKVREINNYHHAHDAYLNAVVGTALIKKYPKLESEFVYGDYKVYDVRKMIAKSEQEIGKATAKYFFYSNIMNFFKTEITLANGEIRKRPLIETNGETGEIVWDKGRDFATVRKVLSMPQVNIVKKTEVQTGGFSKESILPKRNSDKLIARKKDWDPKKYGGFDSPTVAYSVLVVAKVEKGKSKKLKSVKELLGITIMERSSFEKNPIDFLEAKGYKEVKKDLIIKLPKYSLFELENGRKRMLASAGELQKGNELALPSKYVNFLYLASHYEKLKGSPEDNEQKQLFVEQHKHYLDEIIEQISEFSKRVILADANLDKVLSAYNKHRDKPIREQAENIIHLFTLTNLGAPAAFKYFDTTIDRKRYTSTKEVLDATLIHQSITGLYETRIDLSQLGGDGGGGGGSEAAAKGGGGSGGTLGDQGSRGSDPLPEPRVTLTVEGIPTEFLVNTGAEHSVLTKPMGKMGSKRTVVAGATGSKVYPWTTKRLLKIGQKQVTHSFLVIPECPAPLLGRDLLTKLKAQIQFSTEGPQVTWEDRPAMCLVLNLEEEYRLHEKPVPPSIDPSWLQLFPMVWAEKAGMGLANQVPPVVVELKSDASPVAVRQYPMSKEAREGIRPHIQRFLDLGILVPCQSPWNTPLLPVKKPGTNDYRPVQDLREVNKRVQDIHPTVPNPYNLLSSLPPSHTWYSVLDLKDAFFCLKLHPNSQPLFAFEWRDPEKGNTGQLTWTRLPQGFKNSPTLFNEALHRDLASFRALNPQVVMLQYVDDLLVAAPTYRDCKEGTRRLLQELSKLGYRVSAKKAQLCREEVTYLGYLLKGGKRWLTPARKATVMKIPTPTTPRQVREFLGKAGFCRLFIPGFASLAAPLYPLTRPKVPFTWTEAHQEAFGRIKEALLSAPALALPDLTKPFALYVDEKEGVARGVLTQTLGPWRRPVAYLSKKLDPVASGWPTCLKAIAAVALLLKDADKLTLGQNVLVIAPHNLESIVRQPPDRWMTNARMTHYQSLLLNERVSFAPPAILNPATLLPVESDDTPIHICSEILAEETGTRPDLRDQPLPGVPAWYTDGSSFIMDGRRQAGAAIVDNKRTVWASNLPEGTSAQKAELIALTQALRLAEGKSINIYTDSRYAFATAHVHGAIYKQRGWLTSAGKDIKNKEEILALLEAIHLPKRVAIIHCPGHQRGTDPVATGNRKADEAAKQAAQSTRILTETTKNAGKRTADGSEFEKRTADGSEFESPKKKAKVE

SEQ ID NO: 1778 - protein, 2237 aa, synthetic construct
MPAAKRVKLDGGDKKYSIGLDIGTNSVGWAVITDEYKVPSKKFKVLGNTDRHSIKKNLIGALLFDSGETAEATRLKRTARRRYTRRKNRICYLQEIFSNEMAKVDDSFFHRLEESFLVEEDKKHERHPIFGNIVDEVAYHEKYPTIYHLRKKLVDSTDKADLRLIYLALAHMIKFRGHFLIEGDLNPDNSDVDKLFIQLVQTYNQLFEENPINASGVDAKAILSARLSKSRRLENLIAQLPGEKKNGLFGNLIALSLGLTPNFKSNFDLAEDAKLQLSKDTYDDDLDNLLAQIGDQYADLFLAAKNLSDAILLSDILRVNTEITKAPLSASMIKRYDEHHQDLTLLKALVRQQLPEKYKEIFFDQSKNGYAGYIDGGASQEEFYKFIKPILEKMDGTEELLVKLNREDLLRKQRTFDNGSIPHQIHLGELHAILRRQEDFYPFLKDNREKIEKILTFRIPYYVGPLARGNSRFAWMTRKSEETITPWNFEEVVDKGASAQSFIERMTNFDKNLPNEKVLPKHSLLYEYFTVYNELTKVKYVTEGMRKPAFLSGEQKKAIVDLLFKTNRKVTVKQLKEDYFKKIECFDSVEISGVEDRFNASLGTYHDLLKIIKDKDFLDNEENEDILEDIVLTLTLFEDREMIEERLKTYAHLFDDKVMKQLKRRRYTGWGRLSRKLINGIRDKQSGKTILDFLKSDGFANRNFMQLIHDDSLTFKEDIQKAQVSGQGDSLHEHIANLAGSPAIKKGILQTVKVVDELVKVMGRHKPENIVIEMARENQTTQKGQKNSRERMKRIEEGIKELGSQILKEHPVENTQLQNEKLYLYYLQNGRDMYVDQELDINRLSDYDVDHIVPQSFLKDDSIDNKVLTRSDKARGKSDNVPSEEVVKKMKNYWRQLLNAKLITQRKFDNLTKAERGGLSELDKAGFIKRQLVETRQITKHVAQILDSRMNTKYDENDKLIREVKVITLKSKLVSDFRKDFQFYKVREINNYHHAHDAYLNAVVGTALIKKYPKLESEFVYGDYKVYDVRKMIAKSEQEIGKATAKYFFYSNIMNFFKTEITLANGEIRKRPLIETNGETGEIVWDKGRDFATVRKVLSMPQVNIVKKTEVQTGGFSKESILPKRNSDKLIARKKDWDPKKYGGFDSPTVAYSVLVVAKVEKGKSKKLKSVKELLGITIMERSSFEKNPIDFLEAKGYKEVKKDLIIKLPKYSLFELENGRKRMLASAGELQKGNELALPSKYVNFLYLASHYEKLKGSPEDNEQKQLFVEQHKHYLDEIIEQISEFSKRVILADANLDKVLSAYNKHRDKPIREQAENIIHLFTLTNLGAPAAFKYFDTTIDRKRYTSTKEVLDATLIHQSITGLYETRIDLSQLGGDGGEAAAKEAAAKEAAAKEAAAKEAAAKEAAAKGGTLGDQGSRGSDPLPEPRVTLTVEGIPTEFLVNTGAEHSVLTKPMGKMGSKRTVVAGATGSKVYPWTTKRLLKIGQKQVTHSFLVIPECPAPLLGRDLLTKLKAQIQFSTEGPQVTWEDRPAMCLVLNLEEEYRLHEKPVPPSIDPSWLQLFPMVWAEKAGMGLANQVPPVVVELKSDASPVAVRQYPMSKEAREGIRPHIQRFLDLGILVPCQSPWNTPLLPVKKPGTNDYRPVQDLREVNKRVQDIHPTVPNPYNLLSSLPPSHTWYSVLDLKDAFFCLKLHPNSQPLFAFEWRDPEKGNTGQLTWTRLPQGFKNSPTLFNEALHRDLASFRALNPQVVMLQYVDDLLVAAPTYRDCKEGTRRLLQELSKLGYRVSAKKAQLCREEVTYLGYLLKGGKRWLTPARKATVMKIPTPTTPRQVREFLGKAGFCRLFIPGFASLAAPLYPLTRPKVPFTWTEAHQEAFGRIKEALLSAPALALPDLTKPFALYVDEKEGVARGVLTQTLGPWRRPVAYLSKKLDPVASGWPTCLKAIAAVALLLKDADKLTLGQNVLVIAPHNLESIVRQPPDRWMTNARMTHYQSLLLNERVSFAPPAILNPATLLPVESDDTPIHICSEILAEETGTRPDLRDQPLPGVPAWYTDGSSFIMDGRRQAGAAIVDNKRTVWASNLPEGTSAQKAELIALTQALRLAEGKSINIYTDSRYAFATAHVHGAIYKQRGWLTSAGKDIKNKEEILALLEAIHLPKRVAIIHCPGHQRGTDPVATGNRKADEAAKQAAQSTRILTETTKNAGKRTADGSEFEKRTADGSEFESPKKKAKVE

SEQ ID NO: 1779 - protein, 2216 aa, synthetic construct
MPAAKRVKLDGGDKKYSIGLDIGTNSVGWAVITDEYKVPSKKFKVLGNTDRHSIKKNLIGALLFDSGETAEATRLKRTARRRYTRRKNRICYLQEIFSNEMAKVDDSFFHRLEESFLVEEDKKHERHPIFGNIVDEVAYHEKYPTIYHLRKKLVDSTDKADLRLIYLALAHMIKFRGHFLIEGDLNPDNSDVDKLFIQLVQTYNQLFEENPINASGVDAKAILSARLSKSRRLENLIAQLPGEKKNGLFGNLIALSLGLTPNFKSNFDLAEDAKLQLSKDTYDDDLDNLLAQIGDQYADLFLAAKNLSDAILLSDILRVNTEITKAPLSASMIKRYDEHHQDLTLLKALVRQQLPEKYKEIFFDQSKNGYAGYIDGGASQEEFYKFIKPILEKMDGTEELLVKLNREDLLRKQRTFDNGSIPHQIHLGELHAILRRQEDFYPFLKDNREKIEKILTFRIPYYVGPLARGNSRFAWMTRKSEETITPWNFEEVVDKGASAQSFIERMTNFDKNLPNEKVLPKHSLLYEYFTVYNELTKVKYVTEGMRKPAFLSGEQKKAIVDLLFKTNRKVTVKQLKEDYFKKIECFDSVEISGVEDRFNASLGTYHDLLKIIKDKDFLDNEENEDILEDIVLTLTLFEDREMIEERLKTYAHLFDDKVMKQLKRRRYTGWGRLSRKLINGIRDKQSGKTILDFLKSDGFANRNFMQLIHDDSLTFKEDIQKAQVSGQGDSLHEHIANLAGSPAIKKGILQTVKVVDELVKVMGRHKPENIVIEMARENQTTQKGQKNSRERMKRIEEGIKELGSQILKEHPVENTQLQNEKLYLYYLQNGRDMYVDQELDINRLSDYDVDHIVPQSFLKDDSIDNKVLTRSDKARGKSDNVPSEEVVKKMKNYWRQLLNAKLITQRKFDNLTKAERGGLSELDKAGFIKRQLVETRQITKHVAQILDSRMNTKYDENDKLIREVKVITLKSKLVSDFRKDFQFYKVREINNYHHAHDAYLNAVVGTALIKKYPKLESEFVYGDYKVYDVRKMIAKSEQEIGKATAKYFFYSNIMNFFKTEITLANGEIRKRPLIETNGETGEIVWDKGRDFATVRKVLSMPQVNIVKKTEVQTGGFSKESILPKRNSDKLIARKKDWDPKKYGGFDSPTVAYSVLVVAKVEKGKSKKLKSVKELLGITIMERSSFEKNPIDFLEAKGYKEVKKDLIIKLPKYSLFELENGRKRMLASAGELQKGNELALPSKYVNFLYLASHYEKLKGSPEDNEQKQLFVEQHKHYLDEIIEQISEFSKRVILADANLDKVLSAYNKHRDKPIREQAENIIHLFTLTNLGAPAAFKYFDTTIDRKRYTSTKEVLDATLIHQSITGLYETRIDLSQLGGDGGGGSPAPGGGGGTLGDQGSRGSDPLPEPRVTLTVEGIPTEFLVNTGAEHSVLTKPMGKMGSKRTVVAGATGSKVYPWTTKRLLKIGQKQVTHSFLVIPECPAPLLGRDLLTKLKAQIQFSTEGPQVTWEDRPAMCLVLNLEEEYRLHEKPVPPSIDPSWLQLFPMVWAEKAGMGLANQVPPVVVELKSDASPVAVRQYPMSKEAREGIRPHIQRFLDLGILVPCQSPWNTPLLPVKKPGTNDYRPVQDLREVNKRVQDIHPTVPNPYNLLSSLPPSHTWYSVLDLKDAFFCLKLHPNSQPLFAFEWRDPEKGNTGQLTWTRLPQGFKNSPTLFNEALHRDLASFRALNPQVVMLQYVDDLLVAAPTYRDCKEGTRRLLQELSKLGYRVSAKKAQLCREEVTYLGYLLKGGKRWLTPARKATVMKIPTPTTPRQVREFLGKAGFCRLFIPGFASLAAPLYPLTRPKVPFTWTEAHQEAFGRIKEALLSAPALALPDLTKPFALYVDEKEGVARGVLTQTLGPWRRPVAYLSKKLDPVASGWPTCLKAIAAVALLLKDADKLTLGQNVLVIAPHNLESIVRQPPDRWMTNARMTHYQSLLLNERVSFAPPAILNPATLLPVESDDTPIHICSEILAEETGTRPDLRDQPLPGVPAWYTDGSSFIMDGRRQAGAAIVDNKRTVWASNLPEGTSAQKAELIALTQALRLAEGKSINIYTDSRYAFATAHVHGAIYKQRGWLTSAGKDIKNKEEILALLEAIHLPKRVAIIHCPGHQRGTDPVATGNRKADEAAKQAAQSTRILTETTKNAGKRTADGSEFEKRTADGSEFESPKKKAKVE

SEQ ID NO: 1780 - protein, 2213 aa, synthetic construct
MPAAKRVKLDGGDKKYSIGLDIGTNSVGWAVITDEYKVPSKKFKVLGNTDRHSIKKNLIGALLFDSGETAEATRLKRTARRRYTRRKNRICYLQEIFSNEMAKVDDSFFHRLEESFLVEEDKKHERHPIFGNIVDEVAYHEKYPTIYHLRKKLVDSTDKADLRLIYLALAHMIKFRGHFLIEGDLNPDNSDVDKLFIQLVQTYNQLFEENPINASGVDAKAILSARLSKSRRLENLIAQLPGEKKNGLFGNLIALSLGLTPNFKSNFDLAEDAKLQLSKDTYDDDLDNLLAQIGDQYADLFLAAKNLSDAILLSDILRVNTEITKAPLSASMIKRYDEHHQDLTLLKALVRQQLPEKYKEIFFDQSKNGYAGYIDGGASQEEFYKFIKPILEKMDGTEELLVKLNREDLLRKQRTFDNGSIPHQIHLGELHAILRRQEDFYPFLKDNREKIEKILTFRIPYYVGPLARGNSRFAWMTRKSEETITPWNFEEVVDKGASAQSFIERMTNFDKNLPNEKVLPKHSLLYEYFTVYNELTKVKYVTEGMRKPAFLSGEQKKAIVDLLFKTNRKVTVKQLKEDYFKKIECFDSVEISGVEDRFNASLGTYHDLLKIIKDKDFLDNEENEDILEDIVLTLTLFEDREMIEERLKTYAHLFDDKVMKQLKRRRYTGWGRLSRKLINGIRDKQSGKTILDFLKSDGFANRNFMQLIHDDSLTFKEDIQKAQVSGQGDSLHEHIANLAGSPAIKKGILQTVKVVDELVKVMGRHKPENIVIEMARENQTTQKGQKNSRERMKRIEEGIKELGSQILKEHPVENTQLQNEKLYLYYLQNGRDMYVDQELDINRLSDYDVDHIVPQSFLKDDSIDNKVLTRSDKARGKSDNVPSEEVVKKMKNYWRQLLNAKLITQRKFDNLTKAERGGLSELDKAGFIKRQLVETRQITKHVAQILDSRMNTKYDENDKLIREVKVITLKSKLVSDFRKDFQFYKVREINNYHHAHDAYLNAVVGTALIKKYPKLESEFVYGDYKVYDVRKMIAKSEQEIGKATAKYFFYSNIMNFFKTEITLANGEIRKRPLIETNGETGEIVWDKGRDFATVRKVLSMPQVNIVKKTEVQTGGFSKESILPKRNSDKLIARKKDWDPKKYGGFDSPTVAYSVLVVAKVEKGKSKKLKSVKELLGITIMERSSFEKNPIDFLEAKGYKEVKKDLIIKLPKYSLFELENGRKRMLASAGELQKGNELALPSKYVNFLYLASHYEKLKGSPEDNEQKQLFVEQHKHYLDEIIEQISEFSKRVILADANLDKVLSAYNKHRDKPIREQAENIIHLFTLTNLGAPAAFKYFDTTIDRKRYTSTKEVLDATLIHQSITGLYETRIDLSQLGGDGGPAPGSSGGTLGDQGSRGSDPLPEPRVTLTVEGIPTEFLVNTGAEHSVLTKPMGKMGSKRTVVAGATGSKVYPWTTKRLLKIGQKQVTHSFLVIPECPAPLLGRDLLTKLKAQIQFSTEGPQVTWEDRPAMCLVLNLEEEYRLHEKPVPPSIDPSWLQLFPMVWAEKAGMGLANQVPPVVVELKSDASPVAVRQYPMSKEAREGIRPHIQRFLDLGILVPCQSPWNTPLLPVKKPGTNDYRPVQDLREVNKRVQDIHPTVPNPYNLLSSLPPSHTWYSVLDLKDAFFCLKLHPNSQPLFAFEWRDPEKGNTGQLTWTRLPQGFKNSPTLFNEALHRDLASFRALNPQVVMLQYVDDLLVAAPTYRDCKEGTRRLLQELSKLGYRVSAKKAQLCREEVTYLGYLLKGGKRWLTPARKATVMKIPTPTTPRQVREFLGKAGFCRLFIPGFASLAAPLYPLTRPKVPFTWTEAHQEAFGRIKEALLSAPALALPDLTKPFALYVDEKEGVARGVLTQTLGPWRRPVAYLSKKLDPVASGWPTCLKAIAAVALLLKDADKLTLGQNVLVIAPHNLESIVRQPPDRWMTNARMTHYQSLLLNERVSFAPPAILNPATLLPVESDDTPIHICSEILAEETGTRPDLRDQPLPGVPAWYTDGSSFIMDGRRQAGAAIVDNKRTVWASNLPEGTSAQKAELIALTQALRLAEGKSINIYTDSRYAFATAHVHGAIYKQRGWLTSAGKDIKNKEEILALLEAIHLPKRVAIIHCPGHQRGTDPVATGNRKADEAAKQAAQSTRILTETTKNAGKRTADGSEFEKRTADGSEFESPKKKAKVE

SEQ ID NO: 1781 - protein, 2222 aa, synthetic construct
MPAAKRVKLDGGDKKYSIGLDIGTNSVGWAVITDEYKVPSKKFKVLGNTDRHSIKKNLIGALLFDSGETAEATRLKRTARRRYTRRKNRICYLQEIFSNEMAKVDDSFFHRLEESFLVEEDKKHERHPIFGNIVDEVAYHEKYPTIYHLRKKLVDSTDKADLRLIYLALAHMIKFRGHFLIEGDLNPDNSDVDKLFIQLVQTYNQLFEENPINASGVDAKAILSARLSKSRRLENLIAQLPGEKKNGLFGNLIALSLGLTPNFKSNFDLAEDAKLQLSKDTYDDDLDNLLAQIGDQYADLFLAAKNLSDAILLSDILRVNTEITKAPLSASMIKRYDEHHQDLTLLKALVRQQLPEKYKEIFFDQSKNGYAGYIDGGASQEEFYKFIKPILEKMDGTEELLVKLNREDLLRKQRTFDNGSIPHQIHLGELHAILRRQEDFYPFLKDNREKIEKILTFRIPYYVGPLARGNSRFAWMTRKSEETITPWNFEEVVDKGASAQSFIERMTNFDKNLPNEKVLPKHSLLYEYFTVYNELTKVKYVTEGMRKPAFLSGEQKKAIVDLLFKTNRKVTVKQLKEDYFKKIECFDSVEISGVEDRFNASLGTYHDLLKIIKDKDFLDNEENEDILEDIVLTLTLFEDREMIEERLKTYAHLFDDKVMKQLKRRRYTGWGRLSRKLINGIRDKQSGKTILDFLKSDGFANRNFMQLIHDDSLTFKEDIQKAQVSGQGDSLHEHIANLAGSPAIKKGILQTVKVVDELVKVMGRHKPENIVIEMARENQTTQKGQKNSRERMKRIEEGIKELGSQILKEHPVENTQLQNEKLYLYYLQNGRDMYVDQELDINRLSDYDVDHIVPQSFLKDDSIDNKVLTRSDKARGKSDNVPSEEVVKKMKNYWRQLLNAKLITQRKFDNLTKAERGGLSELDKAGFIKRQLVETRQITKHVAQILDSRMNTKYDENDKLIREVKVITLKSKLVSDFRKDFQFYKVREINNYHHAHDAYLNAVVGTALIKKYPKLESEFVYGDYKVYDVRKMIAKSEQEIGKATAKYFFYSNIMNFFKTEITLANGEIRKRPLIETNGETGEIVWDKGRDFATVRKVLSMPQVNIVKKTEVQTGGFSKESILPKRNSDKLIARKKDWDPKKYGGFDSPTVAYSVLVVAKVEKGKSKKLKSVKELLGITIMERSSFEKNPIDFLEAKGYKEVKKDLIIKLPKYSLFELENGRKRMLASAGELQKGNELALPSKYVNFLYLASHYEKLKGSPEDNEQKQLFVEQHKHYLDEIIEQISEFSKRVILADANLDKVLSAYNKHRDKPIREQAENIIHLFTLTNLGAPAAFKYFDTTIDRKRYTSTKEVLDATLIHQSITGLYETRIDLSQLGGDGGEAAAKGGGGSEAAAKGGTLGDQGSRGSDPLPEPRVTLTVEGIPTEFLVNTGAEHSVLTKPMGKMGSKRTVVAGATGSKVYPWTTKRLLKIGQKQVTHSFLVIPECPAPLLGRDLLTKLKAQIQFSTEGPQVTWEDRPAMCLVLNLEEEYRLHEKPVPPSIDPSWLQLFPMVWAEKAGMGLANQVPPVVVELKSDASPVAVRQYPMSKEAREGIRPHIQRFLDLGILVPCQSPWNTPLLPVKKPGTNDYRPVQDLREVNKRVQDIHPTVPNPYNLLSSLPPSHTWYSVLDLKDAFFCLKLHPNSQPLFAFEWRDPEKGNTGQLTWTRLPQGFKNSPTLFNEALHRDLASFRALNPQVVMLQYVDDLLVAAPTYRDCKEGTRRLLQELSKLGYRVSAKKAQLCREEVTYLGYLLKGGKRWLTPARKATVMKIPTPTTPRQVREFLGKAGFCRLFIPGFASLAAPLYPLTRPKVPFTWTEAHQEAFGRIKEALLSAPALALPDLTKPFALYVDEKEGVARGVLTQTLGPWRRPVAYLSKKLDPVASGWPTCLKAIAAVALLLKDADKLTLGQNVLVIAPHNLESIVRQPPDRWMTNARMTHYQSLLLNERVSFAPPAILNPATLLPVESDDTPIHICSEILAEETGTRPDLRDQPLPGVPAWYTDGSSFIMDGRRQAGAAIVDNKRTVWASNLPEGTSAQKAELIALTQALRLAEGKSINIYTDSRYAFATAHVHGAIYKQRGWLTSAGKDIKNKEEILALLEAIHLPKRVAIIHCPGHQRGTDPVATGNRKADEAAKQAAQSTRILTETTKNAGKRTADGSEFEKRTADGSEFESPKKKAKVE

SEQ ID NO: 1782 - protein, 2219 aa, synthetic construct
MPAAKRVKLDGGDKKYSIGLDIGTNSVGWAVITDEYKVPSKKFKVLGNTDRHSIKKNLIGALLFDSGETAEATRLKRTARRRYTRRKNRICYLQEIFSNEMAKVDDSFFHRLEESFLVEEDKKHERHPIFGNIVDEVAYHEKYPTIYHLRKKLVDSTDKADLRLIYLALAHMIKFRGHFLIEGDLNPDNSDVDKLFIQLVQTYNQLFEENPINASGVDAKAILSARLSKSRRLENLIAQLPGEKKNGLFGNLIALSLGLTPNFKSNFDLAEDAKLQLSKDTYDDDLDNLLAQIGDQYADLFLAAKNLSDAILLSDILRVNTEITKAPLSASMIKRYDEHHQDLTLLKALVRQQLPEKYKEIFFDQSKNGYAGYIDGGASQEEFYKFIKPILEKMDGTEELLVKLNREDLLRKQRTFDNGSIPHQIHLGELHAILRRQEDFYPFLKDNREKIEKILTFRIPYYVGPLARGNSRFAWMTRKSEETITPWNFEEVVDKGASAQSFIERMTNFDKNLPNEKVLPKHSLLYEYFTVYNELTKVKYVTEGMRKPAFLSGEQKKAIVDLLFKTNRKVTVKQLKEDYFKKIECFDSVEISGVEDRFNASLGTYHDLLKIIKDKDFLDNEENEDILEDIVLTLTLFEDREMIEERLKTYAHLFDDKVMKQLKRRRYTGWGRLSRKLINGIRDKQSGKTILDFLKSDGFANRNFMQLIHDDSLTFKEDIQKAQVSGQGDSLHEHIANLAGSPAIKKGILQTVKVVDELVKVMGRHKPENIVIEMARENQTTQKGQKNSRERMKRIEEGIKELGSQILKEHPVENTQLQNEKLYLYYLQNGRDMYVDQELDINRLSDYDVDHIVPQSFLKDDSIDNKVLTRSDKARGKSDNVPSEEVVKKMKNYWRQLLNAKLITQRKFDNLTKAERGGLSELDKAGFIKRQLVETRQITKHVAQILDSRMNTKYDENDKLIREVKVITLKSKLVSDFRKDFQFYKVREINNYHHAHDAYLNAVVGTALIKKYPKLESEFVYGDYKVYDVRKMIAKSEQEIGKATAKYFFYSNIMNFFKTEITLANGEIRKRPLIETNGETGEIVWDKGRDFATVRKVLSMPQVNIVKKTEVQTGGFSKESILPKRNSDKLIARKKDWDPKKYGGFDSPTVAYSVLVVAKVEKGKSKKLKSVKELLGITIMERSSFEKNPIDFLEAKGYKEVKKDLIIKLPKYSLFELENGRKRMLASAGELQKGNELALPSKYVNFLYLASHYEKLKGSPEDNEQKQLFVEQHKHYLDEIIEQISEFSKRVILADANLDKVLSAYNKHRDKPIREQAENIIHLFTLTNLGAPAAFKYFDTTIDRKRYTSTKEVLDATLIHQSITGLYETRIDLSQLGGDGGGSAGSAAGSGEFGGTLGDQGSRGSDPLPEPRVTLTVEGIPTEFLVNTGAEHSVLTKPMGKMGSKRTVVAGATGSKVYPWTTKRLLKIGQKQVTHSFLVIPECPAPLLGRDLLTKLKAQIQFSTEGPQVTWEDRPAMCLVLNLEEEYRLHEKPVPPSIDPSWLQLFPMVWAEKAGMGLANQVPPVVVELKSDASPVAVRQYPMSKEAREGIRPHIQRFLDLGILVPCQSPWNTPLLPVKKPGTNDYRPVQDLREVNKRVQDIHPTVPNPYNLLSSLPPSHTWYSVLDLKDAFFCLKLHPNSQPLFAFEWRDPEKGNTGQLTWTRLPQGFKNSPTLFNEALHRDLASFRALNPQVVMLQYVDDLLVAAPTYRDCKEGTRRLLQELSKLGYRVSAKKAQLCREEVTYLGYLLKGGKRWLTPARKATVMKIPTPTTPRQVREFLGKAGFCRLFIPGFASLAAPLYPLTRPKVPFTWTEAHQEAFGRIKEALLSAPALALPDLTKPFALYVDEKEGVARGVLTQTLGPWRRPVAYLSKKLDPVASGWPTCLKAIAAVALLLKDADKLTLGQNVLVIAPHNLESIVRQPPDRWMTNARMTHYQSLLLNERVSFAPPAILNPATLLPVESDDTPIHICSEILAEETGTRPDLRDQPLPGVPAWYTDGSSFIMDGRRQAGAAIVDNKRTVWASNLPEGTSAQKAELIALTQALRLAEGKSINIYTDSRYAFATAHVHGAIYKQRGWLTSAGKDIKNKEEILALLEAIHLPKRVAIIHCPGHQRGTDPVATGNRKADEAAKQAAQSTRILTETTKNAGKRTADGSEFEKRTADGSEFESPKKKAKVE

SEQ ID NO: 1783 - protein, 2218 aa, synthetic construct
MPAAKRVKLDGGDKKYSIGLDIGTNSVGWAVITDEYKVPSKKFKVLGNTDRHSIKKNLIGALLFDSGETAEATRLKRTARRRYTRRKNRICYLQEIFSNEMAKVDDSFFHRLEESFLVEEDKKHERHPIFGNIVDEVAYHEKYPTIYHLRKKLVDSTDKADLRLIYLALAHMIKFRGHFLIEGDLNPDNSDVDKLFIQLVQTYNQLFEENPINASGVDAKAILSARLSKSRRLENLIAQLPGEKKNGLFGNLIALSLGLTPNFKSNFDLAEDAKLQLSKDTYDDDLDNLLAQIGDQYADLFLAAKNLSDAILLSDILRVNTEITKAPLSASMIKRYDEHHQDLTLLKALVRQQLPEKYKEIFFDQSKNGYAGYIDGGASQEEFYKFIKPILEKMDGTEELLVKLNREDLLRKQRTFDNGSIPHQIHLGELHAILRRQEDFYPFLKDNREKIEKILTFRIPYYVGPLARGNSRFAWMTRKSEETITPWNFEEVVDKGASAQSFIERMTNFDKNLPNEKVLPKHSLLYEYFTVYNELTKVKYVTEGMRKPAFLSGEQKKAIVDLLFKTNRKVTVKQLKEDYFKKIECFDSVEISGVEDRFNASLGTYHDLLKIIKDKDFLDNEENEDILEDIVLTLTLFEDREMIEERLKTYAHLFDDKVMKQLKRRRYTGWGRLSRKLINGIRDKQSGKTILDFLKSDGFANRNFMQLIHDDSLTFKEDIQKAQVSGQGDSLHEHIANLAGSPAIKKGILQTVKVVDELVKVMGRHKPENIVIEMARENQTTQKGQKNSRERMKRIEEGIKELGSQILKEHPVENTQLQNEKLYLYYLQNGRDMYVDQELDINRLSDYDVDHIVPQSFLKDDSIDNKVLTRSDKARGKSDNVPSEEVVKKMKNYWRQLLNAKLITQRKFDNLTKAERGGLSELDKAGFIKRQLVETRQITKHVAQILDSRMNTKYDENDKLIREVKVITLKSKLVSDFRKDFQFYKVREINNYHHAHDAYLNAVVGTALIKKYPKLESEFVYGDYKVYDVRKMIAKSEQEIGKATAKYFFYSNIMNFFKTEITLANGEIRKRPLIETNGETGEIVWDKGRDFATVRKVLSMPQVNIVKKTEVQTGGFSKESILPKRNSDKLIARKKDWDPKKYGGFDSPTVAYSVLVVAKVEKGKSKKLKSVKELLGITIMERSSFEKNPIDFLEAKGYKEVKKDLIIKLPKYSLFELENGRKRMLASAGELQKGNELALPSKYVNFLYLASHYEKLKGSPEDNEQKQLFVEQHKHYLDEIIEQISEFSKRVILADANLDKVLSAYNKHRDKPIREQAENIIHLFTLTNLGAPAAFKYFDTTIDRKRYTSTKEVLDATLIHQSITGLYETRIDLSQLGGDGGPAPAPAPAPAPGGTLGDQGSRGSDPLPEPRVTLTVEGIPTEFLVNTGAEHSVLTKPMGKMGSKRTVVAGATGSKVYPWTTKRLLKIGQKQVTHSFLVIPECPAPLLGRDLLTKLKAQIQFSTEGPQVTWEDRPAMCLVLNLEEEYRLHEKPVPPSIDPSWLQLFPMVWAEKAGMGLANQVPPVVVELKSDASPVAVRQYPMSKEAREGIRPHIQRFLDLGILVPCQSPWNTPLLPVKKPGTNDYRPVQDLREVNKRVQDIHPTVPNPYNLLSSLPPSHTWYSVLDLKDAFFCLKLHPNSQPLFAFEWRDPEKGNTGQLTWTRLPQGFKNSPTLFNEALHRDLASFRALNPQVVMLQYVDDLLVAAPTYRDCKEGTRRLLQELSKLGYRVSAKKAQLCREEVTYLGYLLKGGKRWLTPARKATVMKIPTPTTPRQVREFLGKAGFCRLFIPGFASLAAPLYPLTRPKVPFTWTEAHQEAFGRIKEALLSAPALALPDLTKPFALYVDEKEGVARGVLTQTLGPWRRPVAYLSKKLDPVASGWPTCLKAIAAVALLLKDADKLTLGQNVLVIAPHNLESIVRQPPDRWMTNARMTHYQSLLLNERVSFAPPAILNPATLLPVESDDTPIHICSEILAEETGTRPDLRDQPLPGVPAWYTDGSSFIMDGRRQAGAAIVDNKRTVWASNLPEGTSAQKAELIALTQALRLAEGKSINIYTDSRYAFATAHVHGAIYKQRGWLTSAGKDIKNKEEILALLEAIHLPKRVAIIHCPGHQRGTDPVATGNRKADEAAKQAAQSTRILTETTKNAGKRTADGSEFEKRTADGSEFESPKKKAKVE

SEQ ID NO: 1784 - protein, 2253 aa, synthetic construct
MPAAKRVKLDGGDKKYSIGLDIGTNSVGWAVITDEYKVPSKKFKVLGNTDRHSIKKNLIGALLFDSGETAEATRLKRTARRRYTRRKNRICYLQEIFSNEMAKVDDSFFHRLEESFLVEEDKKHERHPIFGNIVDEVAYHEKYPTIYHLRKKLVDSTDKADLRLIYLALAHMIKFRGHFLIEGDLNPDNSDVDKLFIQLVQTYNQLFEENPINASGVDAKAILSARLSKSRRLENLIAQLPGEKKNGLFGNLIALSLGLTPNFKSNFDLAEDAKLQLSKDTYDDDLDNLLAQIGDQYADLFLAAKNLSDAILLSDILRVNTEITKAPLSASMIKRYDEHHQDLTLLKALVRQQLPEKYKEIFFDQSKNGYAGYIDGGASQEEFYKFIKPILEKMDGTEELLVKLNREDLLRKQRTFDNGSIPHQIHLGELHAILRRQEDFYPFLKDNREKIEKILTFRIPYYVGPLARGNSRFAWMTRKSEETITPWNFEEVVDKGASAQSFIERMTNFDKNLPNEKVLPKHSLLYEYFTVYNELTKVKYVTEGMRKPAFLSGEQKKAIVDLLFKTNRKVTVKQLKEDYFKKIECFDSVEISGVEDRFNASLGTYHDLLKIIKDKDFLDNEENEDILEDIVLTLTLFEDREMIEERLKTYAHLFDDKVMKQLKRRRYTGWGRLSRKLINGIRDKQSGKTILDFLKSDGFANRNFMQLIHDDSLTFKEDIQKAQVSGQGDSLHEHIANLAGSPAIKKGILQTVKVVDELVKVMGRHKPENIVIEMARENQTTQKGQKNSRERMKRIEEGIKELGSQILKEHPVENTQLQNEKLYLYYLQNGRDMYVDQELDINRLSDYDVDHIVPQSFLKDDSIDNKVLTRSDKARGKSDNVPSEEVVKKMKNYWRQLLNAKLITQRKFDNLTKAERGGLSELDKAGFIKRQLVETRQITKHVAQILDSRMNTKYDENDKLIREVKVITLKSKLVSDFRKDFQFYKVREINNYHHAHDAYLNAVVGTALIKKYPKLESEFVYGDYKVYDVRKMIAKSEQEIGKATAKYFFYSNIMNFFKTEITLANGEIRKRPLIETNGETGEIVWDKGRDFATVRKVLSMPQVNIVKKTEVQTGGFSKESILPKRNSDKLIARKKDWDPKKYGGFDSPTVAYSVLVVAKVEKGKSKKLKSVKELLGITIMERSSFEKNPIDFLEAKGYKEVKKDLIIKLPKYSLFELENGRKRMLASAGELQKGNELALPSKYVNFLYLASHYEKLKGSPEDNEQKQLFVEQHKHYLDEIIEQISEFSKRVILADANLDKVLSAYNKHRDKPIREQAENIIHLFTLTNLGAPAAFKYFDTTIDRKRYTSTKEVLDATLIHQSITGLYETRIDLSQLGGDGGAEAAAKEAAAKEAAAKEAAAKALEAEAAAKEAAAKEAAAKEAAAKAGGTLGDQGSRGSDPLPEPRVTLTVEGIPTEFLVNTGAEHSVLTKPMGKMGSKRTVVAGATGSKVYPWTTKRLLKIGQKQVTHSFLVIPECPAPLLGRDLLTKLKAQIQFSTEGPQVTWEDRPAMCLVLNLEEEYRLHEKPVPPSIDPSWLQLFPMVWAEKAGMGLANQVPPVVVELKSDASPVAVRQYPMSKEAREGIRPHIQRFLDLGILVPCQSPWNTPLLPVKKPGTNDYRPVQDLREVNKRVQDIHPTVPNPYNLLSSLPPSHTWYSVLDLKDAFFCLKLHPNSQPLFAFEWRDPEKGNTGQLTWTRLPQGFKNSPTLFNEALHRDLASFRALNPQVVMLQYVDDLLVAAPTYRDCKEGTRRLLQELSKLGYRVSAKKAQLCREEVTYLGYLLKGGKRWLTPARKATVMKIPTPTTPRQVREFLGKAGFCRLFIPGFASLAAPLYPLTRPKVPFTWTEAHQEAFGRIKEALLSAPALALPDLTKPFALYVDEKEGVARGVLTQTLGPWRRPVAYLSKKLDPVASGWPTCLKAIAAVALLLKDADKLTLGQNVLVIAPHNLESIVRQPPDRWMTNARMTHYQSLLLNERVSFAPPAILNPATLLPVESDDTPIHICSEILAEETGTRPDLRDQPLPGVPAWYTDGSSFIMDGRRQAGAAIVDNKRTVWASNLPEGTSAQKAELIALTQALRLAEGKSINIYTDSRYAFATAHVHGAIYKQRGWLTSAGKDIKNKEEILALLEAIHLPKRVAIIHCPGHQRGTDPVATGNRKADEAAKQAAQSTRILTETTKNAGKRTADGSEFEKRTADGSEFESPKKKAKVE

SEQ ID NO: 1785 - protein, 2216 aa, synthetic construct
MPAAKRVKLDGGDKKYSIGLDIGTNSVGWAVITDEYKVPSKKFKVLGNTDRHSIKKNLIGALLFDSGETAEATRLKRTARRRYTRRKNRICYLQEIFSNEMAKVDDSFFHRLEESFLVEEDKKHERHPIFGNIVDEVAYHEKYPTIYHLRKKLVDSTDKADLRLIYLALAHMIKFRGHFLIEGDLNPDNSDVDKLFIQLVQTYNQLFEENPINASGVDAKAILSARLSKSRRLENLIAQLPGEKKNGLFGNLIALSLGLTPNFKSNFDLAEDAKLQLSKDTYDDDLDNLLAQIGDQYADLFLAAKNLSDAILLSDILRVNTEITKAPLSASMIKRYDEHHQDLTLLKALVRQQLPEKYKEIFFDQSKNGYAGYIDGGASQEEFYKFIKPILEKMDGTEELLVKLNREDLLRKQRTFDNGSIPHQIHLGELHAILRRQEDFYPFLKDNREKIEKILTFRIPYYVGPLARGNSRFAWMTRKSEETITPWNFEEVVDKGASAQSFIERMTNFDKNLPNEKVLPKHSLLYEYFTVYNELTKVKYVTEGMRKPAFLSGEQKKAIVDLLFKTNRKVTVKQLKEDYFKKIECFDSVEISGVEDRFNASLGTYHDLLKIIKDKDFLDNEENEDILEDIVLTLTLFEDREMIEERLKTYAHLFDDKVMKQLKRRRYTGWGRLSRKLINGIRDKQSGKTILDFLKSDGFANRNFMQLIHDDSLTFKEDIQKAQVSGQGDSLHEHIANLAGSPAIKKGILQTVKVVDELVKVMGRHKPENIVIEMARENQTTQKGQKNSRERMKRIEEGIKELGSQILKEHPVENTQLQNEKLYLYYLQNGRDMYVDQELDINRLSDYDVDHIVPQSFLKDDSIDNKVLTRSDKARGKSDNVPSEEVVKKMKNYWRQLLNAKLITQRKFDNLTKAERGGLSELDKAGFIKRQLVETRQITKHVAQILDSRMNTKYDENDKLIREVKVITLKSKLVSDFRKDFQFYKVREINNYHHAHDAYLNAVVGTALIKKYPKLESEFVYGDYKVYDVRKMIAKSEQEIGKATAKYFFYSNIMNFFKTEITLANGEIRKRPLIETNGETGEIVWDKGRDFATVRKVLSMPQVNIVKKTEVQTGGFSKESILPKRNSDKLIARKKDWDPKKYGGFDSPTVAYSVLVVAKVEKGKSKKLKSVKELLGITIMERSSFEKNPIDFLEAKGYKEVKKDLIIKLPKYSLFELENGRKRMLASAGELQKGNELALPSKYVNFLYLASHYEKLKGSPEDNEQKQLFVEQHKHYLDEIIEQISEFSKRVILADANLDKVLSAYNKHRDKPIREQAENIIHLFTLTNLGAPAAFKYFDTTIDRKRYTSTKEVLDATLIHQSITGLYETRIDLSQLGGDGGGGSGSSGGGGGTLGDQGSRGSDPLPEPRVTLTVEGIPTEFLVNTGAEHSVLTKPMGKMGSKRTVVAGATGSKVYPWTTKRLLKIGQKQVTHSFLVIPECPAPLLGRDLLTKLKAQIQFSTEGPQVTWEDRPAMCLVLNLEEEYRLHEKPVPPSIDPSWLQLFPMVWAEKAGMGLANQVPPVVVELKSDASPVAVRQYPMSKEAREGIRPHIQRFLDLGILVPCQSPWNTPLLPVKKPGTNDYRPVQDLREVNKRVQDIHPTVPNPYNLLSSLPPSHTWYSVLDLKDAFFCLKLHPNSQPLFAFEWRDPEKGNTGQLTWTRLPQGFKNSPTLFNEALHRDLASFRALNPQVVMLQYVDDLLVAAPTYRDCKEGTRRLLQELSKLGYRVSAKKAQLCREEVTYLGYLLKGGKRWLTPARKATVMKIPTPTTPRQVREFLGKAGFCRLFIPGFASLAAPLYPLTRPKVPFTWTEAHQEAFGRIKEALLSAPALALPDLTKPFALYVDEKEGVARGVLTQTLGPWRRPVAYLSKKLDPVASGWPTCLKAIAAVALLLKDADKLTLGQNVLVIAPHNLESIVRQPPDRWMTNARMTHYQSLLLNERVSFAPPAILNPATLLPVESDDTPIHICSEILAEETGTRPDLRDQPLPGVPAWYTDGSSFIMDGRRQAGAAIVDNKRTVWASNLPEGTSAQKAELIALTQALRLAEGKSINIYTDSRYAFATAHVHGAIYKQRGWLTSAGKDIKNKEEILALLEAIHLPKRVAIIHCPGHQRGTDPVATGNRKADEAAKQAAQSTRILTETTKNAGKRTADGSEFEKRTADGSEFESPKKKAKVE

SEQ ID NO: 1786 - protein, 2218 aa, synthetic construct
MPAAKRVKLDGGDKKYSIGLDIGTNSVGWAVITDEYKVPSKKFKVLGNTDRHSIKKNLIGALLFDSGETAEATRLKRTARRRYTRRKNRICYLQEIFSNEMAKVDDSFFHRLEESFLVEEDKKHERHPIFGNIVDEVAYHEKYPTIYHLRKKLVDSTDKADLRLIYLALAHMIKFRGHFLIEGDLNPDNSDVDKLFIQLVQTYNQLFEENPINASGVDAKAILSARLSKSRRLENLIAQLPGEKKNGLFGNLIALSLGLTPNFKSNFDLAEDAKLQLSKDTYDDDLDNLLAQIGDQYADLFLAAKNLSDAILLSDILRVNTEITKAPLSASMIKRYDEHHQDLTLLKALVRQQLPEKYKEIFFDQSKNGYAGYIDGGASQEEFYKFIKPILEKMDGTEELLVKLNREDLLRKQRTFDNGSIPHQIHLGELHAILRRQEDFYPFLKDNREKIEKILTFRIPYYVGPLARGNSRFAWMTRKSEETITPWNFEEVVDKGASAQSFIERMTNFDKNLPNEKVLPKHSLLYEYFTVYNELTKVKYVTEGMRKPAFLSGEQKKAIVDLLFKTNRKVTVKQLKEDYFKKIECFDSVEISGVEDRFNASLGTYHDLLKIIKDKDFLDNEENEDILEDIVLTLTLFEDREMIEERLKTYAHLFDDKVMKQLKRRRYTGWGRLSRKLINGIRDKQSGKTILDFLKSDGFANRNFMQLIHDDSLTFKEDIQKAQVSGQGDSLHEHIANLAGSPAIKKGILQTVKVVDELVKVMGRHKPENIVIEMARENQTTQKGQKNSRERMKRIEEGIKELGSQILKEHPVENTQLQNEKLYLYYLQNGRDMYVDQELDINRLSDYDVDHIVPQSFLKDDSIDNKVLTRSDKARGKSDNVPSEEVVKKMKNYWRQLLNAKLITQRKFDNLTKAERGGLSELDKAGFIKRQLVETRQITKHVAQILDSRMNTKYDENDKLIREVKVITLKSKLVSDFRKDFQFYKVREINNYHHAHDAYLNAVVGTALIKKYPKLESEFVYGDYKVYDVRKMIAKSEQEIGKATAKYFFYSNIMNFFKTEITLANGEIRKRPLIETNGETGEIVWDKGRDFATVRKVLSMPQVNIVKKTEVQTGGFSKESILPKRNSDKLIARKKDWDPKKYGGFDSPTVAYSVLVVAKVEKGKSKKLKSVKELLGITIMERSSFEKNPIDFLEAKGYKEVKKDLIIKLPKYSLFELENGRKRMLASAGELQKGNELALPSKYVNFLYLASHYEKLKGSPEDNEQKQLFVEQHKHYLDEIIEQISEFSKRVILADANLDKVLSAYNKHRDKPIREQAENIIHLFTLTNLGAPAAFKYFDTTIDRKRYTSTKEVLDATLIHQSITGLYETRIDLSQLGGDGGEAAAKPAPGGSGGTLGDQGSRGSDPLPEPRVTLTVEGIPTEFLVNTGAEHSVLTKPMGKMGSKRTVVAGATGSKVYPWTTKRLLKIGQKQVTHSFLVIPECPAPLLGRDLLTKLKAQIQFSTEGPQVTWEDRPAMCLVLNLEEEYRLHEKPVPPSIDPSWLQLFPMVWAEKAGMGLANQVPPVVVELKSDASPVAVRQYPMSKEAREGIRPHIQRFLDLGILVPCQSPWNTPLLPVKKPGTNDYRPVQDLREVNKRVQDIHPTVPNPYNLLSSLPPSHTWYSVLDLKDAFFCLKLHPNSQPLFAFEWRDPEKGNTGQLTWTRLPQGFKNSPTLFNEALHRDLASFRALNPQVVMLQYVDDLLVAAPTYRDCKEGTRRLLQELSKLGYRVSAKKAQLCREEVTYLGYLLKGGKRWLTPARKATVMKIPTPTTPRQVREFLGKAGFCRLFIPGFASLAAPLYPLTRPKVPFTWTEAHQEAFGRIKEALLSAPALALPDLTKPFALYVDEKEGVARGVLTQTLGPWRRPVAYLSKKLDPVASGWPTCLKAIAAVALLLKDADKLTLGQNVLVIAPHNLESIVRQPPDRWMTNARMTHYQSLLLNERVSFAPPAILNPATLLPVESDDTPIHICSEILAEETGTRPDLRDQPLPGVPAWYTDGSSFIMDGRRQAGAAIVDNKRTVWASNLPEGTSAQKAELIALTQALRLAEGKSINIYTDSRYAFATAHVHGAIYKQRGWLTSAGKDIKNKEEILALLEAIHLPKRVAIIHCPGHQRGTDPVATGNRKADEAAKQAAQSTRILTETTKNAGKRTADGSEFEKRTADGSEFESPKKKAKVE

SEQ ID NO: 1787 - protein, 2218 aa, synthetic construct
MPAAKRVKLDGGDKKYSIGLDIGTNSVGWAVITDEYKVPSKKFKVLGNTDRHSIKKNLIGALLFDSGETAEATRLKRTARRRYTRRKNRICYLQEIFSNEMAKVDDSFFHRLEESFLVEEDKKHERHPIFGNIVDEVAYHEKYPTIYHLRKKLVDSTDKADLRLIYLALAHMIKFRGHFLIEGDLNPDNSDVDKLFIQLVQTYNQLFEENPINASGVDAKAILSARLSKSRRLENLIAQLPGEKKNGLFGNLIALSLGLTPNFKSNFDLAEDAKLQLSKDTYDDDLDNLLAQIGDQYADLFLAAKNLSDAILLSDILRVNTEITKAPLSASMIKRYDEHHQDLTLLKALVRQQLPEKYKEIFFDQSKNGYAGYIDGGASQEEFYKFIKPILEKMDGTEELLVKLNREDLLRKQRTFDNGSIPHQIHLGELHAILRRQEDFYPFLKDNREKIEKILTFRIPYYVGPLARGNSRFAWMTRKSEETITPWNFEEVVDKGASAQSFIERMTNFDKNLPNEKVLPKHSLLYEYFTVYNELTKVKYVTEGMRKPAFLSGEQKKAIVDLLFKTNRKVTVKQLKEDYFKKIECFDSVEISGVEDRFNASLGTYHDLLKIIKDKDFLDNEENEDILEDIVLTLTLFEDREMIEERLKTYAHLFDDKVMKQLKRRRYTGWGRLSRKLINGIRDKQSGKTILDFLKSDGFANRNFMQLIHDDSLTFKEDIQKAQVSGQGDSLHEHIANLAGSPAIKKGILQTVKVVDELVKVMGRHKPENIVIEMARENQTTQKGQKNSRERMKRIEEGIKELGSQILKEHPVENTQLQNEKLYLYYLQNGRDMYVDQELDINRLSDYDVDHIVPQSFLKDDSIDNKVLTRSDKARGKSDNVPSEEVVKKMKNYWRQLLNAKLITQRKFDNLTKAERGGLSELDKAGFIKRQLVETRQITKHVAQILDSRMNTKYDENDKLIREVKVITLKSKLVSDFRKDFQFYKVREINNYHHAHDAYLNAVVGTALIKKYPKLESEFVYGDYKVYDVRKMIAKSEQEIGKATAKYFFYSNIMNFFKTEITLANGEIRKRPLIETNGETGEIVWDKGRDFATVRKVLSMPQVNIVKKTEVQTGGFSKESILPKRNSDKLIARKKDWDPKKYGGFDSPTVAYSVLVVAKVEKGKSKKLKSVKELLGITIMERSSFEKNPIDFLEAKGYKEVKKDLIIKLPKYSLFELENGRKRMLASAGELQKGNELALPSKYVNFLYLASHYEKLKGSPEDNEQKQLFVEQHKHYLDEIIEQISEFSKRVILADANLDKVLSAYNKHRDKPIREQAENIIHLFTLTNLGAPAAFKYFDTTIDRKRYTSTKEVLDATLIHQSITGLYETRIDLSQLGGDGGGGSPAPEAAAKGGTLGDQGSRGSDPLPEPRVTLTVEGIPTEFLVNTGAEHSVLTKPMGKMGSKRTVVAGATGSKVYPWTTKRLLKIGQKQVTHSFLVIPECPAPLLGRDLLTKLKAQIQFSTEGPQVTWEDRPAMCLVLNLEEEYRLHEKPVPPSIDPSWLQLFPMVWAEKAGMGLANQVPPVVVELKSDASPVAVRQYPMSKEAREGIRPHIQRFLDLGILVPCQSPWNTPLLPVKKPGTNDYRPVQDLREVNKRVQDIHPTVPNPYNLLSSLPPSHTWYSVLDLKDAFFCLKLHPNSQPLFAFEWRDPEKGNTGQLTWTRLPQGFKNSPTLFNEALHRDLASFRALNPQVVMLQYVDDLLVAAPTYRDCKEGTRRLLQELSKLGYRVSAKKAQLCREEVTYLGYLLKGGKRWLTPARKATVMKIPTPTTPRQVREFLGKAGFCRLFIPGFASLAAPLYPLTRPKVPFTWTEAHQEAFGRIKEALLSAPALALPDLTKPFALYVDEKEGVARGVLTQTLGPWRRPVAYLSKKLDPVASGWPTCLKAIAAVALLLKDADKLTLGQNVLVIAPHNLESIVRQPPDRWMTNARMTHYQSLLLNERVSFAPPAILNPATLLPVESDDTPIHICSEILAEETGTRPDLRDQPLPGVPAWYTDGSSFIMDGRRQAGAAIVDNKRTVWASNLPEGTSAQKAELIALTQALRLAEGKSINIYTDSRYAFATAHVHGAIYKQRGWLTSAGKDIKNKEEILALLEAIHLPKRVAIIHCPGHQRGTDPVATGNRKADEAAKQAAQSTRILTETTKNAGKRTADGSEFEKRTADGSEFESPKKKAKVE

SEQ ID NO: 1788 - protein, 2212 aa, synthetic construct
MPAAKRVKLDGGDKKYSIGLDIGTNSVGWAVITDEYKVPSKKFKVLGNTDRHSIKKNLIGALLFDSGETAEATRLKRTARRRYTRRKNRICYLQEIFSNEMAKVDDSFFHRLEESFLVEEDKKHERHPIFGNIVDEVAYHEKYPTIYHLRKKLVDSTDKADLRLIYLALAHMIKFRGHFLIEGDLNPDNSDVDKLFIQLVQTYNQLFEENPINASGVDAKAILSARLSKSRRLENLIAQLPGEKKNGLFGNLIALSLGLTPNFKSNFDLAEDAKLQLSKDTYDDDLDNLLAQIGDQYADLFLAAKNLSDAILLSDILRVNTEITKAPLSASMIKRYDEHHQDLTLLKALVRQQLPEKYKEIFFDQSKNGYAGYIDGGASQEEFYKFIKPILEKMDGTEELLVKLNREDLLRKQRTFDNGSIPHQIHLGELHAILRRQEDFYPFLKDNREKIEKILTFRIPYYVGPLARGNSRFAWMTRKSEETITPWNFEEVVDKGASAQSFIERMTNFDKNLPNEKVLPKHSLLYEYFTVYNELTKVKYVTEGMRKPAFLSGEQKKAIVDLLFKTNRKVTVKQLKEDYFKKIECFDSVEISGVEDRFNASLGTYHDLLKIIKDKDFLDNEENEDILEDIVLTLTLFEDREMIEERLKTYAHLFDDKVMKQLKRRRYTGWGRLSRKLINGIRDKQSGKTILDFLKSDGFANRNFMQLIHDDSLTFKEDIQKAQVSGQGDSLHEHIANLAGSPAIKKGILQTVKVVDELVKVMGRHKPENIVIEMARENQTTQKGQKNSRERMKRIEEGIKELGSQILKEHPVENTQLQNEKLYLYYLQNGRDMYVDQELDINRLSDYDVDHIVPQSFLKDDSIDNKVLTRSDKARGKSDNVPSEEVVKKMKNYWRQLLNAKLITQRKFDNLTKAERGGLSELDKAGFIKRQLVETRQITKHVAQILDSRMNTKYDENDKLIREVKVITLKSKLVSDFRKDFQFYKVREINNYHHAHDAYLNAVVGTALIKKYPKLESEFVYGDYKVYDVRKMIAKSEQEIGKATAKYFFYSNIMNFFKTEITLANGEIRKRPLIETNGETGEIVWDKGRDFATVRKVLSMPQVNIVKKTEVQTGGFSKESILPKRNSDKLIARKKDWDPKKYGGFDSPTVAYSVLVVAKVEKGKSKKLKSVKELLGITIMERSSFEKNPIDFLEAKGYKEVKKDLIIKLPKYSLFELENGRKRMLASAGELQKGNELALPSKYVNFLYLASHYEKLKGSPEDNEQKQLFVEQHKHYLDEIIEQISEFSKRVILADANLDKVLSAYNKHRDKPIREQAENIIHLFTLTNLGAPAAFKYFDTTIDRKRYTSTKEVLDATLIHQSITGLYETRIDLSQLGGDGGGGGGSGGTLGDQGSRGSDPLPEPRVTLTVEGIPTEFLVNTGAEHSVLTKPMGKMGSKRTVVAGATGSKVYPWTTKRLLKIGQKQVTHSFLVIPECPAPLLGRDLLTKLKAQIQFSTEGPQVTWEDRPAMCLVLNLEEEYRLHEKPVPPSIDPSWLQLFPMVWAEKAGMGLANQVPPVVVELKSDASPVAVRQYPMSKEAREGIRPHIQRFLDLGILVPCQSPWNTPLLPVKKPGTNDYRPVQDLREVNKRVQDIHPTVPNPYNLLSSLPPSHTWYSVLDLKDAFFCLKLHPNSQPLFAFEWRDPEKGNTGQLTWTRLPQGFKNSPTLFNEALHRDLASFRALNPQVVMLQYVDDLLVAAPTYRDCKEGTRRLLQELSKLGYRVSAKKAQLCREEVTYLGYLLKGGKRWLTPARKATVMKIPTPTTPRQVREFLGKAGFCRLFIPGFASLAAPLYPLTRPKVPFTWTEAHQEAFGRIKEALLSAPALALPDLTKPFALYVDEKEGVARGVLTQTLGPWRRPVAYLSKKLDPVASGWPTCLKAIAAVALLLKDADKLTLGQNVLVIAPHNLESIVRQPPDRWMTNARMTHYQSLLLNERVSFAPPAILNPATLLPVESDDTPIHICSEILAEETGTRPDLRDQPLPGVPAWYTDGSSFIMDGRRQAGAAIVDNKRTVWASNLPEGTSAQKAELIALTQALRLAEGKSINIYTDSRYAFATAHVHGAIYKQRGWLTSAGKDIKNKEEILALLEAIHLPKRVAIIHCPGHQRGTDPVATGNRKADEAAKQAAQSTRILTETTKNAGKRTADGSEFEKRTADGSEFESPKKKAKVE

SEQ ID NO: 1789 - protein, 2218 aa, synthetic construct
MPAAKRVKLDGGDKKYSIGLDIGTNSVGWAVITDEYKVPSKKFKVLGNTDRHSIKKNLIGALLFDSGETAEATRLKRTARRRYTRRKNRICYLQEIFSNEMAKVDDSFFHRLEESFLVEEDKKHERHPIFGNIVDEVAYHEKYPTIYHLRKKLVDSTDKADLRLIYLALAHMIKFRGHFLIEGDLNPDNSDVDKLFIQLVQTYNQLFEENPINASGVDAKAILSARLSKSRRLENLIAQLPGEKKNGLFGNLIALSLGLTPNFKSNFDLAEDAKLQLSKDTYDDDLDNLLAQIGDQYADLFLAAKNLSDAILLSDILRVNTEITKAPLSASMIKRYDEHHQDLTLLKALVRQQLPEKYKEIFFDQSKNGYAGYIDGGASQEEFYKFIKPILEKMDGTEELLVKLNREDLLRKQRTFDNGSIPHQIHLGELHAILRRQEDFYPFLKDNREKIEKILTFRIPYYVGPLARGNSRFAWMTRKSEETITPWNFEEVVDKGASAQSFIERMTNFDKNLPNEKVLPKHSLLYEYFTVYNELTKVKYVTEGMRKPAFLSGEQKKAIVDLLFKTNRKVTVKQLKEDYFKKIECFDSVEISGVEDRFNASLGTYHDLLKIIKDKDFLDNEENEDILEDIVLTLTLFEDREMIEERLKTYAHLFDDKVMKQLKRRRYTGWGRLSRKLINGIRDKQSGKTILDFLKSDGFANRNFMQLIHDDSLTFKEDIQKAQVSGQGDSLHEHIANLAGSPAIKKGILQTVKVVDELVKVMGRHKPENIVIEMARENQTTQKGQKNSRERMKRIEEGIKELGSQILKEHPVENTQLQNEKLYLYYLQNGRDMYVDQELDINRLSDYDVDHIVPQSFLKDDSIDNKVLTRSDKARGKSDNVPSEEVVKKMKNYWRQLLNAKLITQRKFDNLTKAERGGLSELDKAGFIKRQLVETRQITKHVAQILDSRMNTKYDENDKLIREVKVITLKSKLVSDFRKDFQFYKVREINNYHHAHDAYLNAVVGTALIKKYPKLESEFVYGDYKVYDVRKMIAKSEQEIGKATAKYFFYSNIMNFFKTEITLANGEIRKRPLIETNGETGEIVWDKGRDFATVRKVLSMPQVNIVKKTEVQTGGFSKESILPKRNSDKLIARKKDWDPKKYGGFDSPTVAYSVLVVAKVEKGKSKKLKSVKELLGITIMERSSFEKNPIDFLEAKGYKEVKKDLIIKLPKYSLFELENGRKRMLASAGELQKGNELALPSKYVNFLYLASHYEKLKGSPEDNEQKQLFVEQHKHYLDEIIEQISEFSKRVILADANLDKVLSAYNKHRDKPIREQAENIIHLFTLTNLGAPAAFKYFDTTIDRKRYTSTKEVLDATLIHQSITGLYETRIDLSQLGGDGGGGGEAAAKPAPGGTLGDQGSRGSDPLPEPRVTLTVEGIPTEFLVNTGAEHSVLTKPMGKMGSKRTVVAGATGSKVYPWTTKRLLKIGQKQVTHSFLVIPECPAPLLGRDLLTKLKAQIQFSTEGPQVTWEDRPAMCLVLNLEEEYRLHEKPVPPSIDPSWLQLFPMVWAEKAGMGLANQVPPVVVELKSDASPVAVRQYPMSKEAREGIRPHIQRFLDLGILVPCQSPWNTPLLPVKKPGTNDYRPVQDLREVNKRVQDIHPTVPNPYNLLSSLPPSHTWYSVLDLKDAFFCLKLHPNSQPLFAFEWRDPEKGNTGQLTWTRLPQGFKNSPTLFNEALHRDLASFRALNPQVVMLQYVDDLLVAAPTYRDCKEGTRRLLQELSKLGYRVSAKKAQLCREEVTYLGYLLKGGKRWLTPARKATVMKIPTPTTPRQVREFLGKAGFCRLFIPGFASLAAPLYPLTRPKVPFTWTEAHQEAFGRIKEALLSAPALALPDLTKPFALYVDEKEGVARGVLTQTLGPWRRPVAYLSKKLDPVASGWPTCLKAIAAVALLLKDADKLTLGQNVLVIAPHNLESIVRQPPDRWMTNARMTHYQSLLLNERVSFAPPAILNPATLLPVESDDTPIHICSEILAEETGTRPDLRDQPLPGVPAWYTDGSSFIMDGRRQAGAAIVDNKRTVWASNLPEGTSAQKAELIALTQALRLAEGKSINIYTDSRYAFATAHVHGAIYKQRGWLTSAGKDIKNKEEILALLEAIHLPKRVAIIHCPGHQRGTDPVATGNRKADEAAKQAAQSTRILTETTKNAGKRTADGSEFEKRTADGSEFESPKKKAKVE

SEQ ID NO: 1790 - protein, 2214 aa, synthetic construct
MPAAKRVKLDGGDKKYSIGLDIGTNSVGWAVITDEYKVPSKKFKVLGNTDRHSIKKNLIGALLFDSGETAEATRLKRTARRRYTRRKNRICYLQEIFSNEMAKVDDSFFHRLEESFLVEEDKKHERHPIFGNIVDEVAYHEKYPTIYHLRKKLVDSTDKADLRLIYLALAHMIKFRGHFLIEGDLNPDNSDVDKLFIQLVQTYNQLFEENPINASGVDAKAILSARLSKSRRLENLIAQLPGEKKNGLFGNLIALSLGLTPNFKSNFDLAEDAKLQLSKDTYDDDLDNLLAQIGDQYADLFLAAKNLSDAILLSDILRVNTEITKAPLSASMIKRYDEHHQDLTLLKALVRQQLPEKYKEIFFDQSKNGYAGYIDGGASQEEFYKFIKPILEKMDGTEELLVKLNREDLLRKQRTFDNGSIPHQIHLGELHAILRRQEDFYPFLKDNREKIEKILTFRIPYYVGPLARGNSRFAWMTRKSEETITPWNFEEVVDKGASAQSFIERMTNFDKNLPNEKVLPKHSLLYEYFTVYNELTKVKYVTEGMRKPAFLSGEQKKAIVDLLFKTNRKVTVKQLKEDYFKKIECFDSVEISGVEDRFNASLGTYHDLLKIIKDKDFLDNEENEDILEDIVLTLTLFEDREMIEERLKTYAHLFDDKVMKQLKRRRYTGWGRLSRKLINGIRDKQSGKTILDFLKSDGFANRNFMQLIHDDSLTFKEDIQKAQVSGQGDSLHEHIANLAGSPAIKKGILQTVKVVDELVKVMGRHKPENIVIEMARENQTTQKGQKNSRERMKRIEEGIKELGSQILKEHPVENTQLQNEKLYLYYLQNGRDMYVDQELDINRLSDYDVDHIVPQSFLKDDSIDNKVLTRSDKARGKSDNVPSEEVVKKMKNYWRQLLNAKLITQRKFDNLTKAERGGLSELDKAGFIKRQLVETRQITKHVAQILDSRMNTKYDENDKLIREVKVITLKSKLVSDFRKDFQFYKVREINNYHHAHDAYLNAVVGTALIKKYPKLESEFVYGDYKVYDVRKMIAKSEQEIGKATAKYFFYSNIMNFFKTEITLANGEIRKRPLIETNGETGEIVWDKGRDFATVRKVLSMPQVNIVKKTEVQTGGFSKESILPKRNSDKLIARKKDWDPKKYGGFDSPTVAYSVLVVAKVEKGKSKKLKSVKELLGITIMERSSFEKNPIDFLEAKGYKEVKKDLIIKLPKYSLFELENGRKRMLASAGELQKGNELALPSKYVNFLYLASHYEKLKGSPEDNEQKQLFVEQHKHYLDEIIEQISEFSKRVILADANLDKVLSAYNKHRDKPIREQAENIIHLFTLTNLGAPAAFKYFDTTIDRKRYTSTKEVLDATLIHQSITGLYETRIDLSQLGGDGGGGGGGGGGGTLGDQGSRGSDPLPEPRVTLTVEGIPTEFLVNTGAEHSVLTKPMGKMGSKRTVVAGATGSKVYPWTTKRLLKIGQKQVTHSFLVIPECPAPLLGRDLLTKLKAQIQFSTEGPQVTWEDRPAMCLVLNLEEEYRLHEKPVPPSIDPSWLQLFPMVWAEKAGMGLANQVPPVVVELKSDASPVAVRQYPMSKEAREGIRPHIQRFLDLGILVPCQSPWNTPLLPVKKPGTNDYRPVQDLREVNKRVQDIHPTVPNPYNLLSSLPPSHTWYSVLDLKDAFFCLKLHPNSQPLFAFEWRDPEKGNTGQLTWTRLPQGFKNSPTLFNEALHRDLASFRALNPQVVMLQYVDDLLVAAPTYRDCKEGTRRLLQELSKLGYRVSAKKAQLCREEVTYLGYLLKGGKRWLTPARKATVMKIPTPTTPRQVREFLGKAGFCRLFIPGFASLAAPLYPLTRPKVPFTWTEAHQEAFGRIKEALLSAPALALPDLTKPFALYVDEKEGVARGVLTQTLGPWRRPVAYLSKKLDPVASGWPTCLKAIAAVALLLKDADKLTLGQNVLVIAPHNLESIVRQPPDRWMTNARMTHYQSLLLNERVSFAPPAILNPATLLPVESDDTPIHICSEILAEETGTRPDLRDQPLPGVPAWYTDGSSFIMDGRRQAGAAIVDNKRTVWASNLPEGTSAQKAELIALTQALRLAEGKSINIYTDSRYAFATAHVHGAIYKQRGWLTSAGKDIKNKEEILALLEAIHLPKRVAIIHCPGHQRGTDPVATGNRKADEAAKQAAQSTRILTETTKNAGKRTADGSEFEKRTADGSEFESPKKKAKVE

SEQ ID NO: 1791 - protein, 2210 aa, synthetic construct
MPAAKRVKLDGGDKKYSIGLDIGTNSVGWAVITDEYKVPSKKFKVLGNTDRHSIKKNLIGALLFDSGETAEATRLKRTARRRYTRRKNRICYLQEIFSNEMAKVDDSFFHRLEESFLVEEDKKHERHPIFGNIVDEVAYHEKYPTIYHLRKKLVDSTDKADLRLIYLALAHMIKFRGHFLIEGDLNPDNSDVDKLFIQLVQTYNQLFEENPINASGVDAKAILSARLSKSRRLENLIAQLPGEKKNGLFGNLIALSLGLTPNFKSNFDLAEDAKLQLSKDTYDDDLDNLLAQIGDQYADLFLAAKNLSDAILLSDILRVNTEITKAPLSASMIKRYDEHHQDLTLLKALVRQQLPEKYKEIFFDQSKNGYAGYIDGGASQEEFYKFIKPILEKMDGTEELLVKLNREDLLRKQRTFDNGSIPHQIHLGELHAILRRQEDFYPFLKDNREKIEKILTFRIPYYVGPLARGNSRFAWMTRKSEETITPWNFEEVVDKGASAQSFIERMTNFDKNLPNEKVLPKHSLLYEYFTVYNELTKVKYVTEGMRKPAFLSGEQKKAIVDLLFKTNRKVTVKQLKEDYFKKIECFDSVEISGVEDRFNASLGTYHDLLKIIKDKDFLDNEENEDILEDIVLTLTLFEDREMIEERLKTYAHLFDDKVMKQLKRRRYTGWGRLSRKLINGIRDKQSGKTILDFLKSDGFANRNFMQLIHDDSLTFKEDIQKAQVSGQGDSLHEHIANLAGSPAIKKGILQTVKVVDELVKVMGRHKPENIVIEMARENQTTQKGQKNSRERMKRIEEGIKELGSQILKEHPVENTQLQNEKLYLYYLQNGRDMYVDQELDINRLSDYDVDHIVPQSFLKDDSIDNKVLTRSDKARGKSDNVPSEEVVKKMKNYWRQLLNAKLITQRKFDNLTKAERGGLSELDKAGFIKRQLVETRQITKHVAQILDSRMNTKYDENDKLIREVKVITLKSKLVSDFRKDFQFYKVREINNYHHAHDAYLNAVVGTALIKKYPKLESEFVYGDYKVYDVRKMIAKSEQEIGKATAKYFFYSNIMNFFKTEITLANGEIRKRPLIETNGETGEIVWDKGRDFATVRKVLSMPQVNIVKKTEVQTGGFSKESILPKRNSDKLIARKKDWDPKKYGGFDSPTVAYSVLVVAKVEKGKSKKLKSVKELLGITIMERSSFEKNPIDFLEAKGYKEVKKDLIIKLPKYSLFELENGRKRMLASAGELQKGNELALPSKYVNFLYLASHYEKLKGSPEDNEQKQLFVEQHKHYLDEIIEQISEFSKRVILADANLDKVLSAYNKHRDKPIREQAENIIHLFTLTNLGAPAAFKYFDTTIDRKRYTSTKEVLDATLIHQSITGLYETRIDLSQLGGDGGGGSGGTLGDQGSRGSDPLPEPRVTLTVEGIPTEFLVNTGAEHSVLTKPMGKMGSKRTVVAGATGSKVYPWTTKRLLKIGQKQVTHSFLVIPECPAPLLGRDLLTKLKAQIQFSTEGPQVTWEDRPAMCLVLNLEEEYRLHEKPVPPSIDPSWLQLFPMVWAEKAGMGLANQVPPVVVELKSDASPVAVRQYPMSKEAREGIRPHIQRFLDLGILVPCQSPWNTPLLPVKKPGTNDYRPVQDLREVNKRVQDIHPTVPNPYNLLSSLPPSHTWYSVLDLKDAFFCLKLHPNSQPLFAFEWRDPEKGNTGQLTWTRLPQGFKNSPTLFNEALHRDLASFRALNPQVVMLQYVDDLLVAAPTYRDCKEGTRRLLQELSKLGYRVSAKKAQLCREEVTYLGYLLKGGKRWLTPARKATVMKIPTPTTPRQVREFLGKAGFCRLFIPGFASLAAPLYPLTRPKVPFTWTEAHQEAFGRIKEALLSAPALALPDLTKPFALYVDEKEGVARGVLTQTLGPWRRPVAYLSKKLDPVASGWPTCLKAIAAVALLLKDADKLTLGQNVLVIAPHNLESIVRQPPDRWMTNARMTHYQSLLLNERVSFAPPAILNPATLLPVESDDTPIHICSEILAEETGTRPDLRDQPLPGVPAWYTDGSSFIMDGRRQAGAAIVDNKRTVWASNLPEGTSAQKAELIALTQALRLAEGKSINIYTDSRYAFATAHVHGAIYKQRGWLTSAGKDIKNKEEILALLEAIHLPKRVAIIHCPGHQRGTDPVATGNRKADEAAKQAAQSTRILTETTKNAGKRTADGSEFEKRTADGSEFESPKKKAKVE

SEQ ID NO: 1792 - protein, 2216 aa, synthetic construct
MPAAKRVKLDGGDKKYSIGLDIGTNSVGWAVITDEYKVPSKKFKVLGNTDRHSIKKNLIGALLFDSGETAEATRLKRTARRRYTRRKNRICYLQEIFSNEMAKVDDSFFHRLEESFLVEEDKKHERHPIFGNIVDEVAYHEKYPTIYHLRKKLVDSTDKADLRLIYLALAHMIKFRGHFLIEGDLNPDNSDVDKLFIQLVQTYNQLFEENPINASGVDAKAILSARLSKSRRLENLIAQLPGEKKNGLFGNLIALSLGLTPNFKSNFDLAEDAKLQLSKDTYDDDLDNLLAQIGDQYADLFLAAKNLSDAILLSDILRVNTEITKAPLSASMIKRYDEHHQDLTLLKALVRQQLPEKYKEIFFDQSKNGYAGYIDGGASQEEFYKFIKPILEKMDGTEELLVKLNREDLLRKQRTFDNGSIPHQIHLGELHAILRRQEDFYPFLKDNREKIEKILTFRIPYYVGPLARGNSRFAWMTRKSEETITPWNFEEVVDKGASAQSFIERMTNFDKNLPNEKVLPKHSLLYEYFTVYNELTKVKYVTEGMRKPAFLSGEQKKAIVDLLFKTNRKVTVKQLKEDYFKKIECFDSVEISGVEDRFNASLGTYHDLLKIIKDKDFLDNEENEDILEDIVLTLTLFEDREMIEERLKTYAHLFDDKVMKQLKRRRYTGWGRLSRKLINGIRDKQSGKTILDFLKSDGFANRNFMQLIHDDSLTFKEDIQKAQVSGQGDSLHEHIANLAGSPAIKKGILQTVKVVDELVKVMGRHKPENIVIEMARENQTTQKGQKNSRERMKRIEEGIKELGSQILKEHPVENTQLQNEKLYLYYLQNGRDMYVDQELDINRLSDYDVDHIVPQSFLKDDSIDNKVLTRSDKARGKSDNVPSEEVVKKMKNYWRQLLNAKLITQRKFDNLTKAERGGLSELDKAGFIKRQLVETRQITKHVAQILDSRMNTKYDENDKLIREVKVITLKSKLVSDFRKDFQFYKVREINNYHHAHDAYLNAVVGTALIKKYPKLESEFVYGDYKVYDVRKMIAKSEQEIGKATAKYFFYSNIMNFFKTEITLANGEIRKRPLIETNGETGEIVWDKGRDFATVRKVLSMPQVNIVKKTEVQTGGFSKESILPKRNSDKLIARKKDWDPKKYGGFDSPTVAYSVLVVAKVEKGKSKKLKSVKELLGITIMERSSFEKNPIDFLEAKGYKEVKKDLIIKLPKYSLFELENGRKRMLASAGELQKGNELALPSKYVNFLYLASHYEKLKGSPEDNEQKQLFVEQHKHYLDEIIEQISEFSKRVILADANLDKVLSAYNKHRDKPIREQAENIIHLFTLTNLGAPAAFKYFDTTIDRKRYTSTKEVLDATLIHQSITGLYETRIDLSQLGGDGGPAPGGSGGGGGTLGDQGSRGSDPLPEPRVTLTVEGIPTEFLVNTGAEHSVLTKPMGKMGSKRTVVAGATGSKVYPWTTKRLLKIGQKQVTHSFLVIPECPAPLLGRDLLTKLKAQIQFSTEGPQVTWEDRPAMCLVLNLEEEYRLHEKPVPPSIDPSWLQLFPMVWAEKAGMGLANQVPPVVVELKSDASPVAVRQYPMSKEAREGIRPHIQRFLDLGILVPCQSPWNTPLLPVKKPGTNDYRPVQDLREVNKRVQDIHPTVPNPYNLLSSLPPSHTWYSVLDLKDAFFCLKLHPNSQPLFAFEWRDPEKGNTGQLTWTRLPQGFKNSPTLFNEALHRDLASFRALNPQVVMLQYVDDLLVAAPTYRDCKEGTRRLLQELSKLGYRVSAKKAQLCREEVTYLGYLLKGGKRWLTPARKATVMKIPTPTTPRQVREFLGKAGFCRLFIPGFASLAAPLYPLTRPKVPFTWTEAHQEAFGRIKEALLSAPALALPDLTKPFALYVDEKEGVARGVLTQTLGPWRRPVAYLSKKLDPVASGWPTCLKAIAAVALLLKDADKLTLGQNVLVIAPHNLESIVRQPPDRWMTNARMTHYQSLLLNERVSFAPPAILNPATLLPVESDDTPIHICSEILAEETGTRPDLRDQPLPGVPAWYTDGSSFIMDGRRQAGAAIVDNKRTVWASNLPEGTSAQKAELIALTQALRLAEGKSINIYTDSRYAFATAHVHGAIYKQRGWLTSAGKDIKNKEEILALLEAIHLPKRVAIIHCPGHQRGTDPVATGNRKADEAAKQAAQSTRILTETTKNAGKRTADGSEFEKRTADGSEFESPKKKAKVE

SEQ ID NO: 1793 - protein, 2220 aa, synthetic construct
MPAAKRVKLDGGDKKYSIGLDIGTNSVGWAVITDEYKVPSKKFKVLGNTDRHSIKKNLIGALLFDSGETAEATRLKRTARRRYTRRKNRICYLQEIFSNEMAKVDDSFFHRLEESFLVEEDKKHERHPIFGNIVDEVAYHEKYPTIYHLRKKLVDSTDKADLRLIYLALAHMIKFRGHFLIEGDLNPDNSDVDKLFIQLVQTYNQLFEENPINASGVDAKAILSARLSKSRRLENLIAQLPGEKKNGLFGNLIALSLGLTPNFKSNFDLAEDAKLQLSKDTYDDDLDNLLAQIGDQYADLFLAAKNLSDAILLSDILRVNTEITKAPLSASMIKRYDEHHQDLTLLKALVRQQLPEKYKEIFFDQSKNGYAGYIDGGASQEEFYKFIKPILEKMDGTEELLVKLNREDLLRKQRTFDNGSIPHQIHLGELHAILRRQEDFYPFLKDNREKIEKILTFRIPYYVGPLARGNSRFAWMTRKSEETITPWNFEEVVDKGASAQSFIERMTNFDKNLPNEKVLPKHSLLYEYFTVYNELTKVKYVTEGMRKPAFLSGEQKKAIVDLLFKTNRKVTVKQLKEDYFKKIECFDSVEISGVEDRFNASLGTYHDLLKIIKDKDFLDNEENEDILEDIVLTLTLFEDREMIEERLKTYAHLFDDKVMKQLKRRRYTGWGRLSRKLINGIRDKQSGKTILDFLKSDGFANRNFMQLIHDDSLTFKEDIQKAQVSGQGDSLHEHIANLAGSPAIKKGILQTVKVVDELVKVMGRHKPENIVIEMARENQTTQKGQKNSRERMKRIEEGIKELGSQILKEHPVENTQLQNEKLYLYYLQNGRDMYVDQELDINRLSDYDVDHIVPQSFLKDDSIDNKVLTRSDKARGKSDNVPSEEVVKKMKNYWRQLLNAKLITQRKFDNLTKAERGGLSELDKAGFIKRQLVETRQITKHVAQILDSRMNTKYDENDKLIREVKVITLKSKLVSDFRKDFQFYKVREINNYHHAHDAYLNAVVGTALIKKYPKLESEFVYGDYKVYDVRKMIAKSEQEIGKATAKYFFYSNIMNFFKTEITLANGEIRKRPLIETNGETGEIVWDKGRDFATVRKVLSMPQVNIVKKTEVQTGGFSKESILPKRNSDKLIARKKDWDPKKYGGFDSPTVAYSVLVVAKVEKGKSKKLKSVKELLGITIMERSSFEKNPIDFLEAKGYKEVKKDLIIKLPKYSLFELENGRKRMLASAGELQKGNELALPSKYVNFLYLASHYEKLKGSPEDNEQKQLFVEQHKHYLDEIIEQISEFSKRVILADANLDKVLSAYNKHRDKPIREQAENIIHLFTLTNLGAPAAFKYFDTTIDRKRYTSTKEVLDATLIHQSITGLYETRIDLSQLGGDGGPAPAPAPAPAPAPGGTLGDQGSRGSDPLPEPRVTLTVEGIPTEFLVNTGAEHSVLTKPMGKMGSKRTVVAGATGSKVYPWTTKRLLKIGQKQVTHSFLVIPECPAPLLGRDLLTKLKAQIQFSTEGPQVTWEDRPAMCLVLNLEEEYRLHEKPVPPSIDPSWLQLFPMVWAEKAGMGLANQVPPVVVELKSDASPVAVRQYPMSKEAREGIRPHIQRFLDLGILVPCQSPWNTPLLPVKKPGTNDYRPVQDLREVNKRVQDIHPTVPNPYNLLSSLPPSHTWYSVLDLKDAFFCLKLHPNSQPLFAFEWRDPEKGNTGQLTWTRLPQGFKNSPTLFNEALHRDLASFRALNPQVVMLQYVDDLLVAAPTYRDCKEGTRRLLQELSKLGYRVSAKKAQLCREEVTYLGYLLKGGKRWLTPARKATVMKIPTPTTPRQVREFLGKAGFCRLFIPGFASLAAPLYPLTRPKVPFTWTEAHQEAFGRIKEALLSAPALALPDLTKPFALYVDEKEGVARGVLTQTLGPWRRPVAYLSKKLDPVASGWPTCLKAIAAVALLLKDADKLTLGQNVLVIAPHNLESIVRQPPDRWMTNARMTHYQSLLLNERVSFAPPAILNPATLLPVESDDTPIHICSEILAEETGTRPDLRDQPLPGVPAWYTDGSSFIMDGRRQAGAAIVDNKRTVWASNLPEGTSAQKAELIALTQALRLAEGKSINIYTDSRYAFATAHVHGAIYKQRGWLTSAGKDIKNKEEILALLEAIHLPKRVAIIHCPGHQRGTDPVATGNRKADEAAKQAAQSTRILTETTKNAGKRTADGSEFEKRTADGSEFESPKKKAKVE

SEQ ID NO: 1794 - protein, 2213 aa, synthetic construct
MPAAKRVKLDGGDKKYSIGLDIGTNSVGWAVITDEYKVPSKKFKVLGNTDRHSIKKNLIGALLFDSGETAEATRLKRTARRRYTRRKNRICYLQEIFSNEMAKVDDSFFHRLEESFLVEEDKKHERHPIFGNIVDEVAYHEKYPTIYHLRKKLVDSTDKADLRLIYLALAHMIKFRGHFLIEGDLNPDNSDVDKLFIQLVQTYNQLFEENPINASGVDAKAILSARLSKSRRLENLIAQLPGEKKNGLFGNLIALSLGLTPNFKSNFDLAEDAKLQLSKDTYDDDLDNLLAQIGDQYADLFLAAKNLSDAILLSDILRVNTEITKAPLSASMIKRYDEHHQDLTLLKALVRQQLPEKYKEIFFDQSKNGYAGYIDGGASQEEFYKFIKPILEKMDGTEELLVKLNREDLLRKQRTFDNGSIPHQIHLGELHAILRRQEDFYPFLKDNREKIEKILTFRIPYYVGPLARGNSRFAWMTRKSEETITPWNFEEVVDKGASAQSFIERMTNFDKNLPNEKVLPKHSLLYEYFTVYNELTKVKYVTEGMRKPAFLSGEQKKAIVDLLFKTNRKVTVKQLKEDYFKKIECFDSVEISGVEDRFNASLGTYHDLLKIIKDKDFLDNEENEDILEDIVLTLTLFEDREMIEERLKTYAHLFDDKVMKQLKRRRYTGWGRLSRKLINGIRDKQSGKTILDFLKSDGFANRNFMQLIHDDSLTFKEDIQKAQVSGQGDSLHEHIANLAGSPAIKKGILQTVKVVDELVKVMGRHKPENIVIEMARENQTTQKGQKNSRERMKRIEEGIKELGSQILKEHPVENTQLQNEKLYLYYLQNGRDMYVDQELDINRLSDYDVDHIVPQSFLKDDSIDNKVLTRSDKARGKSDNVPSEEVVKKMKNYWRQLLNAKLITQRKFDNLTKAERGGLSELDKAGFIKRQLVETRQITKHVAQILDSRMNTKYDENDKLIREVKVITLKSKLVSDFRKDFQFYKVREINNYHHAHDAYLNAVVGTALIKKYPKLESEFVYGDYKVYDVRKMIAKSEQEIGKATAKYFFYSNIMNFFKTEITLANGEIRKRPLIETNGETGEIVWDKGRDFATVRKVLSMPQVNIVKKTEVQTGGFSKESILPKRNSDKLIARKKDWDPKKYGGFDSPTVAYSVLVVAKVEKGKSKKLKSVKELLGITIMERSSFEKNPIDFLEAKGYKEVKKDLIIKLPKYSLFELENGRKRMLASAGELQKGNELALPSKYVNFLYLASHYEKLKGSPEDNEQKQLFVEQHKHYLDEIIEQISEFSKRVILADANLDKVLSAYNKHRDKPIREQAENIIHLFTLTNLGAPAAFKYFDTTIDRKRYTSTKEVLDATLIHQSITGLYETRIDLSQLGGDGGPAPGGGGGTLGDQGSRGSDPLPEPRVTLTVEGIPTEFLVNTGAEHSVLTKPMGKMGSKRTVVAGATGSKVYPWTTKRLLKIGQKQVTHSFLVIPECPAPLLGRDLLTKLKAQIQFSTEGPQVTWEDRPAMCLVLNLEEEYRLHEKPVPPSIDPSWLQLFPMVWAEKAGMGLANQVPPVVVELKSDASPVAVRQYPMSKEAREGIRPHIQRFLDLGILVPCQSPWNTPLLPVKKPGTNDYRPVQDLREVNKRVQDIHPTVPNPYNLLSSLPPSHTWYSVLDLKDAFFCLKLHPNSQPLFAFEWRDPEKGNTGQLTWTRLPQGFKNSPTLFNEALHRDLASFRALNPQVVMLQYVDDLLVAAPTYRDCKEGTRRLLQELSKLGYRVSAKKAQLCREEVTYLGYLLKGGKRWLTPARKATVMKIPTPTTPRQVREFLGKAGFCRLFIPGFASLAAPLYPLTRPKVPFTWTEAHQEAFGRIKEALLSAPALALPDLTKPFALYVDEKEGVARGVLTQTLGPWRRPVAYLSKKLDPVASGWPTCLKAIAAVALLLKDADKLTLGQNVLVIAPHNLESIVRQPPDRWMTNARMTHYQSLLLNERVSFAPPAILNPATLLPVESDDTPIHICSEILAEETGTRPDLRDQPLPGVPAWYTDGSSFIMDGRRQAGAAIVDNKRTVWASNLPEGTSAQKAELIALTQALRLAEGKSINIYTDSRYAFATAHVHGAIYKQRGWLTSAGKDIKNKEEILALLEAIHLPKRVAIIHCPGHQRGTDPVATGNRKADEAAKQAAQSTRILTETTKNAGKRTADGSEFEKRTADGSEFESPKKKAKVE

SEQ ID NO: 1795 - protein, 2218 aa, synthetic construct
MPAAKRVKLDGGDKKYSIGLDIGTNSVGWAVITDEYKVPSKKFKVLGNTDRHSIKKNLIGALLFDSGETAEATRLKRTARRRYTRRKNRICYLQEIFSNEMAKVDDSFFHRLEESFLVEEDKKHERHPIFGNIVDEVAYHEKYPTIYHLRKKLVDSTDKADLRLIYLALAHMIKFRGHFLIEGDLNPDNSDVDKLFIQLVQTYNQLFEENPINASGVDAKAILSARLSKSRRLENLIAQLPGEKKNGLFGNLIALSLGLTPNFKSNFDLAEDAKLQLSKDTYDDDLDNLLAQIGDQYADLFLAAKNLSDAILLSDILRVNTEITKAPLSASMIKRYDEHHQDLTLLKALVRQQLPEKYKEIFFDQSKNGYAGYIDGGASQEEFYKFIKPILEKMDGTEELLVKLNREDLLRKQRTFDNGSIPHQIHLGELHAILRRQEDFYPFLKDNREKIEKILTFRIPYYVGPLARGNSRFAWMTRKSEETITPWNFEEVVDKGASAQSFIERMTNFDKNLPNEKVLPKHSLLYEYFTVYNELTKVKYVTEGMRKPAFLSGEQKKAIVDLLFKTNRKVTVKQLKEDYFKKIECFDSVEISGVEDRFNASLGTYHDLLKIIKDKDFLDNEENEDILEDIVLTLTLFEDREMIEERLKTYAHLFDDKVMKQLKRRRYTGWGRLSRKLINGIRDKQSGKTILDFLKSDGFANRNFMQLIHDDSLTFKEDIQKAQVSGQGDSLHEHIANLAGSPAIKKGILQTVKVVDELVKVMGRHKPENIVIEMARENQTTQKGQKNSRERMKRIEEGIKELGSQILKEHPVENTQLQNEKLYLYYLQNGRDMYVDQELDINRLSDYDVDHIVPQSFLKDDSIDNKVLTRSDKARGKSDNVPSEEVVKKMKNYWRQLLNAKLITQRKFDNLTKAERGGLSELDKAGFIKRQLVETRQITKHVAQILDSRMNTKYDENDKLIREVKVITLKSKLVSDFRKDFQFYKVREINNYHHAHDAYLNAVVGTALIKKYPKLESEFVYGDYKVYDVRKMIAKSEQEIGKATAKYFFYSNIMNFFKTEITLANGEIRKRPLIETNGETGEIVWDKGRDFATVRKVLSMPQVNIVKKTEVQTGGFSKESILPKRNSDKLIARKKDWDPKKYGGFDSPTVAYSVLVVAKVEKGKSKKLKSVKELLGITIMERSSFEKNPIDFLEAKGYKEVKKDLIIKLPKYSLFELENGRKRMLASAGELQKGNELALPSKYVNFLYLASHYEKLKGSPEDNEQKQLFVEQHKHYLDEIIEQISEFSKRVILADANLDKVLSAYNKHRDKPIREQAENIIHLFTLTNLGAPAAFKYFDTTIDRKRYTSTKEVLDATLIHQSITGLYETRIDLSQLGGDGGGSSPAPEAAAKGGTLGDQGSRGSDPLPEPRVTLTVEGIPTEFLVNTGAEHSVLTKPMGKMGSKRTVVAGATGSKVYPWTTKRLLKIGQKQVTHSFLVIPECPAPLLGRDLLTKLKAQIQFSTEGPQVTWEDRPAMCLVLNLEEEYRLHEKPVPPSIDPSWLQLFPMVWAEKAGMGLANQVPPVVVELKSDASPVAVRQYPMSKEAREGIRPHIQRFLDLGILVPCQSPWNTPLLPVKKPGTNDYRPVQDLREVNKRVQDIHPTVPNPYNLLSSLPPSHTWYSVLDLKDAFFCLKLHPNSQPLFAFEWRDPEKGNTGQLTWTRLPQGFKNSPTLFNEALHRDLASFRALNPQVVMLQYVDDLLVAAPTYRDCKEGTRRLLQELSKLGYRVSAKKAQLCREEVTYLGYLLKGGKRWLTPARKATVMKIPTPTTPRQVREFLGKAGFCRLFIPGFASLAAPLYPLTRPKVPFTWTEAHQEAFGRIKEALLSAPALALPDLTKPFALYVDEKEGVARGVLTQTLGPWRRPVAYLSKKLDPVASGWPTCLKAIAAVALLLKDADKLTLGQNVLVIAPHNLESIVRQPPDRWMTNARMTHYQSLLLNERVSFAPPAILNPATLLPVESDDTPIHICSEILAEETGTRPDLRDQPLPGVPAWYTDGSSFIMDGRRQAGAAIVDNKRTVWASNLPEGTSAQKAELIALTQALRLAEGKSINIYTDSRYAFATAHVHGAIYKQRGWLTSAGKDIKNKEEILALLEAIHLPKRVAIIHCPGHQRGTDPVATGNRKADEAAKQAAQSTRILTETTKNAGKRTADGSEFEKRTADGSEFESPKKKAKVE

SEQ ID NO: 1796 - protein, 2218 aa, synthetic construct
MPAAKRVKLDGGDKKYSIGLDIGTNSVGWAVITDEYKVPSKKFKVLGNTDRHSIKKNLIGALLFDSGETAEATRLKRTARRRYTRRKNRICYLQEIFSNEMAKVDDSFFHRLEESFLVEEDKKHERHPIFGNIVDEVAYHEKYPTIYHLRKKLVDSTDKADLRLIYLALAHMIKFRGHFLIEGDLNPDNSDVDKLFIQLVQTYNQLFEENPINASGVDAKAILSARLSKSRRLENLIAQLPGEKKNGLFGNLIALSLGLTPNFKSNFDLAEDAKLQLSKDTYDDDLDNLLAQIGDQYADLFLAAKNLSDAILLSDILRVNTEITKAPLSASMIKRYDEHHQDLTLLKALVRQQLPEKYKEIFFDQSKNGYAGYIDGGASQEEFYKFIKPILEKMDGTEELLVKLNREDLLRKQRTFDNGSIPHQIHLGELHAILRRQEDFYPFLKDNREKIEKILTFRIPYYVGPLARGNSRFAWMTRKSEETITPWNFEEVVDKGASAQSFIERMTNFDKNLPNEKVLPKHSLLYEYFTVYNELTKVKYVTEGMRKPAFLSGEQKKAIVDLLFKTNRKVTVKQLKEDYFKKIECFDSVEISGVEDRFNASLGTYHDLLKIIKDKDFLDNEENEDILEDIVLTLTLFEDREMIEERLKTYAHLFDDKVMKQLKRRRYTGWGRLSRKLINGIRDKQSGKTILDFLKSDGFANRNFMQLIHDDSLTFKEDIQKAQVSGQGDSLHEHIANLAGSPAIKKGILQTVKVVDELVKVMGRHKPENIVIEMARENQTTQKGQKNSRERMKRIEEGIKELGSQILKEHPVENTQLQNEKLYLYYLQNGRDMYVDQELDINRLSDYDVDHIVPQSFLKDDSIDNKVLTRSDKARGKSDNVPSEEVVKKMKNYWRQLLNAKLITQRKFDNLTKAERGGLSELDKAGFIKRQLVETRQITKHVAQILDSRMNTKYDENDKLIREVKVITLKSKLVSDFRKDFQFYKVREINNYHHAHDAYLNAVVGTALIKKYPKLESEFVYGDYKVYDVRKMIAKSEQEIGKATAKYFFYSNIMNFFKTEITLANGEIRKRPLIETNGETGEIVWDKGRDFATVRKVLSMPQVNIVKKTEVQTGGFSKESILPKRNSDKLIARKKDWDPKKYGGFDSPTVAYSVLVVAKVEKGKSKKLKSVKELLGITIMERSSFEKNPIDFLEAKGYKEVKKDLIIKLPKYSLFELENGRKRMLASAGELQKGNELALPSKYVNFLYLASHYEKLKGSPEDNEQKQLFVEQHKHYLDEIIEQISEFSKRVILADANLDKVLSAYNKHRDKPIREQAENIIHLFTLTNLGAPAAFKYFDTTIDRKRYTSTKEVLDATLIHQSITGLYETRIDLSQLGGDGGGGGEAAAKGSSGGTLGDQGSRGSDPLPEPRVTLTVEGIPTEFLVNTGAEHSVLTKPMGKMGSKRTVVAGATGSKVYPWTTKRLLKIGQKQVTHSFLVIPECPAPLLGRDLLTKLKAQIQFSTEGPQVTWEDRPAMCLVLNLEEEYRLHEKPVPPSIDPSWLQLFPMVWAEKAGMGLANQVPPVVVELKSDASPVAVRQYPMSKEAREGIRPHIQRFLDLGILVPCQSPWNTPLLPVKKPGTNDYRPVQDLREVNKRVQDIHPTVPNPYNLLSSLPPSHTWYSVLDLKDAFFCLKLHPNSQPLFAFEWRDPEKGNTGQLTWTRLPQGFKNSPTLFNEALHRDLASFRALNPQVVMLQYVDDLLVAAPTYRDCKEGTRRLLQELSKLGYRVSAKKAQLCREEVTYLGYLLKGGKRWLTPARKATVMKIPTPTTPRQVREFLGKAGFCRLFIPGFASLAAPLYPLTRPKVPFTWTEAHQEAFGRIKEALLSAPALALPDLTKPFALYVDEKEGVARGVLTQTLGPWRRPVAYLSKKLDPVASGWPTCLKAIAAVALLLKDADKLTLGQNVLVIAPHNLESIVRQPPDRWMTNARMTHYQSLLLNERVSFAPPAILNPATLLPVESDDTPIHICSEILAEETGTRPDLRDQPLPGVPAWYTDGSSFIMDGRRQAGAAIVDNKRTVWASNLPEGTSAQKAELIALTQALRLAEGKSINIYTDSRYAFATAHVHGAIYKQRGWLTSAGKDIKNKEEILALLEAIHLPKRVAIIHCPGHQRGTDPVATGNRKADEAAKQAAQSTRILTETTKNAGKRTADGSEFEKRTADGSEFESPKKKAKVE

SEQ ID NO: 1797 - protein, 2215 aa, synthetic construct
MPAAKRVKLDGGDKKYSIGLDIGTNSVGWAVITDEYKVPSKKFKVLGNTDRHSIKKNLIGALLFDSGETAEATRLKRTARRRYTRRKNRICYLQEIFSNEMAKVDDSFFHRLEESFLVEEDKKHERHPIFGNIVDEVAYHEKYPTIYHLRKKLVDSTDKADLRLIYLALAHMIKFRGHFLIEGDLNPDNSDVDKLFIQLVQTYNQLFEENPINASGVDAKAILSARLSKSRRLENLIAQLPGEKKNGLFGNLIALSLGLTPNFKSNFDLAEDAKLQLSKDTYDDDLDNLLAQIGDQYADLFLAAKNLSDAILLSDILRVNTEITKAPLSASMIKRYDEHHQDLTLLKALVRQQLPEKYKEIFFDQSKNGYAGYIDGGASQEEFYKFIKPILEKMDGTEELLVKLNREDLLRKQRTFDNGSIPHQIHLGELHAILRRQEDFYPFLKDNREKIEKILTFRIPYYVGPLARGNSRFAWMTRKSEETITPWNFEEVVDKGASAQSFIERMTNFDKNLPNEKVLPKHSLLYEYFTVYNELTKVKYVTEGMRKPAFLSGEQKKAIVDLLFKTNRKVTVKQLKEDYFKKIECFDSVEISGVEDRFNASLGTYHDLLKIIKDKDFLDNEENEDILEDIVLTLTLFEDREMIEERLKTYAHLFDDKVMKQLKRRRYTGWGRLSRKLINGIRDKQSGKTILDFLKSDGFANRNFMQLIHDDSLTFKEDIQKAQVSGQGDSLHEHIANLAGSPAIKKGILQTVKVVDELVKVMGRHKPENIVIEMARENQTTQKGQKNSRERMKRIEEGIKELGSQILKEHPVENTQLQNEKLYLYYLQNGRDMYVDQELDINRLSDYDVDHIVPQSFLKDDSIDNKVLTRSDKARGKSDNVPSEEVVKKMKNYWRQLLNAKLITQRKFDNLTKAERGGLSELDKAGFIKRQLVETRQITKHVAQILDSRMNTKYDENDKLIREVKVITLKSKLVSDFRKDFQFYKVREINNYHHAHDAYLNAVVGTALIKKYPKLESEFVYGDYKVYDVRKMIAKSEQEIGKATAKYFFYSNIMNFFKTEITLANGEIRKRPLIETNGETGEIVWDKGRDFATVRKVLSMPQVNIVKKTEVQTGGFSKESILPKRNSDKLIARKKDWDPKKYGGFDSPTVAYSVLVVAKVEKGKSKKLKSVKELLGITIMERSSFEKNPIDFLEAKGYKEVKKDLIIKLPKYSLFELENGRKRMLASAGELQKGNELALPSKYVNFLYLASHYEKLKGSPEDNEQKQLFVEQHKHYLDEIIEQISEFSKRVILADANLDKVLSAYNKHRDKPIREQAENIIHLFTLTNLGAPAAFKYFDTTIDRKRYTSTKEVLDATLIHQSITGLYETRIDLSQLGGDGGGSSEAAAKGGTLGDQGSRGSDPLPEPRVTLTVEGIPTEFLVNTGAEHSVLTKPMGKMGSKRTVVAGATGSKVYPWTTKRLLKIGQKQVTHSFLVIPECPAPLLGRDLLTKLKAQIQFSTEGPQVTWEDRPAMCLVLNLEEEYRLHEKPVPPSIDPSWLQLFPMVWAEKAGMGLANQVPPVVVELKSDASPVAVRQYPMSKEAREGIRPHIQRFLDLGILVPCQSPWNTPLLPVKKPGTNDYRPVQDLREVNKRVQDIHPTVPNPYNLLSSLPPSHTWYSVLDLKDAFFCLKLHPNSQPLFAFEWRDPEKGNTGQLTWTRLPQGFKNSPTLFNEALHRDLASFRALNPQVVMLQYVDDLLVAAPTYRDCKEGTRRLLQELSKLGYRVSAKKAQLCREEVTYLGYLLKGGKRWLTPARKATVMKIPTPTTPRQVREFLGKAGFCRLFIPGFASLAAPLYPLTRPKVPFTWTEAHQEAFGRIKEALLSAPALALPDLTKPFALYVDEKEGVARGVLTQTLGPWRRPVAYLSKKLDPVASGWPTCLKAIAAVALLLKDADKLTLGQNVLVIAPHNLESIVRQPPDRWMTNARMTHYQSLLLNERVSFAPPAILNPATLLPVESDDTPIHICSEILAEETGTRPDLRDQPLPGVPAWYTDGSSFIMDGRRQAGAAIVDNKRTVWASNLPEGTSAQKAELIALTQALRLAEGKSINIYTDSRYAFATAHVHGAIYKQRGWLTSAGKDIKNKEEILALLEAIHLPKRVAIIHCPGHQRGTDPVATGNRKADEAAKQAAQSTRILTETTKNAGKRTADGSEFEKRTADGSEFESPKKKAKVE

SEQ ID NO: 1798 - protein, 2211 aa, synthetic construct
MPAAKRVKLDGGDKKYSIGLDIGTNSVGWAVITDEYKVPSKKFKVLGNTDRHSIKKNLIGALLFDSGETAEATRLKRTARRRYTRRKNRICYLQEIFSNEMAKVDDSFFHRLEESFLVEEDKKHERHPIFGNIVDEVAYHEKYPTIYHLRKKLVDSTDKADLRLIYLALAHMIKFRGHFLIEGDLNPDNSDVDKLFIQLVQTYNQLFEENPINASGVDAKAILSARLSKSRRLENLIAQLPGEKKNGLFGNLIALSLGLTPNFKSNFDLAEDAKLQLSKDTYDDDLDNLLAQIGDQYADLFLAAKNLSDAILLSDILRVNTEITKAPLSASMIKRYDEHHQDLTLLKALVRQQLPEKYKEIFFDQSKNGYAGYIDGGASQEEFYKFIKPILEKMDGTEELLVKLNREDLLRKQRTFDNGSIPHQIHLGELHAILRRQEDFYPFLKDNREKIEKILTFRIPYYVGPLARGNSRFAWMTRKSEETITPWNFEEVVDKGASAQSFIERMTNFDKNLPNEKVLPKHSLLYEYFTVYNELTKVKYVTEGMRKPAFLSGEQKKAIVDLLFKTNRKVTVKQLKEDYFKKIECFDSVEISGVEDRFNASLGTYHDLLKIIKDKDFLDNEENEDILEDIVLTLTLFEDREMIEERLKTYAHLFDDKVMKQLKRRRYTGWGRLSRKLINGIRDKQSGKTILDFLKSDGFANRNFMQLIHDDSLTFKEDIQKAQVSGQGDSLHEHIANLAGSPAIKKGILQTVKVVDELVKVMGRHKPENIVIEMARENQTTQKGQKNSRERMKRIEEGIKELGSQILKEHPVENTQLQNEKLYLYYLQNGRDMYVDQELDINRLSDYDVDHIVPQSFLKDDSIDNKVLTRSDKARGKSDNVPSEEVVKKMKNYWRQLLNAKLITQRKFDNLTKAERGGLSELDKAGFIKRQLVETRQITKHVAQILDSRMNTKYDENDKLIREVKVITLKSKLVSDFRKDFQFYKVREINNYHHAHDAYLNAVVGTALIKKYPKLESEFVYGDYKVYDVRKMIAKSEQEIGKATAKYFFYSNIMNFFKTEITLANGEIRKRPLIETNGETGEIVWDKGRDFATVRKVLSMPQVNIVKKTEVQTGGFSKESILPKRNSDKLIARKKDWDPKKYGGFDSPTVAYSVLVVAKVEKGKSKKLKSVKELLGITIMERSSFEKNPIDFLEAKGYKEVKKDLIIKLPKYSLFELENGRKRMLASAGELQKGNELALPSKYVNFLYLASHYEKLKGSPEDNEQKQLFVEQHKHYLDEIIEQISEFSKRVILADANLDKVLSAYNKHRDKPIREQAENIIHLFTLTNLGAPAAFKYFDTTIDRKRYTSTKEVLDATLIHQSITGLYETRIDLSQLGGDGGGGGGGGTLGDQGSRGSDPLPEPRVTLTVEGIPTEFLVNTGAEHSVLTKPMGKMGSKRTVVAGATGSKVYPWTTKRLLKIGQKQVTHSFLVIPECPAPLLGRDLLTKLKAQIQFSTEGPQVTWEDRPAMCLVLNLEEEYRLHEKPVPPSIDPSWLQLFPMVWAEKAGMGLANQVPPVVVELKSDASPVAVRQYPMSKEAREGIRPHIQRFLDLGILVPCQSPWNTPLLPVKKPGTNDYRPVQDLREVNKRVQDIHPTVPNPYNLLSSLPPSHTWYSVLDLKDAFFCLKLHPNSQPLFAFEWRDPEKGNTGQLTWTRLPQGFKNSPTLFNEALHRDLASFRALNPQVVMLQYVDDLLVAAPTYRDCKEGTRRLLQELSKLGYRVSAKKAQLCREEVTYLGYLLKGGKRWLTPARKATVMKIPTPTTPRQVREFLGKAGFCRLFIPGFASLAAPLYPLTRPKVPFTWTEAHQEAFGRIKEALLSAPALALPDLTKPFALYVDEKEGVARGVLTQTLGPWRRPVAYLSKKLDPVASGWPTCLKAIAAVALLLKDADKLTLGQNVLVIAPHNLESIVRQPPDRWMTNARMTHYQSLLLNERVSFAPPAILNPATLLPVESDDTPIHICSEILAEETGTRPDLRDQPLPGVPAWYTDGSSFIMDGRRQAGAAIVDNKRTVWASNLPEGTSAQKAELIALTQALRLAEGKSINIYTDSRYAFATAHVHGAIYKQRGWLTSAGKDIKNKEEILALLEAIHLPKRVAIIHCPGHQRGTDPVATGNRKADEAAKQAAQSTRILTETTKNAGKRTADGSEFEKRTADGSEFESPKKKAKVE

SEQ ID NO: 1799 - protein, 2215 aa, synthetic construct
MPAAKRVKLDGGDKKYSIGLDIGTNSVGWAVITDEYKVPSKKFKVLGNTDRHSIKKNLIGALLFDSGETAEATRLKRTARRRYTRRKNRICYLQEIFSNEMAKVDDSFFHRLEESFLVEEDKKHERHPIFGNIVDEVAYHEKYPTIYHLRKKLVDSTDKADLRLIYLALAHMIKFRGHFLIEGDLNPDNSDVDKLFIQLVQTYNQLFEENPINASGVDAKAILSARLSKSRRLENLIAQLPGEKKNGLFGNLIALSLGLTPNFKSNFDLAEDAKLQLSKDTYDDDLDNLLAQIGDQYADLFLAAKNLSDAILLSDILRVNTEITKAPLSASMIKRYDEHHQDLTLLKALVRQQLPEKYKEIFFDQSKNGYAGYIDGGASQEEFYKFIKPILEKMDGTEELLVKLNREDLLRKQRTFDNGSIPHQIHLGELHAILRRQEDFYPFLKDNREKIEKILTFRIPYYVGPLARGNSRFAWMTRKSEETITPWNFEEVVDKGASAQSFIERMTNFDKNLPNEKVLPKHSLLYEYFTVYNELTKVKYVTEGMRKPAFLSGEQKKAIVDLLFKTNRKVTVKQLKEDYFKKIECFDSVEISGVEDRFNASLGTYHDLLKIIKDKDFLDNEENEDILEDIVLTLTLFEDREMIEERLKTYAHLFDDKVMKQLKRRRYTGWGRLSRKLINGIRDKQSGKTILDFLKSDGFANRNFMQLIHDDSLTFKEDIQKAQVSGQGDSLHEHIANLAGSPAIKKGILQTVKVVDELVKVMGRHKPENIVIEMARENQTTQKGQKNSRERMKRIEEGIKELGSQILKEHPVENTQLQNEKLYLYYLQNGRDMYVDQELDINRLSDYDVDHIVPQSFLKDDSIDNKVLTRSDKARGKSDNVPSEEVVKKMKNYWRQLLNAKLITQRKFDNLTKAERGGLSELDKAGFIKRQLVETRQITKHVAQILDSRMNTKYDENDKLIREVKVITLKSKLVSDFRKDFQFYKVREINNYHHAHDAYLNAVVGTALIKKYPKLESEFVYGDYKVYDVRKMIAKSEQEIGKATAKYFFYSNIMNFFKTEITLANGEIRKRPLIETNGETGEIVWDKGRDFATVRKVLSMPQVNIVKKTEVQTGGFSKESILPKRNSDKLIARKKDWDPKKYGGFDSPTVAYSVLVVAKVEKGKSKKLKSVKELLGITIMERSSFEKNPIDFLEAKGYKEVKKDLIIKLPKYSLFELENGRKRMLASAGELQKGNELALPSKYVNFLYLASHYEKLKGSPEDNEQKQLFVEQHKHYLDEIIEQISEFSKRVILADANLDKVLSAYNKHRDKPIREQAENIIHLFTLTNLGAPAAFKYFDTTIDRKRYTSTKEVLDATLIHQSITGLYETRIDLSQLGGDGGGGGGGGGGGGTLGDQGSRGSDPLPEPRVTLTVEGIPTEFLVNTGAEHSVLTKPMGKMGSKRTVVAGATGSKVYPWTTKRLLKIGQKQVTHSFLVIPECPAPLLGRDLLTKLKAQIQFSTEGPQVTWEDRPAMCLVLNLEEEYRLHEKPVPPSIDPSWLQLFPMVWAEKAGMGLANQVPPVVVELKSDASPVAVRQYPMSKEAREGIRPHIQRFLDLGILVPCQSPWNTPLLPVKKPGTNDYRPVQDLREVNKRVQDIHPTVPNPYNLLSSLPPSHTWYSVLDLKDAFFCLKLHPNSQPLFAFEWRDPEKGNTGQLTWTRLPQGFKNSPTLFNEALHRDLASFRALNPQVVMLQYVDDLLVAAPTYRDCKEGTRRLLQELSKLGYRVSAKKAQLCREEVTYLGYLLKGGKRWLTPARKATVMKIPTPTTPRQVREFLGKAGFCRLFIPGFASLAAPLYPLTRPKVPFTWTEAHQEAFGRIKEALLSAPALALPDLTKPFALYVDEKEGVARGVLTQTLGPWRRPVAYLSKKLDPVASGWPTCLKAIAAVALLLKDADKLTLGQNVLVIAPHNLESIVRQPPDRWMTNARMTHYQSLLLNERVSFAPPAILNPATLLPVESDDTPIHICSEILAEETGTRPDLRDQPLPGVPAWYTDGSSFIMDGRRQAGAAIVDNKRTVWASNLPEGTSAQKAELIALTQALRLAEGKSINIYTDSRYAFATAHVHGAIYKQRGWLTSAGKDIKNKEEILALLEAIHLPKRVAIIHCPGHQRGTDPVATGNRKADEAAKQAAQSTRILTETTKNAGKRTADGSEFEKRTADGSEFESPKKKAKVE

SEQ ID NO: 1800 - protein, 2223 aa, synthetic construct
MPAAKRVKLDGGDKKYSIGLDIGTNSVGWAVITDEYKVPSKKFKVLGNTDRHSIKKNLIGALLFDSGETAEATRLKRTARRRYTRRKNRICYLQEIFSNEMAKVDDSFFHRLEESFLVEEDKKHERHPIFGNIVDEVAYHEKYPTIYHLRKKLVDSTDKADLRLIYLALAHMIKFRGHFLIEGDLNPDNSDVDKLFIQLVQTYNQLFEENPINASGVDAKAILSARLSKSRRLENLIAQLPGEKKNGLFGNLIALSLGLTPNFKSNFDLAEDAKLQLSKDTYDDDLDNLLAQIGDQYADLFLAAKNLSDAILLSDILRVNTEITKAPLSASMIKRYDEHHQDLTLLKALVRQQLPEKYKEIFFDQSKNGYAGYIDGGASQEEFYKFIKPILEKMDGTEELLVKLNREDLLRKQRTFDNGSIPHQIHLGELHAILRRQEDFYPFLKDNREKIEKILTFRIPYYVGPLARGNSRFAWMTRKSEETITPWNFEEVVDKGASAQSFIERMTNFDKNLPNEKVLPKHSLLYEYFTVYNELTKVKYVTEGMRKPAFLSGEQKKAIVDLLFKTNRKVTVKQLKEDYFKKIECFDSVEISGVEDRFNASLGTYHDLLKIIKDKDFLDNEENEDILEDIVLTLTLFEDREMIEERLKTYAHLFDDKVMKQLKRRRYTGWGRLSRKLINGIRDKQSGKTILDFLKSDGFANRNFMQLIHDDSLTFKEDIQKAQVSGQGDSLHEHIANLAGSPAIKKGILQTVKVVDELVKVMGRHKPENIVIEMARENQTTQKGQKNSRERMKRIEEGIKELGSQILKEHPVENTQLQNEKLYLYYLQNGRDMYVDQELDINRLSDYDVDHIVPQSFLKDDSIDNKVLTRSDKARGKSDNVPSEEVVKKMKNYWRQLLNAKLITQRKFDNLTKAERGGLSELDKAGFIKRQLVETRQITKHVAQILDSRMNTKYDENDKLIREVKVITLKSKLVSDFRKDFQFYKVREINNYHHAHDAYLNAVVGTALIKKYPKLESEFVYGDYKVYDVRKMIAKSEQEIGKATAKYFFYSNIMNFFKTEITLANGEIRKRPLIETNGETGEIVWDKGRDFATVRKVLSMPQVNIVKKTEVQTGGFSKESILPKRNSDKLIARKKDWDPKKYGGFDSPTVAYSVLVVAKVEKGKSKKLKSVKELLGITIMERSSFEKNPIDFLEAKGYKEVKKDLIIKLPKYSLFELENGRKRMLASAGELQKGNELALPSKYVNFLYLASHYEKLKGSPEDNEQKQLFVEQHKHYLDEIIEQISEFSKRVILADANLDKVLSAYNKHRDKPIREQAENIIHLFTLTNLGAPAAFKYFDTTIDRKRYTSTKEVLDATLIHQSITGLYETRIDLSQLGGDGGSGSETPGTSESATPESGGTLGDQGSRGSDPLPEPRVTLTVEGIPTEFLVNTGAEHSVLTKPMGKMGSKRTVVAGATGSKVYPWTTKRLLKIGQKQVTHSFLVIPECPAPLLGRDLLTKLKAQIQFSTEGPQVTWEDRPAMCLVLNLEEEYRLHEKPVPPSIDPSWLQLFPMVWAEKAGMGLANQVPPVVVELKSDASPVAVRQYPMSKEAREGIRPHIQRFLDLGILVPCQSPWNTPLLPVKKPGTNDYRPVQDLREVNKRVQDIHPTVPNPYNLLSSLPPSHTWYSVLDLKDAFFCLKLHPNSQPLFAFEWRDPEKGNTGQLTWTRLPQGFKNSPTLFNEALHRDLASFRALNPQVVMLQYVDDLLVAAPTYRDCKEGTRRLLQELSKLGYRVSAKKAQLCREEVTYLGYLLKGGKRWLTPARKATVMKIPTPTTPRQVREFLGKAGFCRLFIPGFASLAAPLYPLTRPKVPFTWTEAHQEAFGRIKEALLSAPALALPDLTKPFALYVDEKEGVARGVLTQTLGPWRRPVAYLSKKLDPVASGWPTCLKAIAAVALLLKDADKLTLGQNVLVIAPHNLESIVRQPPDRWMTNARMTHYQSLLLNERVSFAPPAILNPATLLPVESDDTPIHICSEILAEETGTRPDLRDQPLPGVPAWYTDGSSFIMDGRRQAGAAIVDNKRTVWASNLPEGTSAQKAELIALTQALRLAEGKSINIYTDSRYAFATAHVHGAIYKQRGWLTSAGKDIKNKEEILALLEAIHLPKRVAIIHCPGHQRGTDPVATGNRKADEAAKQAAQSTRILTETTKNAGKRTADGSEFEKRTADGSEFESPKKKAKVE

SEQ ID NO: 1801 - protein, 2218 aa, synthetic construct
MPAAKRVKLDGGDKKYSIGLDIGTNSVGWAVITDEYKVPSKKFKVLGNTDRHSIKKNLIGALLFDSGETAEATRLKRTARRRYTRRKNRICYLQEIFSNEMAKVDDSFFHRLEESFLVEEDKKHERHPIFGNIVDEVAYHEKYPTIYHLRKKLVDSTDKADLRLIYLALAHMIKFRGHFLIEGDLNPDNSDVDKLFIQLVQTYNQLFEENPINASGVDAKAILSARLSKSRRLENLIAQLPGEKKNGLFGNLIALSLGLTPNFKSNFDLAEDAKLQLSKDTYDDDLDNLLAQIGDQYADLFLAAKNLSDAILLSDILRVNTEITKAPLSASMIKRYDEHHQDLTLLKALVRQQLPEKYKEIFFDQSKNGYAGYIDGGASQEEFYKFIKPILEKMDGTEELLVKLNREDLLRKQRTFDNGSIPHQIHLGELHAILRRQEDFYPFLKDNREKIEKILTFRIPYYVGPLARGNSRFAWMTRKSEETITPWNFEEVVDKGASAQSFIERMTNFDKNLPNEKVLPKHSLLYEYFTVYNELTKVKYVTEGMRKPAFLSGEQKKAIVDLLFKTNRKVTVKQLKEDYFKKIECFDSVEISGVEDRFNASLGTYHDLLKIIKDKDFLDNEENEDILEDIVLTLTLFEDREMIEERLKTYAHLFDDKVMKQLKRRRYTGWGRLSRKLINGIRDKQSGKTILDFLKSDGFANRNFMQLIHDDSLTFKEDIQKAQVSGQGDSLHEHIANLAGSPAIKKGILQTVKVVDELVKVMGRHKPENIVIEMARENQTTQKGQKNSRERMKRIEEGIKELGSQILKEHPVENTQLQNEKLYLYYLQNGRDMYVDQELDINRLSDYDVDHIVPQSFLKDDSIDNKVLTRSDKARGKSDNVPSEEVVKKMKNYWRQLLNAKLITQRKFDNLTKAERGGLSELDKAGFIKRQLVETRQITKHVAQILDSRMNTKYDENDKLIREVKVITLKSKLVSDFRKDFQFYKVREINNYHHAHDAYLNAVVGTALIKKYPKLESEFVYGDYKVYDVRKMIAKSEQEIGKATAKYFFYSNIMNFFKTEITLANGEIRKRPLIETNGETGEIVWDKGRDFATVRKVLSMPQVNIVKKTEVQTGGFSKESILPKRNSDKLIARKKDWDPKKYGGFDSPTVAYSVLVVAKVEKGKSKKLKSVKELLGITIMERSSFEKNPIDFLEAKGYKEVKKDLIIKLPKYSLFELENGRKRMLASAGELQKGNELALPSKYVNFLYLASHYEKLKGSPEDNEQKQLFVEQHKHYLDEIIEQISEFSKRVILADANLDKVLSAYNKHRDKPIREQAENIIHLFTLTNLGAPAAFKYFDTTIDRKRYTSTKEVLDATLIHQSITGLYETRIDLSQLGGDGGGSSGGSEAAAKGGTLGDQGSRGSDPLPEPRVTLTVEGIPTEFLVNTGAEHSVLTKPMGKMGSKRTVVAGATGSKVYPWTTKRLLKIGQKQVTHSFLVIPECPAPLLGRDLLTKLKAQIQFSTEGPQVTWEDRPAMCLVLNLEEEYRLHEKPVPPSIDPSWLQLFPMVWAEKAGMGLANQVPPVVVELKSDASPVAVRQYPMSKEAREGIRPHIQRFLDLGILVPCQSPWNTPLLPVKKPGTNDYRPVQDLREVNKRVQDIHPTVPNPYNLLSSLPPSHTWYSVLDLKDAFFCLKLHPNSQPLFAFEWRDPEKGNTGQLTWTRLPQGFKNSPTLFNEALHRDLASFRALNPQVVMLQYVDDLLVAAPTYRDCKEGTRRLLQELSKLGYRVSAKKAQLCREEVTYLGYLLKGGKRWLTPARKATVMKIPTPTTPRQVREFLGKAGFCRLFIPGFASLAAPLYPLTRPKVPFTWTEAHQEAFGRIKEALLSAPALALPDLTKPFALYVDEKEGVARGVLTQTLGPWRRPVAYLSKKLDPVASGWPTCLKAIAAVALLLKDADKLTLGQNVLVIAPHNLESIVRQPPDRWMTNARMTHYQSLLLNERVSFAPPAILNPATLLPVESDDTPIHICSEILAEETGTRPDLRDQPLPGVPAWYTDGSSFIMDGRRQAGAAIVDNKRTVWASNLPEGTSAQKAELIALTQALRLAEGKSINIYTDSRYAFATAHVHGAIYKQRGWLTSAGKDIKNKEEILALLEAIHLPKRVAIIHCPGHQRGTDPVATGNRKADEAAKQAAQSTRILTETTKNAGKRTADGSEFEKRTADGSEFESPKKKAKVE

SEQ ID NO: 1802 - protein, 2216 aa, synthetic construct
MPAAKRVKLDGGDKKYSIGLDIGTNSVGWAVITDEYKVPSKKFKVLGNTDRHSIKKNLIGALLFDSGETAEATRLKRTARRRYTRRKNRICYLQEIFSNEMAKVDDSFFHRLEESFLVEEDKKHERHPIFGNIVDEVAYHEKYPTIYHLRKKLVDSTDKADLRLIYLALAHMIKFRGHFLIEGDLNPDNSDVDKLFIQLVQTYNQLFEENPINASGVDAKAILSARLSKSRRLENLIAQLPGEKKNGLFGNLIALSLGLTPNFKSNFDLAEDAKLQLSKDTYDDDLDNLLAQIGDQYADLFLAAKNLSDAILLSDILRVNTEITKAPLSASMIKRYDEHHQDLTLLKALVRQQLPEKYKEIFFDQSKNGYAGYIDGGASQEEFYKFIKPILEKMDGTEELLVKLNREDLLRKQRTFDNGSIPHQIHLGELHAILRRQEDFYPFLKDNREKIEKILTFRIPYYVGPLARGNSRFAWMTRKSEETITPWNFEEVVDKGASAQSFIERMTNFDKNLPNEKVLPKHSLLYEYFTVYNELTKVKYVTEGMRKPAFLSGEQKKAIVDLLFKTNRKVTVKQLKEDYFKKIECFDSVEISGVEDRFNASLGTYHDLLKIIKDKDFLDNEENEDILEDIVLTLTLFEDREMIEERLKTYAHLFDDKVMKQLKRRRYTGWGRLSRKLINGIRDKQSGKTILDFLKSDGFANRNFMQLIHDDSLTFKEDIQKAQVSGQGDSLHEHIANLAGSPAIKKGILQTVKVVDELVKVMGRHKPENIVIEMARENQTTQKGQKNSRERMKRIEEGIKELGSQILKEHPVENTQLQNEKLYLYYLQNGRDMYVDQELDINRLSDYDVDHIVPQSFLKDDSIDNKVLTRSDKARGKSDNVPSEEVVKKMKNYWRQLLNAKLITQRKFDNLTKAERGGLSELDKAGFIKRQLVETRQITKHVAQILDSRMNTKYDENDKLIREVKVITLKSKLVSDFRKDFQFYKVREINNYHHAHDAYLNAVVGTALIKKYPKLESEFVYGDYKVYDVRKMIAKSEQEIGKATAKYFFYSNIMNFFKTEITLANGEIRKRPLIETNGETGEIVWDKGRDFATVRKVLSMPQVNIVKKTEVQTGGFSKESILPKRNSDKLIARKKDWDPKKYGGFDSPTVAYSVLVVAKVEKGKSKKLKSVKELLGITIMERSSFEKNPIDFLEAKGYKEVKKDLIIKLPKYSLFELENGRKRMLASAGELQKGNELALPSKYVNFLYLASHYEKLKGSPEDNEQKQLFVEQHKHYLDEIIEQISEFSKRVILADANLDKVLSAYNKHRDKPIREQAENIIHLFTLTNLGAPAAFKYFDTTIDRKRYTSTKEVLDATLIHQSITGLYETRIDLSQLGGDGGGGSPAPGSSGGTLGDQGSRGSDPLPEPRVTLTVEGIPTEFLVNTGAEHSVLTKPMGKMGSKRTVVAGATGSKVYPWTTKRLLKIGQKQVTHSFLVIPECPAPLLGRDLLTKLKAQIQFSTEGPQVTWEDRPAMCLVLNLEEEYRLHEKPVPPSIDPSWLQLFPMVWAEKAGMGLANQVPPVVVELKSDASPVAVRQYPMSKEAREGIRPHIQRFLDLGILVPCQSPWNTPLLPVKKPGTNDYRPVQDLREVNKRVQDIHPTVPNPYNLLSSLPPSHTWYSVLDLKDAFFCLKLHPNSQPLFAFEWRDPEKGNTGQLTWTRLPQGFKNSPTLFNEALHRDLASFRALNPQVVMLQYVDDLLVAAPTYRDCKEGTRRLLQELSKLGYRVSAKKAQLCREEVTYLGYLLKGGKRWLTPARKATVMKIPTPTTPRQVREFLGKAGFCRLFIPGFASLAAPLYPLTRPKVPFTWTEAHQEAFGRIKEALLSAPALALPDLTKPFALYVDEKEGVARGVLTQTLGPWRRPVAYLSKKLDPVASGWPTCLKAIAAVALLLKDADKLTLGQNVLVIAPHNLESIVRQPPDRWMTNARMTHYQSLLLNERVSFAPPAILNPATLLPVESDDTPIHICSEILAEETGTRPDLRDQPLPGVPAWYTDGSSFIMDGRRQAGAAIVDNKRTVWASNLPEGTSAQKAELIALTQALRLAEGKSINIYTDSRYAFATAHVHGAIYKQRGWLTSAGKDIKNKEEILALLEAIHLPKRVAIIHCPGHQRGTDPVATGNRKADEAAKQAAQSTRILTETTKNAGKRTADGSEFEKRTADGSEFESPKKKAKVE

SEQ ID NO: 1803 - protein, 2237 aa, synthetic construct
MPAAKRVKLDGGDKKYSIGLDIGTNSVGWAVITDEYKVPSKKFKVLGNTDRHSIKKNLIGALLFDSGETAEATRLKRTARRRYTRRKNRICYLQEIFSNEMAKVDDSFFHRLEESFLVEEDKKHERHPIFGNIVDEVAYHEKYPTIYHLRKKLVDSTDKADLRLIYLALAHMIKFRGHFLIEGDLNPDNSDVDKLFIQLVQTYNQLFEENPINASGVDAKAILSARLSKSRRLENLIAQLPGEKKNGLFGNLIALSLGLTPNFKSNFDLAEDAKLQLSKDTYDDDLDNLLAQIGDQYADLFLAAKNLSDAILLSDILRVNTEITKAPLSASMIKRYDEHHQDLTLLKALVRQQLPEKYKEIFFDQSKNGYAGYIDGGASQEEFYKFIKPILEKMDGTEELLVKLNREDLLRKQRTFDNGSIPHQIHLGELHAILRRQEDFYPFLKDNREKIEKILTFRIPYYVGPLARGNSRFAWMTRKSEETITPWNFEEVVDKGASAQSFIERMTNFDKNLPNEKVLPKHSLLYEYFTVYNELTKVKYVTEGMRKPAFLSGEQKKAIVDLLFKTNRKVTVKQLKEDYFKKIECFDSVEISGVEDRFNASLGTYHDLLKIIKDKDFLDNEENEDILEDIVLTLTLFEDREMIEERLKTYAHLFDDKVMKQLKRRRYTGWGRLSRKLINGIRDKQSGKTILDFLKSDGFANRNFMQLIHDDSLTFKEDIQKAQVSGQGDSLHEHIANLAGSPAIKKGILQTVKVVDELVKVMGRHKPENIVIEMARENQTTQKGQKNSRERMKRIEEGIKELGSQILKEHPVENTQLQNEKLYLYYLQNGRDMYVDQELDINRLSDYDVDHIVPQSFLKDDSIDNKVLTRSDKARGKSDNVPSEEVVKKMKNYWRQLLNAKLITQRKFDNLTKAERGGLSELDKAGFIKRQLVETRQITKHVAQILDSRMNTKYDENDKLIREVKVITLKSKLVSDFRKDFQFYKVREINNYHHAHDAYLNAVVGTALIKKYPKLESEFVYGDYKVYDVRKMIAKSEQEIGKATAKYFFYSNIMNFFKTEITLANGEIRKRPLIETNGETGEIVWDKGRDFATVRKVLSMPQVNIVKKTEVQTGGFSKESILPKRNSDKLIARKKDWDPKKYGGFDSPTVAYSVLVVAKVEKGKSKKLKSVKELLGITIMERSSFEKNPIDFLEAKGYKEVKKDLIIKLPKYSLFELENGRKRMLASAGELQKGNELALPSKYVNFLYLASHYEKLKGSPEDNEQKQLFVEQHKHYLDEIIEQISEFSKRVILADANLDKVLSAYNKHRDKPIREQAENIIHLFTLTNLGAPAAFKYFDTTIDRKRYTSTKEVLDATLIHQSITGLYETRIDLSQLGGDGGGGGGSGGGGSGGGGSGGGGSGGGGSGGGGSGGTLGDQGSRGSDPLPEPRVTLTVEGIPTEFLVNTGAEHSVLTKPMGKMGSKRTVVAGATGSKVYPWTTKRLLKIGQKQVTHSFLVIPECPAPLLGRDLLTKLKAQIQFSTEGPQVTWEDRPAMCLVLNLEEEYRLHEKPVPPSIDPSWLQLFPMVWAEKAGMGLANQVPPVVVELKSDASPVAVRQYPMSKEAREGIRPHIQRFLDLGILVPCQSPWNTPLLPVKKPGTNDYRPVQDLREVNKRVQDIHPTVPNPYNLLSSLPPSHTWYSVLDLKDAFFCLKLHPNSQPLFAFEWRDPEKGNTGQLTWTRLPQGFKNSPTLFNEALHRDLASFRALNPQVVMLQYVDDLLVAAPTYRDCKEGTRRLLQELSKLGYRVSAKKAQLCREEVTYLGYLLKGGKRWLTPARKATVMKIPTPTTPRQVREFLGKAGFCRLFIPGFASLAAPLYPLTRPKVPFTWTEAHQEAFGRIKEALLSAPALALPDLTKPFALYVDEKEGVARGVLTQTLGPWRRPVAYLSKKLDPVASGWPTCLKAIAAVALLLKDADKLTLGQNVLVIAPHNLESIVRQPPDRWMTNARMTHYQSLLLNERVSFAPPAILNPATLLPVESDDTPIHICSEILAEETGTRPDLRDQPLPGVPAWYTDGSSFIMDGRRQAGAAIVDNKRTVWASNLPEGTSAQKAELIALTQALRLAEGKSINIYTDSRYAFATAHVHGAIYKQRGWLTSAGKDIKNKEEILALLEAIHLPKRVAIIHCPGHQRGTDPVATGNRKADEAAKQAAQSTRILTETTKNAGKRTADGSEFEKRTADGSEFESPKKKAKVE

SEQ ID NO: 1804 - protein, 2218 aa, synthetic construct
MPAAKRVKLDGGDKKYSIGLDIGTNSVGWAVITDEYKVPSKKFKVLGNTDRHSIKKNLIGALLFDSGETAEATRLKRTARRRYTRRKNRICYLQEIFSNEMAKVDDSFFHRLEESFLVEEDKKHERHPIFGNIVDEVAYHEKYPTIYHLRKKLVDSTDKADLRLIYLALAHMIKFRGHFLIEGDLNPDNSDVDKLFIQLVQTYNQLFEENPINASGVDAKAILSARLSKSRRLENLIAQLPGEKKNGLFGNLIALSLGLTPNFKSNFDLAEDAKLQLSKDTYDDDLDNLLAQIGDQYADLFLAAKNLSDAILLSDILRVNTEITKAPLSASMIKRYDEHHQDLTLLKALVRQQLPEKYKEIFFDQSKNGYAGYIDGGASQEEFYKFIKPILEKMDGTEELLVKLNREDLLRKQRTFDNGSIPHQIHLGELHAILRRQEDFYPFLKDNREKIEKILTFRIPYYVGPLARGNSRFAWMTRKSEETITPWNFEEVVDKGASAQSFIERMTNFDKNLPNEKVLPKHSLLYEYFTVYNELTKVKYVTEGMRKPAFLSGEQKKAIVDLLFKTNRKVTVKQLKEDYFKKIECFDSVEISGVEDRFNASLGTYHDLLKIIKDKDFLDNEENEDILEDIVLTLTLFEDREMIEERLKTYAHLFDDKVMKQLKRRRYTGWGRLSRKLINGIRDKQSGKTILDFLKSDGFANRNFMQLIHDDSLTFKEDIQKAQVSGQGDSLHEHIANLAGSPAIKKGILQTVKVVDELVKVMGRHKPENIVIEMARENQTTQKGQKNSRERMKRIEEGIKELGSQILKEHPVENTQLQNEKLYLYYLQNGRDMYVDQELDINRLSDYDVDHIVPQSFLKDDSIDNKVLTRSDKARGKSDNVPSEEVVKKMKNYWRQLLNAKLITQRKFDNLTKAERGGLSELDKAGFIKRQLVETRQITKHVAQILDSRMNTKYDENDKLIREVKVITLKSKLVSDFRKDFQFYKVREINNYHHAHDAYLNAVVGTALIKKYPKLESEFVYGDYKVYDVRKMIAKSEQEIGKATAKYFFYSNIMNFFKTEITLANGEIRKRPLIETNGETGEIVWDKGRDFATVRKVLSMPQVNIVKKTEVQTGGFSKESILPKRNSDKLIARKKDWDPKKYGGFDSPTVAYSVLVVAKVEKGKSKKLKSVKELLGITIMERSSFEKNPIDFLEAKGYKEVKKDLIIKLPKYSLFELENGRKRMLASAGELQKGNELALPSKYVNFLYLASHYEKLKGSPEDNEQKQLFVEQHKHYLDEIIEQISEFSKRVILADANLDKVLSAYNKHRDKPIREQAENIIHLFTLTNLGAPAAFKYFDTTIDRKRYTSTKEVLDATLIHQSITGLYETRIDLSQLGGDGGEAAAKGSSPAPGGTLGDQGSRGSDPLPEPRVTLTVEGIPTEFLVNTGAEHSVLTKPMGKMGSKRTVVAGATGSKVYPWTTKRLLKIGQKQVTHSFLVIPECPAPLLGRDLLTKLKAQIQFSTEGPQVTWEDRPAMCLVLNLEEEYRLHEKPVPPSIDPSWLQLFPMVWAEKAGMGLANQVPPVVVELKSDASPVAVRQYPMSKEAREGIRPHIQRFLDLGILVPCQSPWNTPLLPVKKPGTNDYRPVQDLREVNKRVQDIHPTVPNPYNLLSSLPPSHTWYSVLDLKDAFFCLKLHPNSQPLFAFEWRDPEKGNTGQLTWTRLPQGFKNSPTLFNEALHRDLASFRALNPQVVMLQYVDDLLVAAPTYRDCKEGTRRLLQELSKLGYRVSAKKAQLCREEVTYLGYLLKGGKRWLTPARKATVMKIPTPTTPRQVREFLGKAGFCRLFIPGFASLAAPLYPLTRPKVPFTWTEAHQEAFGRIKEALLSAPALALPDLTKPFALYVDEKEGVARGVLTQTLGPWRRPVAYLSKKLDPVASGWPTCLKAIAAVALLLKDADKLTLGQNVLVIAPHNLESIVRQPPDRWMTNARMTHYQSLLLNERVSFAPPAILNPATLLPVESDDTPIHICSEILAEETGTRPDLRDQPLPGVPAWYTDGSSFIMDGRRQAGAAIVDNKRTVWASNLPEGTSAQKAELIALTQALRLAEGKSINIYTDSRYAFATAHVHGAIYKQRGWLTSAGKDIKNKEEILALLEAIHLPKRVAIIHCPGHQRGTDPVATGNRKADEAAKQAAQSTRILTETTKNAGKRTADGSEFEKRTADGSEFESPKKKAKVE

SEQ ID NO: 1805 - protein, 2218 aa, synthetic construct
MPAAKRVKLDGGDKKYSIGLDIGTNSVGWAVITDEYKVPSKKFKVLGNTDRHSIKKNLIGALLFDSGETAEATRLKRTARRRYTRRKNRICYLQEIFSNEMAKVDDSFFHRLEESFLVEEDKKHERHPIFGNIVDEVAYHEKYPTIYHLRKKLVDSTDKADLRLIYLALAHMIKFRGHFLIEGDLNPDNSDVDKLFIQLVQTYNQLFEENPINASGVDAKAILSARLSKSRRLENLIAQLPGEKKNGLFGNLIALSLGLTPNFKSNFDLAEDAKLQLSKDTYDDDLDNLLAQIGDQYADLFLAAKNLSDAILLSDILRVNTEITKAPLSASMIKRYDEHHQDLTLLKALVRQQLPEKYKEIFFDQSKNGYAGYIDGGASQEEFYKFIKPILEKMDGTEELLVKLNREDLLRKQRTFDNGSIPHQIHLGELHAILRRQEDFYPFLKDNREKIEKILTFRIPYYVGPLARGNSRFAWMTRKSEETITPWNFEEVVDKGASAQSFIERMTNFDKNLPNEKVLPKHSLLYEYFTVYNELTKVKYVTEGMRKPAFLSGEQKKAIVDLLFKTNRKVTVKQLKEDYFKKIECFDSVEISGVEDRFNASLGTYHDLLKIIKDKDFLDNEENEDILEDIVLTLTLFEDREMIEERLKTYAHLFDDKVMKQLKRRRYTGWGRLSRKLINGIRDKQSGKTILDFLKSDGFANRNFMQLIHDDSLTFKEDIQKAQVSGQGDSLHEHIANLAGSPAIKKGILQTVKVVDELVKVMGRHKPENIVIEMARENQTTQKGQKNSRERMKRIEEGIKELGSQILKEHPVENTQLQNEKLYLYYLQNGRDMYVDQELDINRLSDYDVDHIVPQSFLKDDSIDNKVLTRSDKARGKSDNVPSEEVVKKMKNYWRQLLNAKLITQRKFDNLTKAERGGLSELDKAGFIKRQLVETRQITKHVAQILDSRMNTKYDENDKLIREVKVITLKSKLVSDFRKDFQFYKVREINNYHHAHDAYLNAVVGTALIKKYPKLESEFVYGDYKVYDVRKMIAKSEQEIGKATAKYFFYSNIMNFFKTEITLANGEIRKRPLIETNGETGEIVWDKGRDFATVRKVLSMPQVNIVKKTEVQTGGFSKESILPKRNSDKLIARKKDWDPKKYGGFDSPTVAYSVLVVAKVEKGKSKKLKSVKELLGITIMERSSFEKNPIDFLEAKGYKEVKKDLIIKLPKYSLFELENGRKRMLASAGELQKGNELALPSKYVNFLYLASHYEKLKGSPEDNEQKQLFVEQHKHYLDEIIEQISEFSKRVILADANLDKVLSAYNKHRDKPIREQAENIIHLFTLTNLGAPAAFKYFDTTIDRKRYTSTKEVLDATLIHQSITGLYETRIDLSQLGGDGGGGSGSSEAAAKGGTLGDQGSRGSDPLPEPRVTLTVEGIPTEFLVNTGAEHSVLTKPMGKMGSKRTVVAGATGSKVYPWTTKRLLKIGQKQVTHSFLVIPECPAPLLGRDLLTKLKAQIQFSTEGPQVTWEDRPAMCLVLNLEEEYRLHEKPVPPSIDPSWLQLFPMVWAEKAGMGLANQVPPVVVELKSDASPVAVRQYPMSKEAREGIRPHIQRFLDLGILVPCQSPWNTPLLPVKKPGTNDYRPVQDLREVNKRVQDIHPTVPNPYNLLSSLPPSHTWYSVLDLKDAFFCLKLHPNSQPLFAFEWRDPEKGNTGQLTWTRLPQGFKNSPTLFNEALHRDLASFRALNPQVVMLQYVDDLLVAAPTYRDCKEGTRRLLQELSKLGYRVSAKKAQLCREEVTYLGYLLKGGKRWLTPARKATVMKIPTPTTPRQVREFLGKAGFCRLFIPGFASLAAPLYPLTRPKVPFTWTEAHQEAFGRIKEALLSAPALALPDLTKPFALYVDEKEGVARGVLTQTLGPWRRPVAYLSKKLDPVASGWPTCLKAIAAVALLLKDADKLTLGQNVLVIAPHNLESIVRQPPDRWMTNARMTHYQSLLLNERVSFAPPAILNPATLLPVESDDTPIHICSEILAEETGTRPDLRDQPLPGVPAWYTDGSSFIMDGRRQAGAAIVDNKRTVWASNLPEGTSAQKAELIALTQALRLAEGKSINIYTDSRYAFATAHVHGAIYKQRGWLTSAGKDIKNKEEILALLEAIHLPKRVAIIHCPGHQRGTDPVATGNRKADEAAKQAAQSTRILTETTKNAGKRTADGSEFEKRTADGSEFESPKKKAKVE

SEQ ID NO: 1806 - protein, 2216 aa, synthetic construct
MPAAKRVKLDGGDKKYSIGLDIGTNSVGWAVITDEYKVPSKKFKVLGNTDRHSIKKNLIGALLFDSGETAEATRLKRTARRRYTRRKNRICYLQEIFSNEMAKVDDSFFHRLEESFLVEEDKKHERHPIFGNIVDEVAYHEKYPTIYHLRKKLVDSTDKADLRLIYLALAHMIKFRGHFLIEGDLNPDNSDVDKLFIQLVQTYNQLFEENPINASGVDAKAILSARLSKSRRLENLIAQLPGEKKNGLFGNLIALSLGLTPNFKSNFDLAEDAKLQLSKDTYDDDLDNLLAQIGDQYADLFLAAKNLSDAILLSDILRVNTEITKAPLSASMIKRYDEHHQDLTLLKALVRQQLPEKYKEIFFDQSKNGYAGYIDGGASQEEFYKFIKPILEKMDGTEELLVKLNREDLLRKQRTFDNGSIPHQIHLGELHAILRRQEDFYPFLKDNREKIEKILTFRIPYYVGPLARGNSRFAWMTRKSEETITPWNFEEVVDKGASAQSFIERMTNFDKNLPNEKVLPKHSLLYEYFTVYNELTKVKYVTEGMRKPAFLSGEQKKAIVDLLFKTNRKVTVKQLKEDYFKKIECFDSVEISGVEDRFNASLGTYHDLLKIIKDKDFLDNEENEDILEDIVLTLTLFEDREMIEERLKTYAHLFDDKVMKQLKRRRYTGWGRLSRKLINGIRDKQSGKTILDFLKSDGFANRNFMQLIHDDSLTFKEDIQKAQVSGQGDSLHEHIANLAGSPAIKKGILQTVKVVDELVKVMGRHKPENIVIEMARENQTTQKGQKNSRERMKRIEEGIKELGSQILKEHPVENTQLQNEKLYLYYLQNGRDMYVDQELDINRLSDYDVDHIVPQSFLKDDSIDNKVLTRSDKARGKSDNVPSEEVVKKMKNYWRQLLNAKLITQRKFDNLTKAERGGLSELDKAGFIKRQLVETRQITKHVAQILDSRMNTKYDENDKLIREVKVITLKSKLVSDFRKDFQFYKVREINNYHHAHDAYLNAVVGTALIKKYPKLESEFVYGDYKVYDVRKMIAKSEQEIGKATAKYFFYSNIMNFFKTEITLANGEIRKRPLIETNGETGEIVWDKGRDFATVRKVLSMPQVNIVKKTEVQTGGFSKESILPKRNSDKLIARKKDWDPKKYGGFDSPTVAYSVLVVAKVEKGKSKKLKSVKELLGITIMERSSFEKNPIDFLEAKGYKEVKKDLIIKLPKYSLFELENGRKRMLASAGELQKGNELALPSKYVNFLYLASHYEKLKGSPEDNEQKQLFVEQHKHYLDEIIEQISEFSKRVILADANLDKVLSAYNKHRDKPIREQAENIIHLFTLTNLGAPAAFKYFDTTIDRKRYTSTKEVLDATLIHQSITGLYETRIDLSQLGGDGGPAPGSSGGGGGTLGDQGSRGSDPLPEPRVTLTVEGIPTEFLVNTGAEHSVLTKPMGKMGSKRTVVAGATGSKVYPWTTKRLLKIGQKQVTHSFLVIPECPAPLLGRDLLTKLKAQIQFSTEGPQVTWEDRPAMCLVLNLEEEYRLHEKPVPPSIDPSWLQLFPMVWAEKAGMGLANQVPPVVVELKSDASPVAVRQYPMSKEAREGIRPHIQRFLDLGILVPCQSPWNTPLLPVKKPGTNDYRPVQDLREVNKRVQDIHPTVPNPYNLLSSLPPSHTWYSVLDLKDAFFCLKLHPNSQPLFAFEWRDPEKGNTGQLTWTRLPQGFKNSPTLFNEALHRDLASFRALNPQVVMLQYVDDLLVAAPTYRDCKEGTRRLLQELSKLGYRVSAKKAQLCREEVTYLGYLLKGGKRWLTPARKATVMKIPTPTTPRQVREFLGKAGFCRLFIPGFASLAAPLYPLTRPKVPFTWTEAHQEAFGRIKEALLSAPALALPDLTKPFALYVDEKEGVARGVLTQTLGPWRRPVAYLSKKLDPVASGWPTCLKAIAAVALLLKDADKLTLGQNVLVIAPHNLESIVRQPPDRWMTNARMTHYQSLLLNERVSFAPPAILNPATLLPVESDDTPIHICSEILAEETGTRPDLRDQPLPGVPAWYTDGSSFIMDGRRQAGAAIVDNKRTVWASNLPEGTSAQKAELIALTQALRLAEGKSINIYTDSRYAFATAHVHGAIYKQRGWLTSAGKDIKNKEEILALLEAIHLPKRVAIIHCPGHQRGTDPVATGNRKADEAAKQAAQSTRILTETTKNAGKRTADGSEFEKRTADGSEFESPKKKAKVE

SEQ ID NO: 1807 - protein, 2213 aa, synthetic construct
MPAAKRVKLDGGDKKYSIGLDIGTNSVGWAVITDEYKVPSKKFKVLGNTDRHSIKKNLIGALLFDSGETAEATRLKRTARRRYTRRKNRICYLQEIFSNEMAKVDDSFFHRLEESFLVEEDKKHERHPIFGNIVDEVAYHEKYPTIYHLRKKLVDSTDKADLRLIYLALAHMIKFRGHFLIEGDLNPDNSDVDKLFIQLVQTYNQLFEENPINASGVDAKAILSARLSKSRRLENLIAQLPGEKKNGLFGNLIALSLGLTPNFKSNFDLAEDAKLQLSKDTYDDDLDNLLAQIGDQYADLFLAAKNLSDAILLSDILRVNTEITKAPLSASMIKRYDEHHQDLTLLKALVRQQLPEKYKEIFFDQSKNGYAGYIDGGASQEEFYKFIKPILEKMDGTEELLVKLNREDLLRKQRTFDNGSIPHQIHLGELHAILRRQEDFYPFLKDNREKIEKILTFRIPYYVGPLARGNSRFAWMTRKSEETITPWNFEEVVDKGASAQSFIERMTNFDKNLPNEKVLPKHSLLYEYFTVYNELTKVKYVTEGMRKPAFLSGEQKKAIVDLLFKTNRKVTVKQLKEDYFKKIECFDSVEISGVEDRFNASLGTYHDLLKIIKDKDFLDNEENEDILEDIVLTLTLFEDREMIEERLKTYAHLFDDKVMKQLKRRRYTGWGRLSRKLINGIRDKQSGKTILDFLKSDGFANRNFMQLIHDDSLTFKEDIQKAQVSGQGDSLHEHIANLAGSPAIKKGILQTVKVVDELVKVMGRHKPENIVIEMARENQTTQKGQKNSRERMKRIEEGIKELGSQILKEHPVENTQLQNEKLYLYYLQNGRDMYVDQELDINRLSDYDVDHIVPQSFLKDDSIDNKVLTRSDKARGKSDNVPSEEVVKKMKNYWRQLLNAKLITQRKFDNLTKAERGGLSELDKAGFIKRQLVETRQITKHVAQILDSRMNTKYDENDKLIREVKVITLKSKLVSDFRKDFQFYKVREINNYHHAHDAYLNAVVGTALIKKYPKLESEFVYGDYKVYDVRKMIAKSEQEIGKATAKYFFYSNIMNFFKTEITLANGEIRKRPLIETNGETGEIVWDKGRDFATVRKVLSMPQVNIVKKTEVQTGGFSKESILPKRNSDKLIARKKDWDPKKYGGFDSPTVAYSVLVVAKVEKGKSKKLKSVKELLGITIMERSSFEKNPIDFLEAKGYKEVKKDLIIKLPKYSLFELENGRKRMLASAGELQKGNELALPSKYVNFLYLASHYEKLKGSPEDNEQKQLFVEQHKHYLDEIIEQISEFSKRVILADANLDKVLSAYNKHRDKPIREQAENIIHLFTLTNLGAPAAFKYFDTTIDRKRYTSTKEVLDATLIHQSITGLYETRIDLSQLGGDGGGGGPAPGGTLGDQGSRGSDPLPEPRVTLTVEGIPTEFLVNTGAEHSVLTKPMGKMGSKRTVVAGATGSKVYPWTTKRLLKIGQKQVTHSFLVIPECPAPLLGRDLLTKLKAQIQFSTEGPQVTWEDRPAMCLVLNLEEEYRLHEKPVPPSIDPSWLQLFPMVWAEKAGMGLANQVPPVVVELKSDASPVAVRQYPMSKEAREGIRPHIQRFLDLGILVPCQSPWNTPLLPVKKPGTNDYRPVQDLREVNKRVQDIHPTVPNPYNLLSSLPPSHTWYSVLDLKDAFFCLKLHPNSQPLFAFEWRDPEKGNTGQLTWTRLPQGFKNSPTLFNEALHRDLASFRALNPQVVMLQYVDDLLVAAPTYRDCKEGTRRLLQELSKLGYRVSAKKAQLCREEVTYLGYLLKGGKRWLTPARKATVMKIPTPTTPRQVREFLGKAGFCRLFIPGFASLAAPLYPLTRPKVPFTWTEAHQEAFGRIKEALLSAPALALPDLTKPFALYVDEKEGVARGVLTQTLGPWRRPVAYLSKKLDPVASGWPTCLKAIAAVALLLKDADKLTLGQNVLVIAPHNLESIVRQPPDRWMTNARMTHYQSLLLNERVSFAPPAILNPATLLPVESDDTPIHICSEILAEETGTRPDLRDQPLPGVPAWYTDGSSFIMDGRRQAGAAIVDNKRTVWASNLPEGTSAQKAELIALTQALRLAEGKSINIYTDSRYAFATAHVHGAIYKQRGWLTSAGKDIKNKEEILALLEAIHLPKRVAIIHCPGHQRGTDPVATGNRKADEAAKQAAQSTRILTETTKNAGKRTADGSEFEKRTADGSEFESPKKKAKVE

SEQ ID NO: 1808 - protein, 2213 aa, synthetic construct
MPAAKRVKLDGGDKKYSIGLDIGTNSVGWAVITDEYKVPSKKFKVLGNTDRHSIKKNLIGALLFDSGETAEATRLKRTARRRYTRRKNRICYLQEIFSNEMAKVDDSFFHRLEESFLVEEDKKHERHPIFGNIVDEVAYHEKYPTIYHLRKKLVDSTDKADLRLIYLALAHMIKFRGHFLIEGDLNPDNSDVDKLFIQLVQTYNQLFEENPINASGVDAKAILSARLSKSRRLENLIAQLPGEKKNGLFGNLIALSLGLTPNFKSNFDLAEDAKLQLSKDTYDDDLDNLLAQIGDQYADLFLAAKNLSDAILLSDILRVNTEITKAPLSASMIKRYDEHHQDLTLLKALVRQQLPEKYKEIFFDQSKNGYAGYIDGGASQEEFYKFIKPILEKMDGTEELLVKLNREDLLRKQRTFDNGSIPHQIHLGELHAILRRQEDFYPFLKDNREKIEKILTFRIPYYVGPLARGNSRFAWMTRKSEETITPWNFEEVVDKGASAQSFIERMTNFDKNLPNEKVLPKHSLLYEYFTVYNELTKVKYVTEGMRKPAFLSGEQKKAIVDLLFKTNRKVTVKQLKEDYFKKIECFDSVEISGVEDRFNASLGTYHDLLKIIKDKDFLDNEENEDILEDIVLTLTLFEDREMIEERLKTYAHLFDDKVMKQLKRRRYTGWGRLSRKLINGIRDKQSGKTILDFLKSDGFANRNFMQLIHDDSLTFKEDIQKAQVSGQGDSLHEHIANLAGSPAIKKGILQTVKVVDELVKVMGRHKPENIVIEMARENQTTQKGQKNSRERMKRIEEGIKELGSQILKEHPVENTQLQNEKLYLYYLQNGRDMYVDQELDINRLSDYDVDHIVPQSFLKDDSIDNKVLTRSDKARGKSDNVPSEEVVKKMKNYWRQLLNAKLITQRKFDNLTKAERGGLSELDKAGFIKRQLVETRQITKHVAQILDSRMNTKYDENDKLIREVKVITLKSKLVSDFRKDFQFYKVREINNYHHAHDAYLNAVVGTALIKKYPKLESEFVYGDYKVYDVRKMIAKSEQEIGKATAKYFFYSNIMNFFKTEITLANGEIRKRPLIETNGETGEIVWDKGRDFATVRKVLSMPQVNIVKKTEVQTGGFSKESILPKRNSDKLIARKKDWDPKKYGGFDSPTVAYSVLVVAKVEKGKSKKLKSVKELLGITIMERSSFEKNPIDFLEAKGYKEVKKDLIIKLPKYSLFELENGRKRMLASAGELQKGNELALPSKYVNFLYLASHYEKLKGSPEDNEQKQLFVEQHKHYLDEIIEQISEFSKRVILADANLDKVLSAYNKHRDKPIREQAENIIHLFTLTNLGAPAAFKYFDTTIDRKRYTSTKEVLDATLIHQSITGLYETRIDLSQLGGDGGGGSGSSGGTLGDQGSRGSDPLPEPRVTLTVEGIPTEFLVNTGAEHSVLTKPMGKMGSKRTVVAGATGSKVYPWTTKRLLKIGQKQVTHSFLVIPECPAPLLGRDLLTKLKAQIQFSTEGPQVTWEDRPAMCLVLNLEEEYRLHEKPVPPSIDPSWLQLFPMVWAEKAGMGLANQVPPVVVELKSDASPVAVRQYPMSKEAREGIRPHIQRFLDLGILVPCQSPWNTPLLPVKKPGTNDYRPVQDLREVNKRVQDIHPTVPNPYNLLSSLPPSHTWYSVLDLKDAFFCLKLHPNSQPLFAFEWRDPEKGNTGQLTWTRLPQGFKNSPTLFNEALHRDLASFRALNPQVVMLQYVDDLLVAAPTYRDCKEGTRRLLQELSKLGYRVSAKKAQLCREEVTYLGYLLKGGKRWLTPARKATVMKIPTPTTPRQVREFLGKAGFCRLFIPGFASLAAPLYPLTRPKVPFTWTEAHQEAFGRIKEALLSAPALALPDLTKPFALYVDEKEGVARGVLTQTLGPWRRPVAYLSKKLDPVASGWPTCLKAIAAVALLLKDADKLTLGQNVLVIAPHNLESIVRQPPDRWMTNARMTHYQSLLLNERVSFAPPAILNPATLLPVESDDTPIHICSEILAEETGTRPDLRDQPLPGVPAWYTDGSSFIMDGRRQAGAAIVDNKRTVWASNLPEGTSAQKAELIALTQALRLAEGKSINIYTDSRYAFATAHVHGAIYKQRGWLTSAGKDIKNKEEILALLEAIHLPKRVAIIHCPGHQRGTDPVATGNRKADEAAKQAAQSTRILTETTKNAGKRTADGSEFEKRTADGSEFESPKKKAKVE

SEQ ID NO: 1809 - protein, 2227 aa, synthetic construct
MPAAKRVKLDGGDKKYSIGLDIGTNSVGWAVITDEYKVPSKKFKVLGNTDRHSIKKNLIGALLFDSGETAEATRLKRTARRRYTRRKNRICYLQEIFSNEMAKVDDSFFHRLEESFLVEEDKKHERHPIFGNIVDEVAYHEKYPTIYHLRKKLVDSTDKADLRLIYLALAHMIKFRGHFLIEGDLNPDNSDVDKLFIQLVQTYNQLFEENPINASGVDAKAILSARLSKSRRLENLIAQLPGEKKNGLFGNLIALSLGLTPNFKSNFDLAEDAKLQLSKDTYDDDLDNLLAQIGDQYADLFLAAKNLSDAILLSDILRVNTEITKAPLSASMIKRYDEHHQDLTLLKALVRQQLPEKYKEIFFDQSKNGYAGYIDGGASQEEFYKFIKPILEKMDGTEELLVKLNREDLLRKQRTFDNGSIPHQIHLGELHAILRRQEDFYPFLKDNREKIEKILTFRIPYYVGPLARGNSRFAWMTRKSEETITPWNFEEVVDKGASAQSFIERMTNFDKNLPNEKVLPKHSLLYEYFTVYNELTKVKYVTEGMRKPAFLSGEQKKAIVDLLFKTNRKVTVKQLKEDYFKKIECFDSVEISGVEDRFNASLGTYHDLLKIIKDKDFLDNEENEDILEDIVLTLTLFEDREMIEERLKTYAHLFDDKVMKQLKRRRYTGWGRLSRKLINGIRDKQSGKTILDFLKSDGFANRNFMQLIHDDSLTFKEDIQKAQVSGQGDSLHEHIANLAGSPAIKKGILQTVKVVDELVKVMGRHKPENIVIEMARENQTTQKGQKNSRERMKRIEEGIKELGSQILKEHPVENTQLQNEKLYLYYLQNGRDMYVDQELDINRLSDYDVDHIVPQSFLKDDSIDNKVLTRSDKARGKSDNVPSEEVVKKMKNYWRQLLNAKLITQRKFDNLTKAERGGLSELDKAGFIKRQLVETRQITKHVAQILDSRMNTKYDENDKLIREVKVITLKSKLVSDFRKDFQFYKVREINNYHHAHDAYLNAVVGTALIKKYPKLESEFVYGDYKVYDVRKMIAKSEQEIGKATAKYFFYSNIMNFFKTEITLANGEIRKRPLIETNGETGEIVWDKGRDFATVRKVLSMPQVNIVKKTEVQTGGFSKESILPKRNSDKLIARKKDWDPKKYGGFDSPTVAYSVLVVAKVEKGKSKKLKSVKELLGITIMERSSFEKNPIDFLEAKGYKEVKKDLIIKLPKYSLFELENGRKRMLASAGELQKGNELALPSKYVNFLYLASHYEKLKGSPEDNEQKQLFVEQHKHYLDEIIEQISEFSKRVILADANLDKVLSAYNKHRDKPIREQAENIIHLFTLTNLGAPAAFKYFDTTIDRKRYTSTKEVLDATLIHQSITGLYETRIDLSQLGGDGGEAAAKEAAAKEAAAKEAAAKGGTLGDQGSRGSDPLPEPRVTLTVEGIPTEFLVNTGAEHSVLTKPMGKMGSKRTVVAGATGSKVYPWTTKRLLKIGQKQVTHSFLVIPECPAPLLGRDLLTKLKAQIQFSTEGPQVTWEDRPAMCLVLNLEEEYRLHEKPVPPSIDPSWLQLFPMVWAEKAGMGLANQVPPVVVELKSDASPVAVRQYPMSKEAREGIRPHIQRFLDLGILVPCQSPWNTPLLPVKKPGTNDYRPVQDLREVNKRVQDIHPTVPNPYNLLSSLPPSHTWYSVLDLKDAFFCLKLHPNSQPLFAFEWRDPEKGNTGQLTWTRLPQGFKNSPTLFNEALHRDLASFRALNPQVVMLQYVDDLLVAAPTYRDCKEGTRRLLQELSKLGYRVSAKKAQLCREEVTYLGYLLKGGKRWLTPARKATVMKIPTPTTPRQVREFLGKAGFCRLFIPGFASLAAPLYPLTRPKVPFTWTEAHQEAFGRIKEALLSAPALALPDLTKPFALYVDEKEGVARGVLTQTLGPWRRPVAYLSKKLDPVASGWPTCLKAIAAVALLLKDADKLTLGQNVLVIAPHNLESIVRQPPDRWMTNARMTHYQSLLLNERVSFAPPAILNPATLLPVESDDTPIHICSEILAEETGTRPDLRDQPLPGVPAWYTDGSSFIMDGRRQAGAAIVDNKRTVWASNLPEGTSAQKAELIALTQALRLAEGKSINIYTDSRYAFATAHVHGAIYKQRGWLTSAGKDIKNKEEILALLEAIHLPKRVAIIHCPGHQRGTDPVATGNRKADEAAKQAAQSTRILTETTKNAGKRTADGSEFEKRTADGSEFESPKKKAKVE

SEQ ID NO: 1810 - protein, 2218 aa, synthetic construct
MPAAKRVKLDGGDKKYSIGLDIGTNSVGWAVITDEYKVPSKKFKVLGNTDRHSIKKNLIGALLFDSGETAEATRLKRTARRRYTRRKNRICYLQEIFSNEMAKVDDSFFHRLEESFLVEEDKKHERHPIFGNIVDEVAYHEKYPTIYHLRKKLVDSTDKADLRLIYLALAHMIKFRGHFLIEGDLNPDNSDVDKLFIQLVQTYNQLFEENPINASGVDAKAILSARLSKSRRLENLIAQLPGEKKNGLFGNLIALSLGLTPNFKSNFDLAEDAKLQLSKDTYDDDLDNLLAQIGDQYADLFLAAKNLSDAILLSDILRVNTEITKAPLSASMIKRYDEHHQDLTLLKALVRQQLPEKYKEIFFDQSKNGYAGYIDGGASQEEFYKFIKPILEKMDGTEELLVKLNREDLLRKQRTFDNGSIPHQIHLGELHAILRRQEDFYPFLKDNREKIEKILTFRIPYYVGPLARGNSRFAWMTRKSEETITPWNFEEVVDKGASAQSFIERMTNFDKNLPNEKVLPKHSLLYEYFTVYNELTKVKYVTEGMRKPAFLSGEQKKAIVDLLFKTNRKVTVKQLKEDYFKKIECFDSVEISGVEDRFNASLGTYHDLLKIIKDKDFLDNEENEDILEDIVLTLTLFEDREMIEERLKTYAHLFDDKVMKQLKRRRYTGWGRLSRKLINGIRDKQSGKTILDFLKSDGFANRNFMQLIHDDSLTFKEDIQKAQVSGQGDSLHEHIANLAGSPAIKKGILQTVKVVDELVKVMGRHKPENIVIEMARENQTTQKGQKNSRERMKRIEEGIKELGSQILKEHPVENTQLQNEKLYLYYLQNGRDMYVDQELDINRLSDYDVDHIVPQSFLKDDSIDNKVLTRSDKARGKSDNVPSEEVVKKMKNYWRQLLNAKLITQRKFDNLTKAERGGLSELDKAGFIKRQLVETRQITKHVAQILDSRMNTKYDENDKLIREVKVITLKSKLVSDFRKDFQFYKVREINNYHHAHDAYLNAVVGTALIKKYPKLESEFVYGDYKVYDVRKMIAKSEQEIGKATAKYFFYSNIMNFFKTEITLANGEIRKRPLIETNGETGEIVWDKGRDFATVRKVLSMPQVNIVKKTEVQTGGFSKESILPKRNSDKLIARKKDWDPKKYGGFDSPTVAYSVLVVAKVEKGKSKKLKSVKELLGITIMERSSFEKNPIDFLEAKGYKEVKKDLIIKLPKYSLFELENGRKRMLASAGELQKGNELALPSKYVNFLYLASHYEKLKGSPEDNEQKQLFVEQHKHYLDEIIEQISEFSKRVILADANLDKVLSAYNKHRDKPIREQAENIIHLFTLTNLGAPAAFKYFDTTIDRKRYTSTKEVLDATLIHQSITGLYETRIDLSQLGGDGGPAPGGSEAAAKGGTLGDQGSRGSDPLPEPRVTLTVEGIPTEFLVNTGAEHSVLTKPMGKMGSKRTVVAGATGSKVYPWTTKRLLKIGQKQVTHSFLVIPECPAPLLGRDLLTKLKAQIQFSTEGPQVTWEDRPAMCLVLNLEEEYRLHEKPVPPSIDPSWLQLFPMVWAEKAGMGLANQVPPVVVELKSDASPVAVRQYPMSKEAREGIRPHIQRFLDLGILVPCQSPWNTPLLPVKKPGTNDYRPVQDLREVNKRVQDIHPTVPNPYNLLSSLPPSHTWYSVLDLKDAFFCLKLHPNSQPLFAFEWRDPEKGNTGQLTWTRLPQGFKNSPTLFNEALHRDLASFRALNPQVVMLQYVDDLLVAAPTYRDCKEGTRRLLQELSKLGYRVSAKKAQLCREEVTYLGYLLKGGKRWLTPARKATVMKIPTPTTPRQVREFLGKAGFCRLFIPGFASLAAPLYPLTRPKVPFTWTEAHQEAFGRIKEALLSAPALALPDLTKPFALYVDEKEGVARGVLTQTLGPWRRPVAYLSKKLDPVASGWPTCLKAIAAVALLLKDADKLTLGQNVLVIAPHNLESIVRQPPDRWMTNARMTHYQSLLLNERVSFAPPAILNPATLLPVESDDTPIHICSEILAEETGTRPDLRDQPLPGVPAWYTDGSSFIMDGRRQAGAAIVDNKRTVWASNLPEGTSAQKAELIALTQALRLAEGKSINIYTDSRYAFATAHVHGAIYKQRGWLTSAGKDIKNKEEILALLEAIHLPKRVAIIHCPGHQRGTDPVATGNRKADEAAKQAAQSTRILTETTKNAGKRTADGSEFEKRTADGSEFESPKKKAKVE

SEQ ID NO: 1811 - protein, 2213 aa, synthetic construct
MPAAKRVKLDGGDKKYSIGLDIGTNSVGWAVITDEYKVPSKKFKVLGNTDRHSIKKNLIGALLFDSGETAEATRLKRTARRRYTRRKNRICYLQEIFSNEMAKVDDSFFHRLEESFLVEEDKKHERHPIFGNIVDEVAYHEKYPTIYHLRKKLVDSTDKADLRLIYLALAHMIKFRGHFLIEGDLNPDNSDVDKLFIQLVQTYNQLFEENPINASGVDAKAILSARLSKSRRLENLIAQLPGEKKNGLFGNLIALSLGLTPNFKSNFDLAEDAKLQLSKDTYDDDLDNLLAQIGDQYADLFLAAKNLSDAILLSDILRVNTEITKAPLSASMIKRYDEHHQDLTLLKALVRQQLPEKYKEIFFDQSKNGYAGYIDGGASQEEFYKFIKPILEKMDGTEELLVKLNREDLLRKQRTFDNGSIPHQIHLGELHAILRRQEDFYPFLKDNREKIEKILTFRIPYYVGPLARGNSRFAWMTRKSEETITPWNFEEVVDKGASAQSFIERMTNFDKNLPNEKVLPKHSLLYEYFTVYNELTKVKYVTEGMRKPAFLSGEQKKAIVDLLFKTNRKVTVKQLKEDYFKKIECFDSVEISGVEDRFNASLGTYHDLLKIIKDKDFLDNEENEDILEDIVLTLTLFEDREMIEERLKTYAHLFDDKVMKQLKRRRYTGWGRLSRKLINGIRDKQSGKTILDFLKSDGFANRNFMQLIHDDSLTFKEDIQKAQVSGQGDSLHEHIANLAGSPAIKKGILQTVKVVDELVKVMGRHKPENIVIEMARENQTTQKGQKNSRERMKRIEEGIKELGSQILKEHPVENTQLQNEKLYLYYLQNGRDMYVDQELDINRLSDYDVDHIVPQSFLKDDSIDNKVLTRSDKARGKSDNVPSEEVVKKMKNYWRQLLNAKLITQRKFDNLTKAERGGLSELDKAGFIKRQLVETRQITKHVAQILDSRMNTKYDENDKLIREVKVITLKSKLVSDFRKDFQFYKVREINNYHHAHDAYLNAVVGTALIKKYPKLESEFVYGDYKVYDVRKMIAKSEQEIGKATAKYFFYSNIMNFFKTEITLANGEIRKRPLIETNGETGEIVWDKGRDFATVRKVLSMPQVNIVKKTEVQTGGFSKESILPKRNSDKLIARKKDWDPKKYGGFDSPTVAYSVLVVAKVEKGKSKKLKSVKELLGITIMERSSFEKNPIDFLEAKGYKEVKKDLIIKLPKYSLFELENGRKRMLASAGELQKGNELALPSKYVNFLYLASHYEKLKGSPEDNEQKQLFVEQHKHYLDEIIEQISEFSKRVILADANLDKVLSAYNKHRDKPIREQAENIIHLFTLTNLGAPAAFKYFDTTIDRKRYTSTKEVLDATLIHQSITGLYETRIDLSQLGGDGGPAPGGSGGTLGDQGSRGSDPLPEPRVTLTVEGIPTEFLVNTGAEHSVLTKPMGKMGSKRTVVAGATGSKVYPWTTKRLLKIGQKQVTHSFLVIPECPAPLLGRDLLTKLKAQIQFSTEGPQVTWEDRPAMCLVLNLEEEYRLHEKPVPPSIDPSWLQLFPMVWAEKAGMGLANQVPPVVVELKSDASPVAVRQYPMSKEAREGIRPHIQRFLDLGILVPCQSPWNTPLLPVKKPGTNDYRPVQDLREVNKRVQDIHPTVPNPYNLLSSLPPSHTWYSVLDLKDAFFCLKLHPNSQPLFAFEWRDPEKGNTGQLTWTRLPQGFKNSPTLFNEALHRDLASFRALNPQVVMLQYVDDLLVAAPTYRDCKEGTRRLLQELSKLGYRVSAKKAQLCREEVTYLGYLLKGGKRWLTPARKATVMKIPTPTTPRQVREFLGKAGFCRLFIPGFASLAAPLYPLTRPKVPFTWTEAHQEAFGRIKEALLSAPALALPDLTKPFALYVDEKEGVARGVLTQTLGPWRRPVAYLSKKLDPVASGWPTCLKAIAAVALLLKDADKLTLGQNVLVIAPHNLESIVRQPPDRWMTNARMTHYQSLLLNERVSFAPPAILNPATLLPVESDDTPIHICSEILAEETGTRPDLRDQPLPGVPAWYTDGSSFIMDGRRQAGAAIVDNKRTVWASNLPEGTSAQKAELIALTQALRLAEGKSINIYTDSRYAFATAHVHGAIYKQRGWLTSAGKDIKNKEEILALLEAIHLPKRVAIIHCPGHQRGTDPVATGNRKADEAAKQAAQSTRILTETTKNAGKRTADGSEFEKRTADGSEFESPKKKAKVE

SEQ ID NO: 1812 - protein, 2218 aa, synthetic construct
MPAAKRVKLDGGDKKYSIGLDIGTNSVGWAVITDEYKVPSKKFKVLGNTDRHSIKKNLIGALLFDSGETAEATRLKRTARRRYTRRKNRICYLQEIFSNEMAKVDDSFFHRLEESFLVEEDKKHERHPIFGNIVDEVAYHEKYPTIYHLRKKLVDSTDKADLRLIYLALAHMIKFRGHFLIEGDLNPDNSDVDKLFIQLVQTYNQLFEENPINASGVDAKAILSARLSKSRRLENLIAQLPGEKKNGLFGNLIALSLGLTPNFKSNFDLAEDAKLQLSKDTYDDDLDNLLAQIGDQYADLFLAAKNLSDAILLSDILRVNTEITKAPLSASMIKRYDEHHQDLTLLKALVRQQLPEKYKEIFFDQSKNGYAGYIDGGASQEEFYKFIKPILEKMDGTEELLVKLNREDLLRKQRTFDNGSIPHQIHLGELHAILRRQEDFYPFLKDNREKIEKILTFRIPYYVGPLARGNSRFAWMTRKSEETITPWNFEEVVDKGASAQSFIERMTNFDKNLPNEKVLPKHSLLYEYFTVYNELTKVKYVTEGMRKPAFLSGEQKKAIVDLLFKTNRKVTVKQLKEDYFKKIECFDSVEISGVEDRFNASLGTYHDLLKIIKDKDFLDNEENEDILEDIVLTLTLFEDREMIEERLKTYAHLFDDKVMKQLKRRRYTGWGRLSRKLINGIRDKQSGKTILDFLKSDGFANRNFMQLIHDDSLTFKEDIQKAQVSGQGDSLHEHIANLAGSPAIKKGILQTVKVVDELVKVMGRHKPENIVIEMARENQTTQKGQKNSRERMKRIEEGIKELGSQILKEHPVENTQLQNEKLYLYYLQNGRDMYVDQELDINRLSDYDVDHIVPQSFLKDDSIDNKVLTRSDKARGKSDNVPSEEVVKKMKNYWRQLLNAKLITQRKFDNLTKAERGGLSELDKAGFIKRQLVETRQITKHVAQILDSRMNTKYDENDKLIREVKVITLKSKLVSDFRKDFQFYKVREINNYHHAHDAYLNAVVGTALIKKYPKLESEFVYGDYKVYDVRKMIAKSEQEIGKATAKYFFYSNIMNFFKTEITLANGEIRKRPLIETNGETGEIVWDKGRDFATVRKVLSMPQVNIVKKTEVQTGGFSKESILPKRNSDKLIARKKDWDPKKYGGFDSPTVAYSVLVVAKVEKGKSKKLKSVKELLGITIMERSSFEKNPIDFLEAKGYKEVKKDLIIKLPKYSLFELENGRKRMLASAGELQKGNELALPSKYVNFLYLASHYEKLKGSPEDNEQKQLFVEQHKHYLDEIIEQISEFSKRVILADANLDKVLSAYNKHRDKPIREQAENIIHLFTLTNLGAPAAFKYFDTTIDRKRYTSTKEVLDATLIHQSITGLYETRIDLSQLGGDGGGGGPAPEAAAKGGTLGDQGSRGSDPLPEPRVTLTVEGIPTEFLVNTGAEHSVLTKPMGKMGSKRTVVAGATGSKVYPWTTKRLLKIGQKQVTHSFLVIPECPAPLLGRDLLTKLKAQIQFSTEGPQVTWEDRPAMCLVLNLEEEYRLHEKPVPPSIDPSWLQLFPMVWAEKAGMGLANQVPPVVVELKSDASPVAVRQYPMSKEAREGIRPHIQRFLDLGILVPCQSPWNTPLLPVKKPGTNDYRPVQDLREVNKRVQDIHPTVPNPYNLLSSLPPSHTWYSVLDLKDAFFCLKLHPNSQPLFAFEWRDPEKGNTGQLTWTRLPQGFKNSPTLFNEALHRDLASFRALNPQVVMLQYVDDLLVAAPTYRDCKEGTRRLLQELSKLGYRVSAKKAQLCREEVTYLGYLLKGGKRWLTPARKATVMKIPTPTTPRQVREFLGKAGFCRLFIPGFASLAAPLYPLTRPKVPFTWTEAHQEAFGRIKEALLSAPALALPDLTKPFALYVDEKEGVARGVLTQTLGPWRRPVAYLSKKLDPVASGWPTCLKAIAAVALLLKDADKLTLGQNVLVIAPHNLESIVRQPPDRWMTNARMTHYQSLLLNERVSFAPPAILNPATLLPVESDDTPIHICSEILAEETGTRPDLRDQPLPGVPAWYTDGSSFIMDGRRQAGAAIVDNKRTVWASNLPEGTSAQKAELIALTQALRLAEGKSINIYTDSRYAFATAHVHGAIYKQRGWLTSAGKDIKNKEEILALLEAIHLPKRVAIIHCPGHQRGTDPVATGNRKADEAAKQAAQSTRILTETTKNAGKRTADGSEFEKRTADGSEFESPKKKAKVE

SEQ ID NO: 1813 - protein, 2222 aa, synthetic construct
MPAAKRVKLDGGDKKYSIGLDIGTNSVGWAVITDEYKVPSKKFKVLGNTDRHSIKKNLIGALLFDSGETAEATRLKRTARRRYTRRKNRICYLQEIFSNEMAKVDDSFFHRLEESFLVEEDKKHERHPIFGNIVDEVAYHEKYPTIYHLRKKLVDSTDKADLRLIYLALAHMIKFRGHFLIEGDLNPDNSDVDKLFIQLVQTYNQLFEENPINASGVDAKAILSARLSKSRRLENLIAQLPGEKKNGLFGNLIALSLGLTPNFKSNFDLAEDAKLQLSKDTYDDDLDNLLAQIGDQYADLFLAAKNLSDAILLSDILRVNTEITKAPLSASMIKRYDEHHQDLTLLKALVRQQLPEKYKEIFFDQSKNGYAGYIDGGASQEEFYKFIKPILEKMDGTEELLVKLNREDLLRKQRTFDNGSIPHQIHLGELHAILRRQEDFYPFLKDNREKIEKILTFRIPYYVGPLARGNSRFAWMTRKSEETITPWNFEEVVDKGASAQSFIERMTNFDKNLPNEKVLPKHSLLYEYFTVYNELTKVKYVTEGMRKPAFLSGEQKKAIVDLLFKTNRKVTVKQLKEDYFKKIECFDSVEISGVEDRFNASLGTYHDLLKIIKDKDFLDNEENEDILEDIVLTLTLFEDREMIEERLKTYAHLFDDKVMKQLKRRRYTGWGRLSRKLINGIRDKQSGKTILDFLKSDGFANRNFMQLIHDDSLTFKEDIQKAQVSGQGDSLHEHIANLAGSPAIKKGILQTVKVVDELVKVMGRHKPENIVIEMARENQTTQKGQKNSRERMKRIEEGIKELGSQILKEHPVENTQLQNEKLYLYYLQNGRDMYVDQELDINRLSDYDVDHIVPQSFLKDDSIDNKVLTRSDKARGKSDNVPSEEVVKKMKNYWRQLLNAKLITQRKFDNLTKAERGGLSELDKAGFIKRQLVETRQITKHVAQILDSRMNTKYDENDKLIREVKVITLKSKLVSDFRKDFQFYKVREINNYHHAHDAYLNAVVGTALIKKYPKLESEFVYGDYKVYDVRKMIAKSEQEIGKATAKYFFYSNIMNFFKTEITLANGEIRKRPLIETNGETGEIVWDKGRDFATVRKVLSMPQVNIVKKTEVQTGGFSKESILPKRNSDKLIARKKDWDPKKYGGFDSPTVAYSVLVVAKVEKGKSKKLKSVKELLGITIMERSSFEKNPIDFLEAKGYKEVKKDLIIKLPKYSLFELENGRKRMLASAGELQKGNELALPSKYVNFLYLASHYEKLKGSPEDNEQKQLFVEQHKHYLDEIIEQISEFSKRVILADANLDKVLSAYNKHRDKPIREQAENIIHLFTLTNLGAPAAFKYFDTTIDRKRYTSTKEVLDATLIHQSITGLYETRIDLSQLGGDGGGSSGSSGSSGSSGSSGGTLGDQGSRGSDPLPEPRVTLTVEGIPTEFLVNTGAEHSVLTKPMGKMGSKRTVVAGATGSKVYPWTTKRLLKIGQKQVTHSFLVIPECPAPLLGRDLLTKLKAQIQFSTEGPQVTWEDRPAMCLVLNLEEEYRLHEKPVPPSIDPSWLQLFPMVWAEKAGMGLANQVPPVVVELKSDASPVAVRQYPMSKEAREGIRPHIQRFLDLGILVPCQSPWNTPLLPVKKPGTNDYRPVQDLREVNKRVQDIHPTVPNPYNLLSSLPPSHTWYSVLDLKDAFFCLKLHPNSQPLFAFEWRDPEKGNTGQLTWTRLPQGFKNSPTLFNEALHRDLASFRALNPQVVMLQYVDDLLVAAPTYRDCKEGTRRLLQELSKLGYRVSAKKAQLCREEVTYLGYLLKGGKRWLTPARKATVMKIPTPTTPRQVREFLGKAGFCRLFIPGFASLAAPLYPLTRPKVPFTWTEAHQEAFGRIKEALLSAPALALPDLTKPFALYVDEKEGVARGVLTQTLGPWRRPVAYLSKKLDPVASGWPTCLKAIAAVALLLKDADKLTLGQNVLVIAPHNLESIVRQPPDRWMTNARMTHYQSLLLNERVSFAPPAILNPATLLPVESDDTPIHICSEILAEETGTRPDLRDQPLPGVPAWYTDGSSFIMDGRRQAGAAIVDNKRTVWASNLPEGTSAQKAELIALTQALRLAEGKSINIYTDSRYAFATAHVHGAIYKQRGWLTSAGKDIKNKEEILALLEAIHLPKRVAIIHCPGHQRGTDPVATGNRKADEAAKQAAQSTRILTETTKNAGKRTADGSEFEKRTADGSEFESPKKKAKVE

SEQ ID NO: 1814 - protein, 2216 aa, synthetic construct
MPAAKRVKLDGGDKKYSIGLDIGTNSVGWAVITDEYKVPSKKFKVLGNTDRHSIKKNLIGALLFDSGETAEATRLKRTARRRYTRRKNRICYLQEIFSNEMAKVDDSFFHRLEESFLVEEDKKHERHPIFGNIVDEVAYHEKYPTIYHLRKKLVDSTDKADLRLIYLALAHMIKFRGHFLIEGDLNPDNSDVDKLFIQLVQTYNQLFEENPINASGVDAKAILSARLSKSRRLENLIAQLPGEKKNGLFGNLIALSLGLTPNFKSNFDLAEDAKLQLSKDTYDDDLDNLLAQIGDQYADLFLAAKNLSDAILLSDILRVNTEITKAPLSASMIKRYDEHHQDLTLLKALVRQQLPEKYKEIFFDQSKNGYAGYIDGGASQEEFYKFIKPILEKMDGTEELLVKLNREDLLRKQRTFDNGSIPHQIHLGELHAILRRQEDFYPFLKDNREKIEKILTFRIPYYVGPLARGNSRFAWMTRKSEETITPWNFEEVVDKGASAQSFIERMTNFDKNLPNEKVLPKHSLLYEYFTVYNELTKVKYVTEGMRKPAFLSGEQKKAIVDLLFKTNRKVTVKQLKEDYFKKIECFDSVEISGVEDRFNASLGTYHDLLKIIKDKDFLDNEENEDILEDIVLTLTLFEDREMIEERLKTYAHLFDDKVMKQLKRRRYTGWGRLSRKLINGIRDKQSGKTILDFLKSDGFANRNFMQLIHDDSLTFKEDIQKAQVSGQGDSLHEHIANLAGSPAIKKGILQTVKVVDELVKVMGRHKPENIVIEMARENQTTQKGQKNSRERMKRIEEGIKELGSQILKEHPVENTQLQNEKLYLYYLQNGRDMYVDQELDINRLSDYDVDHIVPQSFLKDDSIDNKVLTRSDKARGKSDNVPSEEVVKKMKNYWRQLLNAKLITQRKFDNLTKAERGGLSELDKAGFIKRQLVETRQITKHVAQILDSRMNTKYDENDKLIREVKVITLKSKLVSDFRKDFQFYKVREINNYHHAHDAYLNAVVGTALIKKYPKLESEFVYGDYKVYDVRKMIAKSEQEIGKATAKYFFYSNIMNFFKTEITLANGEIRKRPLIETNGETGEIVWDKGRDFATVRKVLSMPQVNIVKKTEVQTGGFSKESILPKRNSDKLIARKKDWDPKKYGGFDSPTVAYSVLVVAKVEKGKSKKLKSVKELLGITIMERSSFEKNPIDFLEAKGYKEVKKDLIIKLPKYSLFELENGRKRMLASAGELQKGNELALPSKYVNFLYLASHYEKLKGSPEDNEQKQLFVEQHKHYLDEIIEQISEFSKRVILADANLDKVLSAYNKHRDKPIREQAENIIHLFTLTNLGAPAAFKYFDTTIDRKRYTSTKEVLDATLIHQSITGLYETRIDLSQLGGDGGGSSGSSGSSGGTLGDQGSRGSDPLPEPRVTLTVEGIPTEFLVNTGAEHSVLTKPMGKMGSKRTVVAGATGSKVYPWTTKRLLKIGQKQVTHSFLVIPECPAPLLGRDLLTKLKAQIQFSTEGPQVTWEDRPAMCLVLNLEEEYRLHEKPVPPSIDPSWLQLFPMVWAEKAGMGLANQVPPVVVELKSDASPVAVRQYPMSKEAREGIRPHIQRFLDLGILVPCQSPWNTPLLPVKKPGTNDYRPVQDLREVNKRVQDIHPTVPNPYNLLSSLPPSHTWYSVLDLKDAFFCLKLHPNSQPLFAFEWRDPEKGNTGQLTWTRLPQGFKNSPTLFNEALHRDLASFRALNPQVVMLQYVDDLLVAAPTYRDCKEGTRRLLQELSKLGYRVSAKKAQLCREEVTYLGYLLKGGKRWLTPARKATVMKIPTPTTPRQVREFLGKAGFCRLFIPGFASLAAPLYPLTRPKVPFTWTEAHQEAFGRIKEALLSAPALALPDLTKPFALYVDEKEGVARGVLTQTLGPWRRPVAYLSKKLDPVASGWPTCLKAIAAVALLLKDADKLTLGQNVLVIAPHNLESIVRQPPDRWMTNARMTHYQSLLLNERVSFAPPAILNPATLLPVESDDTPIHICSEILAEETGTRPDLRDQPLPGVPAWYTDGSSFIMDGRRQAGAAIVDNKRTVWASNLPEGTSAQKAELIALTQALRLAEGKSINIYTDSRYAFATAHVHGAIYKQRGWLTSAGKDIKNKEEILALLEAIHLPKRVAIIHCPGHQRGTDPVATGNRKADEAAKQAAQSTRILTETTKNAGKRTADGSEFEKRTADGSEFESPKKKAKVE

SEQ ID NO: 1815 - protein, 2213 aa, synthetic construct
MPAAKRVKLDGGDKKYSIGLDIGTNSVGWAVITDEYKVPSKKFKVLGNTDRHSIKKNLIGALLFDSGETAEATRLKRTARRRYTRRKNRICYLQEIFSNEMAKVDDSFFHRLEESFLVEEDKKHERHPIFGNIVDEVAYHEKYPTIYHLRKKLVDSTDKADLRLIYLALAHMIKFRGHFLIEGDLNPDNSDVDKLFIQLVQTYNQLFEENPINASGVDAKAILSARLSKSRRLENLIAQLPGEKKNGLFGNLIALSLGLTPNFKSNFDLAEDAKLQLSKDTYDDDLDNLLAQIGDQYADLFLAAKNLSDAILLSDILRVNTEITKAPLSASMIKRYDEHHQDLTLLKALVRQQLPEKYKEIFFDQSKNGYAGYIDGGASQEEFYKFIKPILEKMDGTEELLVKLNREDLLRKQRTFDNGSIPHQIHLGELHAILRRQEDFYPFLKDNREKIEKILTFRIPYYVGPLARGNSRFAWMTRKSEETITPWNFEEVVDKGASAQSFIERMTNFDKNLPNEKVLPKHSLLYEYFTVYNELTKVKYVTEGMRKPAFLSGEQKKAIVDLLFKTNRKVTVKQLKEDYFKKIECFDSVEISGVEDRFNASLGTYHDLLKIIKDKDFLDNEENEDILEDIVLTLTLFEDREMIEERLKTYAHLFDDKVMKQLKRRRYTGWGRLSRKLINGIRDKQSGKTILDFLKSDGFANRNFMQLIHDDSLTFKEDIQKAQVSGQGDSLHEHIANLAGSPAIKKGILQTVKVVDELVKVMGRHKPENIVIEMARENQTTQKGQKNSRERMKRIEEGIKELGSQILKEHPVENTQLQNEKLYLYYLQNGRDMYVDQELDINRLSDYDVDHIVPQSFLKDDSIDNKVLTRSDKARGKSDNVPSEEVVKKMKNYWRQLLNAKLITQRKFDNLTKAERGGLSELDKAGFIKRQLVETRQITKHVAQILDSRMNTKYDENDKLIREVKVITLKSKLVSDFRKDFQFYKVREINNYHHAHDAYLNAVVGTALIKKYPKLESEFVYGDYKVYDVRKMIAKSEQEIGKATAKYFFYSNIMNFFKTEITLANGEIRKRPLIETNGETGEIVWDKGRDFATVRKVLSMPQVNIVKKTEVQTGGFSKESILPKRNSDKLIARKKDWDPKKYGGFDSPTVAYSVLVVAKVEKGKSKKLKSVKELLGITIMERSSFEKNPIDFLEAKGYKEVKKDLIIKLPKYSLFELENGRKRMLASAGELQKGNELALPSKYVNFLYLASHYEKLKGSPEDNEQKQLFVEQHKHYLDEIIEQISEFSKRVILADANLDKVLSAYNKHRDKPIREQAENIIHLFTLTNLGAPAAFKYFDTTIDRKRYTSTKEVLDATLIHQSITGLYETRIDLSQLGGDGGGSSPAPGGTLGDQGSRGSDPLPEPRVTLTVEGIPTEFLVNTGAEHSVLTKPMGKMGSKRTVVAGATGSKVYPWTTKRLLKIGQKQVTHSFLVIPECPAPLLGRDLLTKLKAQIQFSTEGPQVTWEDRPAMCLVLNLEEEYRLHEKPVPPSIDPSWLQLFPMVWAEKAGMGLANQVPPVVVELKSDASPVAVRQYPMSKEAREGIRPHIQRFLDLGILVPCQSPWNTPLLPVKKPGTNDYRPVQDLREVNKRVQDIHPTVPNPYNLLSSLPPSHTWYSVLDLKDAFFCLKLHPNSQPLFAFEWRDPEKGNTGQLTWTRLPQGFKNSPTLFNEALHRDLASFRALNPQVVMLQYVDDLLVAAPTYRDCKEGTRRLLQELSKLGYRVSAKKAQLCREEVTYLGYLLKGGKRWLTPARKATVMKIPTPTTPRQVREFLGKAGFCRLFIPGFASLAAPLYPLTRPKVPFTWTEAHQEAFGRIKEALLSAPALALPDLTKPFALYVDEKEGVARGVLTQTLGPWRRPVAYLSKKLDPVASGWPTCLKAIAAVALLLKDADKLTLGQNVLVIAPHNLESIVRQPPDRWMTNARMTHYQSLLLNERVSFAPPAILNPATLLPVESDDTPIHICSEILAEETGTRPDLRDQPLPGVPAWYTDGSSFIMDGRRQAGAAIVDNKRTVWASNLPEGTSAQKAELIALTQALRLAEGKSINIYTDSRYAFATAHVHGAIYKQRGWLTSAGKDIKNKEEILALLEAIHLPKRVAIIHCPGHQRGTDPVATGNRKADEAAKQAAQSTRILTETTKNAGKRTADGSEFEKRTADGSEFESPKKKAKVE

SEQ ID NO: 1816 - protein, 2218 aa, synthetic construct
MPAAKRVKLDGGDKKYSIGLDIGTNSVGWAVITDEYKVPSKKFKVLGNTDRHSIKKNLIGALLFDSGETAEATRLKRTARRRYTRRKNRICYLQEIFSNEMAKVDDSFFHRLEESFLVEEDKKHERHPIFGNIVDEVAYHEKYPTIYHLRKKLVDSTDKADLRLIYLALAHMIKFRGHFLIEGDLNPDNSDVDKLFIQLVQTYNQLFEENPINASGVDAKAILSARLSKSRRLENLIAQLPGEKKNGLFGNLIALSLGLTPNFKSNFDLAEDAKLQLSKDTYDDDLDNLLAQIGDQYADLFLAAKNLSDAILLSDILRVNTEITKAPLSASMIKRYDEHHQDLTLLKALVRQQLPEKYKEIFFDQSKNGYAGYIDGGASQEEFYKFIKPILEKMDGTEELLVKLNREDLLRKQRTFDNGSIPHQIHLGELHAILRRQEDFYPFLKDNREKIEKILTFRIPYYVGPLARGNSRFAWMTRKSEETITPWNFEEVVDKGASAQSFIERMTNFDKNLPNEKVLPKHSLLYEYFTVYNELTKVKYVTEGMRKPAFLSGEQKKAIVDLLFKTNRKVTVKQLKEDYFKKIECFDSVEISGVEDRFNASLGTYHDLLKIIKDKDFLDNEENEDILEDIVLTLTLFEDREMIEERLKTYAHLFDDKVMKQLKRRRYTGWGRLSRKLINGIRDKQSGKTILDFLKSDGFANRNFMQLIHDDSLTFKEDIQKAQVSGQGDSLHEHIANLAGSPAIKKGILQTVKVVDELVKVMGRHKPENIVIEMARENQTTQKGQKNSRERMKRIEEGIKELGSQILKEHPVENTQLQNEKLYLYYLQNGRDMYVDQELDINRLSDYDVDHIVPQSFLKDDSIDNKVLTRSDKARGKSDNVPSEEVVKKMKNYWRQLLNAKLITQRKFDNLTKAERGGLSELDKAGFIKRQLVETRQITKHVAQILDSRMNTKYDENDKLIREVKVITLKSKLVSDFRKDFQFYKVREINNYHHAHDAYLNAVVGTALIKKYPKLESEFVYGDYKVYDVRKMIAKSEQEIGKATAKYFFYSNIMNFFKTEITLANGEIRKRPLIETNGETGEIVWDKGRDFATVRKVLSMPQVNIVKKTEVQTGGFSKESILPKRNSDKLIARKKDWDPKKYGGFDSPTVAYSVLVVAKVEKGKSKKLKSVKELLGITIMERSSFEKNPIDFLEAKGYKEVKKDLIIKLPKYSLFELENGRKRMLASAGELQKGNELALPSKYVNFLYLASHYEKLKGSPEDNEQKQLFVEQHKHYLDEIIEQISEFSKRVILADANLDKVLSAYNKHRDKPIREQAENIIHLFTLTNLGAPAAFKYFDTTIDRKRYTSTKEVLDATLIHQSITGLYETRIDLSQLGGDGGPAPEAAAKGSSGGTLGDQGSRGSDPLPEPRVTLTVEGIPTEFLVNTGAEHSVLTKPMGKMGSKRTVVAGATGSKVYPWTTKRLLKIGQKQVTHSFLVIPECPAPLLGRDLLTKLKAQIQFSTEGPQVTWEDRPAMCLVLNLEEEYRLHEKPVPPSIDPSWLQLFPMVWAEKAGMGLANQVPPVVVELKSDASPVAVRQYPMSKEAREGIRPHIQRFLDLGILVPCQSPWNTPLLPVKKPGTNDYRPVQDLREVNKRVQDIHPTVPNPYNLLSSLPPSHTWYSVLDLKDAFFCLKLHPNSQPLFAFEWRDPEKGNTGQLTWTRLPQGFKNSPTLFNEALHRDLASFRALNPQVVMLQYVDDLLVAAPTYRDCKEGTRRLLQELSKLGYRVSAKKAQLCREEVTYLGYLLKGGKRWLTPARKATVMKIPTPTTPRQVREFLGKAGFCRLFIPGFASLAAPLYPLTRPKVPFTWTEAHQEAFGRIKEALLSAPALALPDLTKPFALYVDEKEGVARGVLTQTLGPWRRPVAYLSKKLDPVASGWPTCLKAIAAVALLLKDADKLTLGQNVLVIAPHNLESIVRQPPDRWMTNARMTHYQSLLLNERVSFAPPAILNPATLLPVESDDTPIHICSEILAEETGTRPDLRDQPLPGVPAWYTDGSSFIMDGRRQAGAAIVDNKRTVWASNLPEGTSAQKAELIALTQALRLAEGKSINIYTDSRYAFATAHVHGAIYKQRGWLTSAGKDIKNKEEILALLEAIHLPKRVAIIHCPGHQRGTDPVATGNRKADEAAKQAAQSTRILTETTKNAGKRTADGSEFEKRTADGSEFESPKKKAKVE

SEQ ID NO: 1817 - protein, 2218 aa, synthetic construct
MPAAKRVKLDGGDKKYSIGLDIGTNSVGWAVITDEYKVPSKKFKVLGNTDRHSIKKNLIGALLFDSGETAEATRLKRTARRRYTRRKNRICYLQEIFSNEMAKVDDSFFHRLEESFLVEEDKKHERHPIFGNIVDEVAYHEKYPTIYHLRKKLVDSTDKADLRLIYLALAHMIKFRGHFLIEGDLNPDNSDVDKLFIQLVQTYNQLFEENPINASGVDAKAILSARLSKSRRLENLIAQLPGEKKNGLFGNLIALSLGLTPNFKSNFDLAEDAKLQLSKDTYDDDLDNLLAQIGDQYADLFLAAKNLSDAILLSDILRVNTEITKAPLSASMIKRYDEHHQDLTLLKALVRQQLPEKYKEIFFDQSKNGYAGYIDGGASQEEFYKFIKPILEKMDGTEELLVKLNREDLLRKQRTFDNGSIPHQIHLGELHAILRRQEDFYPFLKDNREKIEKILTFRIPYYVGPLARGNSRFAWMTRKSEETITPWNFEEVVDKGASAQSFIERMTNFDKNLPNEKVLPKHSLLYEYFTVYNELTKVKYVTEGMRKPAFLSGEQKKAIVDLLFKTNRKVTVKQLKEDYFKKIECFDSVEISGVEDRFNASLGTYHDLLKIIKDKDFLDNEENEDILEDIVLTLTLFEDREMIEERLKTYAHLFDDKVMKQLKRRRYTGWGRLSRKLINGIRDKQSGKTILDFLKSDGFANRNFMQLIHDDSLTFKEDIQKAQVSGQGDSLHEHIANLAGSPAIKKGILQTVKVVDELVKVMGRHKPENIVIEMARENQTTQKGQKNSRERMKRIEEGIKELGSQILKEHPVENTQLQNEKLYLYYLQNGRDMYVDQELDINRLSDYDVDHIVPQSFLKDDSIDNKVLTRSDKARGKSDNVPSEEVVKKMKNYWRQLLNAKLITQRKFDNLTKAERGGLSELDKAGFIKRQLVETRQITKHVAQILDSRMNTKYDENDKLIREVKVITLKSKLVSDFRKDFQFYKVREINNYHHAHDAYLNAVVGTALIKKYPKLESEFVYGDYKVYDVRKMIAKSEQEIGKATAKYFFYSNIMNFFKTEITLANGEIRKRPLIETNGETGEIVWDKGRDFATVRKVLSMPQVNIVKKTEVQTGGFSKESILPKRNSDKLIARKKDWDPKKYGGFDSPTVAYSVLVVAKVEKGKSKKLKSVKELLGITIMERSSFEKNPIDFLEAKGYKEVKKDLIIKLPKYSLFELENGRKRMLASAGELQKGNELALPSKYVNFLYLASHYEKLKGSPEDNEQKQLFVEQHKHYLDEIIEQISEFSKRVILADANLDKVLSAYNKHRDKPIREQAENIIHLFTLTNLGAPAAFKYFDTTIDRKRYTSTKEVLDATLIHQSITGLYETRIDLSQLGGDGGGSSGGGEAAAKGGTLGDQGSRGSDPLPEPRVTLTVEGIPTEFLVNTGAEHSVLTKPMGKMGSKRTVVAGATGSKVYPWTTKRLLKIGQKQVTHSFLVIPECPAPLLGRDLLTKLKAQIQFSTEGPQVTWEDRPAMCLVLNLEEEYRLHEKPVPPSIDPSWLQLFPMVWAEKAGMGLANQVPPVVVELKSDASPVAVRQYPMSKEAREGIRPHIQRFLDLGILVPCQSPWNTPLLPVKKPGTNDYRPVQDLREVNKRVQDIHPTVPNPYNLLSSLPPSHTWYSVLDLKDAFFCLKLHPNSQPLFAFEWRDPEKGNTGQLTWTRLPQGFKNSPTLFNEALHRDLASFRALNPQVVMLQYVDDLLVAAPTYRDCKEGTRRLLQELSKLGYRVSAKKAQLCREEVTYLGYLLKGGKRWLTPARKATVMKIPTPTTPRQVREFLGKAGFCRLFIPGFASLAAPLYPLTRPKVPFTWTEAHQEAFGRIKEALLSAPALALPDLTKPFALYVDEKEGVARGVLTQTLGPWRRPVAYLSKKLDPVASGWPTCLKAIAAVALLLKDADKLTLGQNVLVIAPHNLESIVRQPPDRWMTNARMTHYQSLLLNERVSFAPPAILNPATLLPVESDDTPIHICSEILAEETGTRPDLRDQPLPGVPAWYTDGSSFIMDGRRQAGAAIVDNKRTVWASNLPEGTSAQKAELIALTQALRLAEGKSINIYTDSRYAFATAHVHGAIYKQRGWLTSAGKDIKNKEEILALLEAIHLPKRVAIIHCPGHQRGTDPVATGNRKADEAAKQAAQSTRILTETTKNAGKRTADGSEFEKRTADGSEFESPKKKAKVE

SEQ ID NO: 1818 - protein, 2216 aa, synthetic construct
MPAAKRVKLDGGDKKYSIGLDIGTNSVGWAVITDEYKVPSKKFKVLGNTDRHSIKKNLIGALLFDSGETAEATRLKRTARRRYTRRKNRICYLQEIFSNEMAKVDDSFFHRLEESFLVEEDKKHERHPIFGNIVDEVAYHEKYPTIYHLRKKLVDSTDKADLRLIYLALAHMIKFRGHFLIEGDLNPDNSDVDKLFIQLVQTYNQLFEENPINASGVDAKAILSARLSKSRRLENLIAQLPGEKKNGLFGNLIALSLGLTPNFKSNFDLAEDAKLQLSKDTYDDDLDNLLAQIGDQYADLFLAAKNLSDAILLSDILRVNTEITKAPLSASMIKRYDEHHQDLTLLKALVRQQLPEKYKEIFFDQSKNGYAGYIDGGASQEEFYKFIKPILEKMDGTEELLVKLNREDLLRKQRTFDNGSIPHQIHLGELHAILRRQEDFYPFLKDNREKIEKILTFRIPYYVGPLARGNSRFAWMTRKSEETITPWNFEEVVDKGASAQSFIERMTNFDKNLPNEKVLPKHSLLYEYFTVYNELTKVKYVTEGMRKPAFLSGEQKKAIVDLLFKTNRKVTVKQLKEDYFKKIECFDSVEISGVEDRFNASLGTYHDLLKIIKDKDFLDNEENEDILEDIVLTLTLFEDREMIEERLKTYAHLFDDKVMKQLKRRRYTGWGRLSRKLINGIRDKQSGKTILDFLKSDGFANRNFMQLIHDDSLTFKEDIQKAQVSGQGDSLHEHIANLAGSPAIKKGILQTVKVVDELVKVMGRHKPENIVIEMARENQTTQKGQKNSRERMKRIEEGIKELGSQILKEHPVENTQLQNEKLYLYYLQNGRDMYVDQELDINRLSDYDVDHIVPQSFLKDDSIDNKVLTRSDKARGKSDNVPSEEVVKKMKNYWRQLLNAKLITQRKFDNLTKAERGGLSELDKAGFIKRQLVETRQITKHVAQILDSRMNTKYDENDKLIREVKVITLKSKLVSDFRKDFQFYKVREINNYHHAHDAYLNAVVGTALIKKYPKLESEFVYGDYKVYDVRKMIAKSEQEIGKATAKYFFYSNIMNFFKTEITLANGEIRKRPLIETNGETGEIVWDKGRDFATVRKVLSMPQVNIVKKTEVQTGGFSKESILPKRNSDKLIARKKDWDPKKYGGFDSPTVAYSVLVVAKVEKGKSKKLKSVKELLGITIMERSSFEKNPIDFLEAKGYKEVKKDLIIKLPKYSLFELENGRKRMLASAGELQKGNELALPSKYVNFLYLASHYEKLKGSPEDNEQKQLFVEQHKHYLDEIIEQISEFSKRVILADANLDKVLSAYNKHRDKPIREQAENIIHLFTLTNLGAPAAFKYFDTTIDRKRYTSTKEVLDATLIHQSITGLYETRIDLSQLGGDGGGGGGSSPAPGGTLGDQGSRGSDPLPEPRVTLTVEGIPTEFLVNTGAEHSVLTKPMGKMGSKRTVVAGATGSKVYPWTTKRLLKIGQKQVTHSFLVIPECPAPLLGRDLLTKLKAQIQFSTEGPQVTWEDRPAMCLVLNLEEEYRLHEKPVPPSIDPSWLQLFPMVWAEKAGMGLANQVPPVVVELKSDASPVAVRQYPMSKEAREGIRPHIQRFLDLGILVPCQSPWNTPLLPVKKPGTNDYRPVQDLREVNKRVQDIHPTVPNPYNLLSSLPPSHTWYSVLDLKDAFFCLKLHPNSQPLFAFEWRDPEKGNTGQLTWTRLPQGFKNSPTLFNEALHRDLASFRALNPQVVMLQYVDDLLVAAPTYRDCKEGTRRLLQELSKLGYRVSAKKAQLCREEVTYLGYLLKGGKRWLTPARKATVMKIPTPTTPRQVREFLGKAGFCRLFIPGFASLAAPLYPLTRPKVPFTWTEAHQEAFGRIKEALLSAPALALPDLTKPFALYVDEKEGVARGVLTQTLGPWRRPVAYLSKKLDPVASGWPTCLKAIAAVALLLKDADKLTLGQNVLVIAPHNLESIVRQPPDRWMTNARMTHYQSLLLNERVSFAPPAILNPATLLPVESDDTPIHICSEILAEETGTRPDLRDQPLPGVPAWYTDGSSFIMDGRRQAGAAIVDNKRTVWASNLPEGTSAQKAELIALTQALRLAEGKSINIYTDSRYAFATAHVHGAIYKQRGWLTSAGKDIKNKEEILALLEAIHLPKRVAIIHCPGHQRGTDPVATGNRKADEAAKQAAQSTRILTETTKNAGKRTADGSEFEKRTADGSEFESPKKKAKVE

SEQ ID NO: 1819 - protein, 2216 aa, synthetic construct
MPAAKRVKLDGGDKKYSIGLDIGTNSVGWAVITDEYKVPSKKFKVLGNTDRHSIKKNLIGALLFDSGETAEATRLKRTARRRYTRRKNRICYLQEIFSNEMAKVDDSFFHRLEESFLVEEDKKHERHPIFGNIVDEVAYHEKYPTIYHLRKKLVDSTDKADLRLIYLALAHMIKFRGHFLIEGDLNPDNSDVDKLFIQLVQTYNQLFEENPINASGVDAKAILSARLSKSRRLENLIAQLPGEKKNGLFGNLIALSLGLTPNFKSNFDLAEDAKLQLSKDTYDDDLDNLLAQIGDQYADLFLAAKNLSDAILLSDILRVNTEITKAPLSASMIKRYDEHHQDLTLLKALVRQQLPEKYKEIFFDQSKNGYAGYIDGGASQEEFYKFIKPILEKMDGTEELLVKLNREDLLRKQRTFDNGSIPHQIHLGELHAILRRQEDFYPFLKDNREKIEKILTFRIPYYVGPLARGNSRFAWMTRKSEETITPWNFEEVVDKGASAQSFIERMTNFDKNLPNEKVLPKHSLLYEYFTVYNELTKVKYVTEGMRKPAFLSGEQKKAIVDLLFKTNRKVTVKQLKEDYFKKIECFDSVEISGVEDRFNASLGTYHDLLKIIKDKDFLDNEENEDILEDIVLTLTLFEDREMIEERLKTYAHLFDDKVMKQLKRRRYTGWGRLSRKLINGIRDKQSGKTILDFLKSDGFANRNFMQLIHDDSLTFKEDIQKAQVSGQGDSLHEHIANLAGSPAIKKGILQTVKVVDELVKVMGRHKPENIVIEMARENQTTQKGQKNSRERMKRIEEGIKELGSQILKEHPVENTQLQNEKLYLYYLQNGRDMYVDQELDINRLSDYDVDHIVPQSFLKDDSIDNKVLTRSDKARGKSDNVPSEEVVKKMKNYWRQLLNAKLITQRKFDNLTKAERGGLSELDKAGFIKRQLVETRQITKHVAQILDSRMNTKYDENDKLIREVKVITLKSKLVSDFRKDFQFYKVREINNYHHAHDAYLNAVVGTALIKKYPKLESEFVYGDYKVYDVRKMIAKSEQEIGKATAKYFFYSNIMNFFKTEITLANGEIRKRPLIETNGETGEIVWDKGRDFATVRKVLSMPQVNIVKKTEVQTGGFSKESILPKRNSDKLIARKKDWDPKKYGGFDSPTVAYSVLVVAKVEKGKSKKLKSVKELLGITIMERSSFEKNPIDFLEAKGYKEVKKDLIIKLPKYSLFELENGRKRMLASAGELQKGNELALPSKYVNFLYLASHYEKLKGSPEDNEQKQLFVEQHKHYLDEIIEQISEFSKRVILADANLDKVLSAYNKHRDKPIREQAENIIHLFTLTNLGAPAAFKYFDTTIDRKRYTSTKEVLDATLIHQSITGLYETRIDLSQLGGDGGGGSGGGGSSGGTLGDQGSRGSDPLPEPRVTLTVEGIPTEFLVNTGAEHSVLTKPMGKMGSKRTVVAGATGSKVYPWTTKRLLKIGQKQVTHSFLVIPECPAPLLGRDLLTKLKAQIQFSTEGPQVTWEDRPAMCLVLNLEEEYRLHEKPVPPSIDPSWLQLFPMVWAEKAGMGLANQVPPVVVELKSDASPVAVRQYPMSKEAREGIRPHIQRFLDLGILVPCQSPWNTPLLPVKKPGTNDYRPVQDLREVNKRVQDIHPTVPNPYNLLSSLPPSHTWYSVLDLKDAFFCLKLHPNSQPLFAFEWRDPEKGNTGQLTWTRLPQGFKNSPTLFNEALHRDLASFRALNPQVVMLQYVDDLLVAAPTYRDCKEGTRRLLQELSKLGYRVSAKKAQLCREEVTYLGYLLKGGKRWLTPARKATVMKIPTPTTPRQVREFLGKAGFCRLFIPGFASLAAPLYPLTRPKVPFTWTEAHQEAFGRIKEALLSAPALALPDLTKPFALYVDEKEGVARGVLTQTLGPWRRPVAYLSKKLDPVASGWPTCLKAIAAVALLLKDADKLTLGQNVLVIAPHNLESIVRQPPDRWMTNARMTHYQSLLLNERVSFAPPAILNPATLLPVESDDTPIHICSEILAEETGTRPDLRDQPLPGVPAWYTDGSSFIMDGRRQAGAAIVDNKRTVWASNLPEGTSAQKAELIALTQALRLAEGKSINIYTDSRYAFATAHVHGAIYKQRGWLTSAGKDIKNKEEILALLEAIHLPKRVAIIHCPGHQRGTDPVATGNRKADEAAKQAAQSTRILTETTKNAGKRTADGSEFEKRTADGSEFESPKKKAKVE

SEQ ID NO: 1820 - protein, 2215 aa, synthetic construct
MPAAKRVKLDGGDKKYSIGLDIGTNSVGWAVITDEYKVPSKKFKVLGNTDRHSIKKNLIGALLFDSGETAEATRLKRTARRRYTRRKNRICYLQEIFSNEMAKVDDSFFHRLEESFLVEEDKKHERHPIFGNIVDEVAYHEKYPTIYHLRKKLVDSTDKADLRLIYLALAHMIKFRGHFLIEGDLNPDNSDVDKLFIQLVQTYNQLFEENPINASGVDAKAILSARLSKSRRLENLIAQLPGEKKNGLFGNLIALSLGLTPNFKSNFDLAEDAKLQLSKDTYDDDLDNLLAQIGDQYADLFLAAKNLSDAILLSDILRVNTEITKAPLSASMIKRYDEHHQDLTLLKALVRQQLPEKYKEIFFDQSKNGYAGYIDGGASQEEFYKFIKPILEKMDGTEELLVKLNREDLLRKQRTFDNGSIPHQIHLGELHAILRRQEDFYPFLKDNREKIEKILTFRIPYYVGPLARGNSRFAWMTRKSEETITPWNFEEVVDKGASAQSFIERMTNFDKNLPNEKVLPKHSLLYEYFTVYNELTKVKYVTEGMRKPAFLSGEQKKAIVDLLFKTNRKVTVKQLKEDYFKKIECFDSVEISGVEDRFNASLGTYHDLLKIIKDKDFLDNEENEDILEDIVLTLTLFEDREMIEERLKTYAHLFDDKVMKQLKRRRYTGWGRLSRKLINGIRDKQSGKTILDFLKSDGFANRNFMQLIHDDSLTFKEDIQKAQVSGQGDSLHEHIANLAGSPAIKKGILQTVKVVDELVKVMGRHKPENIVIEMARENQTTQKGQKNSRERMKRIEEGIKELGSQILKEHPVENTQLQNEKLYLYYLQNGRDMYVDQELDINRLSDYDVDHIVPQSFLKDDSIDNKVLTRSDKARGKSDNVPSEEVVKKMKNYWRQLLNAKLITQRKFDNLTKAERGGLSELDKAGFIKRQLVETRQITKHVAQILDSRMNTKYDENDKLIREVKVITLKSKLVSDFRKDFQFYKVREINNYHHAHDAYLNAVVGTALIKKYPKLESEFVYGDYKVYDVRKMIAKSEQEIGKATAKYFFYSNIMNFFKTEITLANGEIRKRPLIETNGETGEIVWDKGRDFATVRKVLSMPQVNIVKKTEVQTGGFSKESILPKRNSDKLIARKKDWDPKKYGGFDSPTVAYSVLVVAKVEKGKSKKLKSVKELLGITIMERSSFEKNPIDFLEAKGYKEVKKDLIIKLPKYSLFELENGRKRMLASAGELQKGNELALPSKYVNFLYLASHYEKLKGSPEDNEQKQLFVEQHKHYLDEIIEQISEFSKRVILADANLDKVLSAYNKHRDKPIREQAENIIHLFTLTNLGAPAAFKYFDTTIDRKRYTSTKEVLDATLIHQSITGLYETRIDLSQLGGDGGEAAAKGGGGGTLGDQGSRGSDPLPEPRVTLTVEGIPTEFLVNTGAEHSVLTKPMGKMGSKRTVVAGATGSKVYPWTTKRLLKIGQKQVTHSFLVIPECPAPLLGRDLLTKLKAQIQFSTEGPQVTWEDRPAMCLVLNLEEEYRLHEKPVPPSIDPSWLQLFPMVWAEKAGMGLANQVPPVVVELKSDASPVAVRQYPMSKEAREGIRPHIQRFLDLGILVPCQSPWNTPLLPVKKPGTNDYRPVQDLREVNKRVQDIHPTVPNPYNLLSSLPPSHTWYSVLDLKDAFFCLKLHPNSQPLFAFEWRDPEKGNTGQLTWTRLPQGFKNSPTLFNEALHRDLASFRALNPQVVMLQYVDDLLVAAPTYRDCKEGTRRLLQELSKLGYRVSAKKAQLCREEVTYLGYLLKGGKRWLTPARKATVMKIPTPTTPRQVREFLGKAGFCRLFIPGFASLAAPLYPLTRPKVPFTWTEAHQEAFGRIKEALLSAPALALPDLTKPFALYVDEKEGVARGVLTQTLGPWRRPVAYLSKKLDPVASGWPTCLKAIAAVALLLKDADKLTLGQNVLVIAPHNLESIVRQPPDRWMTNARMTHYQSLLLNERVSFAPPAILNPATLLPVESDDTPIHICSEILAEETGTRPDLRDQPLPGVPAWYTDGSSFIMDGRRQAGAAIVDNKRTVWASNLPEGTSAQKAELIALTQALRLAEGKSINIYTDSRYAFATAHVHGAIYKQRGWLTSAGKDIKNKEEILALLEAIHLPKRVAIIHCPGHQRGTDPVATGNRKADEAAKQAAQSTRILTETTKNAGKRTADGSEFEKRTADGSEFESPKKKAKVE

SEQ ID NO: 1821 - protein, 2215 aa, synthetic construct
MPAAKRVKLDGGDKKYSIGLDIGTNSVGWAVITDEYKVPSKKFKVLGNTDRHSIKKNLIGALLFDSGETAEATRLKRTARRRYTRRKNRICYLQEIFSNEMAKVDDSFFHRLEESFLVEEDKKHERHPIFGNIVDEVAYHEKYPTIYHLRKKLVDSTDKADLRLIYLALAHMIKFRGHFLIEGDLNPDNSDVDKLFIQLVQTYNQLFEENPINASGVDAKAILSARLSKSRRLENLIAQLPGEKKNGLFGNLIALSLGLTPNFKSNFDLAEDAKLQLSKDTYDDDLDNLLAQIGDQYADLFLAAKNLSDAILLSDILRVNTEITKAPLSASMIKRYDEHHQDLTLLKALVRQQLPEKYKEIFFDQSKNGYAGYIDGGASQEEFYKFIKPILEKMDGTEELLVKLNREDLLRKQRTFDNGSIPHQIHLGELHAILRRQEDFYPFLKDNREKIEKILTFRIPYYVGPLARGNSRFAWMTRKSEETITPWNFEEVVDKGASAQSFIERMTNFDKNLPNEKVLPKHSLLYEYFTVYNELTKVKYVTEGMRKPAFLSGEQKKAIVDLLFKTNRKVTVKQLKEDYFKKIECFDSVEISGVEDRFNASLGTYHDLLKIIKDKDFLDNEENEDILEDIVLTLTLFEDREMIEERLKTYAHLFDDKVMKQLKRRRYTGWGRLSRKLINGIRDKQSGKTILDFLKSDGFANRNFMQLIHDDSLTFKEDIQKAQVSGQGDSLHEHIANLAGSPAIKKGILQTVKVVDELVKVMGRHKPENIVIEMARENQTTQKGQKNSRERMKRIEEGIKELGSQILKEHPVENTQLQNEKLYLYYLQNGRDMYVDQELDINRLSDYDVDHIVPQSFLKDDSIDNKVLTRSDKARGKSDNVPSEEVVKKMKNYWRQLLNAKLITQRKFDNLTKAERGGLSELDKAGFIKRQLVETRQITKHVAQILDSRMNTKYDENDKLIREVKVITLKSKLVSDFRKDFQFYKVREINNYHHAHDAYLNAVVGTALIKKYPKLESEFVYGDYKVYDVRKMIAKSEQEIGKATAKYFFYSNIMNFFKTEITLANGEIRKRPLIETNGETGEIVWDKGRDFATVRKVLSMPQVNIVKKTEVQTGGFSKESILPKRNSDKLIARKKDWDPKKYGGFDSPTVAYSVLVVAKVEKGKSKKLKSVKELLGITIMERSSFEKNPIDFLEAKGYKEVKKDLIIKLPKYSLFELENGRKRMLASAGELQKGNELALPSKYVNFLYLASHYEKLKGSPEDNEQKQLFVEQHKHYLDEIIEQISEFSKRVILADANLDKVLSAYNKHRDKPIREQAENIIHLFTLTNLGAPAAFKYFDTTIDRKRYTSTKEVLDATLIHQSITGLYETRIDLSQLGGDGGEAAAKGGSGGTLGDQGSRGSDPLPEPRVTLTVEGIPTEFLVNTGAEHSVLTKPMGKMGSKRTVVAGATGSKVYPWTTKRLLKIGQKQVTHSFLVIPECPAPLLGRDLLTKLKAQIQFSTEGPQVTWEDRPAMCLVLNLEEEYRLHEKPVPPSIDPSWLQLFPMVWAEKAGMGLANQVPPVVVELKSDASPVAVRQYPMSKEAREGIRPHIQRFLDLGILVPCQSPWNTPLLPVKKPGTNDYRPVQDLREVNKRVQDIHPTVPNPYNLLSSLPPSHTWYSVLDLKDAFFCLKLHPNSQPLFAFEWRDPEKGNTGQLTWTRLPQGFKNSPTLFNEALHRDLASFRALNPQVVMLQYVDDLLVAAPTYRDCKEGTRRLLQELSKLGYRVSAKKAQLCREEVTYLGYLLKGGKRWLTPARKATVMKIPTPTTPRQVREFLGKAGFCRLFIPGFASLAAPLYPLTRPKVPFTWTEAHQEAFGRIKEALLSAPALALPDLTKPFALYVDEKEGVARGVLTQTLGPWRRPVAYLSKKLDPVASGWPTCLKAIAAVALLLKDADKLTLGQNVLVIAPHNLESIVRQPPDRWMTNARMTHYQSLLLNERVSFAPPAILNPATLLPVESDDTPIHICSEILAEETGTRPDLRDQPLPGVPAWYTDGSSFIMDGRRQAGAAIVDNKRTVWASNLPEGTSAQKAELIALTQALRLAEGKSINIYTDSRYAFATAHVHGAIYKQRGWLTSAGKDIKNKEEILALLEAIHLPKRVAIIHCPGHQRGTDPVATGNRKADEAAKQAAQSTRILTETTKNAGKRTADGSEFEKRTADGSEFESPKKKAKVE

SEQ ID NO: 1822 - protein, 2218 aa, synthetic construct
MPAAKRVKLDGGDKKYSIGLDIGTNSVGWAVITDEYKVPSKKFKVLGNTDRHSIKKNLIGALLFDSGETAEATRLKRTARRRYTRRKNRICYLQEIFSNEMAKVDDSFFHRLEESFLVEEDKKHERHPIFGNIVDEVAYHEKYPTIYHLRKKLVDSTDKADLRLIYLALAHMIKFRGHFLIEGDLNPDNSDVDKLFIQLVQTYNQLFEENPINASGVDAKAILSARLSKSRRLENLIAQLPGEKKNGLFGNLIALSLGLTPNFKSNFDLAEDAKLQLSKDTYDDDLDNLLAQIGDQYADLFLAAKNLSDAILLSDILRVNTEITKAPLSASMIKRYDEHHQDLTLLKALVRQQLPEKYKEIFFDQSKNGYAGYIDGGASQEEFYKFIKPILEKMDGTEELLVKLNREDLLRKQRTFDNGSIPHQIHLGELHAILRRQEDFYPFLKDNREKIEKILTFRIPYYVGPLARGNSRFAWMTRKSEETITPWNFEEVVDKGASAQSFIERMTNFDKNLPNEKVLPKHSLLYEYFTVYNELTKVKYVTEGMRKPAFLSGEQKKAIVDLLFKTNRKVTVKQLKEDYFKKIECFDSVEISGVEDRFNASLGTYHDLLKIIKDKDFLDNEENEDILEDIVLTLTLFEDREMIEERLKTYAHLFDDKVMKQLKRRRYTGWGRLSRKLINGIRDKQSGKTILDFLKSDGFANRNFMQLIHDDSLTFKEDIQKAQVSGQGDSLHEHIANLAGSPAIKKGILQTVKVVDELVKVMGRHKPENIVIEMARENQTTQKGQKNSRERMKRIEEGIKELGSQILKEHPVENTQLQNEKLYLYYLQNGRDMYVDQELDINRLSDYDVDHIVPQSFLKDDSIDNKVLTRSDKARGKSDNVPSEEVVKKMKNYWRQLLNAKLITQRKFDNLTKAERGGLSELDKAGFIKRQLVETRQITKHVAQILDSRMNTKYDENDKLIREVKVITLKSKLVSDFRKDFQFYKVREINNYHHAHDAYLNAVVGTALIKKYPKLESEFVYGDYKVYDVRKMIAKSEQEIGKATAKYFFYSNIMNFFKTEITLANGEIRKRPLIETNGETGEIVWDKGRDFATVRKVLSMPQVNIVKKTEVQTGGFSKESILPKRNSDKLIARKKDWDPKKYGGFDSPTVAYSVLVVAKVEKGKSKKLKSVKELLGITIMERSSFEKNPIDFLEAKGYKEVKKDLIIKLPKYSLFELENGRKRMLASAGELQKGNELALPSKYVNFLYLASHYEKLKGSPEDNEQKQLFVEQHKHYLDEIIEQISEFSKRVILADANLDKVLSAYNKHRDKPIREQAENIIHLFTLTNLGAPAAFKYFDTTIDRKRYTSTKEVLDATLIHQSITGLYETRIDLSQLGGDGGEAAAKPAPGSSGGTLGDQGSRGSDPLPEPRVTLTVEGIPTEFLVNTGAEHSVLTKPMGKMGSKRTVVAGATGSKVYPWTTKRLLKIGQKQVTHSFLVIPECPAPLLGRDLLTKLKAQIQFSTEGPQVTWEDRPAMCLVLNLEEEYRLHEKPVPPSIDPSWLQLFPMVWAEKAGMGLANQVPPVVVELKSDASPVAVRQYPMSKEAREGIRPHIQRFLDLGILVPCQSPWNTPLLPVKKPGTNDYRPVQDLREVNKRVQDIHPTVPNPYNLLSSLPPSHTWYSVLDLKDAFFCLKLHPNSQPLFAFEWRDPEKGNTGQLTWTRLPQGFKNSPTLFNEALHRDLASFRALNPQVVMLQYVDDLLVAAPTYRDCKEGTRRLLQELSKLGYRVSAKKAQLCREEVTYLGYLLKGGKRWLTPARKATVMKIPTPTTPRQVREFLGKAGFCRLFIPGFASLAAPLYPLTRPKVPFTWTEAHQEAFGRIKEALLSAPALALPDLTKPFALYVDEKEGVARGVLTQTLGPWRRPVAYLSKKLDPVASGWPTCLKAIAAVALLLKDADKLTLGQNVLVIAPHNLESIVRQPPDRWMTNARMTHYQSLLLNERVSFAPPAILNPATLLPVESDDTPIHICSEILAEETGTRPDLRDQPLPGVPAWYTDGSSFIMDGRRQAGAAIVDNKRTVWASNLPEGTSAQKAELIALTQALRLAEGKSINIYTDSRYAFATAHVHGAIYKQRGWLTSAGKDIKNKEEILALLEAIHLPKRVAIIHCPGHQRGTDPVATGNRKADEAAKQAAQSTRILTETTKNAGKRTADGSEFEKRTADGSEFESPKKKAKVE

SEQ ID NO: 1823 - protein, 2218 aa, synthetic construct
MPAAKRVKLDGGDKKYSIGLDIGTNSVGWAVITDEYKVPSKKFKVLGNTDRHSIKKNLIGALLFDSGETAEATRLKRTARRRYTRRKNRICYLQEIFSNEMAKVDDSFFHRLEESFLVEEDKKHERHPIFGNIVDEVAYHEKYPTIYHLRKKLVDSTDKADLRLIYLALAHMIKFRGHFLIEGDLNPDNSDVDKLFIQLVQTYNQLFEENPINASGVDAKAILSARLSKSRRLENLIAQLPGEKKNGLFGNLIALSLGLTPNFKSNFDLAEDAKLQLSKDTYDDDLDNLLAQIGDQYADLFLAAKNLSDAILLSDILRVNTEITKAPLSASMIKRYDEHHQDLTLLKALVRQQLPEKYKEIFFDQSKNGYAGYIDGGASQEEFYKFIKPILEKMDGTEELLVKLNREDLLRKQRTFDNGSIPHQIHLGELHAILRRQEDFYPFLKDNREKIEKILTFRIPYYVGPLARGNSRFAWMTRKSEETITPWNFEEVVDKGASAQSFIERMTNFDKNLPNEKVLPKHSLLYEYFTVYNELTKVKYVTEGMRKPAFLSGEQKKAIVDLLFKTNRKVTVKQLKEDYFKKIECFDSVEISGVEDRFNASLGTYHDLLKIIKDKDFLDNEENEDILEDIVLTLTLFEDREMIEERLKTYAHLFDDKVMKQLKRRRYTGWGRLSRKLINGIRDKQSGKTILDFLKSDGFANRNFMQLIHDDSLTFKEDIQKAQVSGQGDSLHEHIANLAGSPAIKKGILQTVKVVDELVKVMGRHKPENIVIEMARENQTTQKGQKNSRERMKRIEEGIKELGSQILKEHPVENTQLQNEKLYLYYLQNGRDMYVDQELDINRLSDYDVDHIVPQSFLKDDSIDNKVLTRSDKARGKSDNVPSEEVVKKMKNYWRQLLNAKLITQRKFDNLTKAERGGLSELDKAGFIKRQLVETRQITKHVAQILDSRMNTKYDENDKLIREVKVITLKSKLVSDFRKDFQFYKVREINNYHHAHDAYLNAVVGTALIKKYPKLESEFVYGDYKVYDVRKMIAKSEQEIGKATAKYFFYSNIMNFFKTEITLANGEIRKRPLIETNGETGEIVWDKGRDFATVRKVLSMPQVNIVKKTEVQTGGFSKESILPKRNSDKLIARKKDWDPKKYGGFDSPTVAYSVLVVAKVEKGKSKKLKSVKELLGITIMERSSFEKNPIDFLEAKGYKEVKKDLIIKLPKYSLFELENGRKRMLASAGELQKGNELALPSKYVNFLYLASHYEKLKGSPEDNEQKQLFVEQHKHYLDEIIEQISEFSKRVILADANLDKVLSAYNKHRDKPIREQAENIIHLFTLTNLGAPAAFKYFDTTIDRKRYTSTKEVLDATLIHQSITGLYETRIDLSQLGGDGGGGGGSSEAAAKGGTLGDQGSRGSDPLPEPRVTLTVEGIPTEFLVNTGAEHSVLTKPMGKMGSKRTVVAGATGSKVYPWTTKRLLKIGQKQVTHSFLVIPECPAPLLGRDLLTKLKAQIQFSTEGPQVTWEDRPAMCLVLNLEEEYRLHEKPVPPSIDPSWLQLFPMVWAEKAGMGLANQVPPVVVELKSDASPVAVRQYPMSKEAREGIRPHIQRFLDLGILVPCQSPWNTPLLPVKKPGTNDYRPVQDLREVNKRVQDIHPTVPNPYNLLSSLPPSHTWYSVLDLKDAFFCLKLHPNSQPLFAFEWRDPEKGNTGQLTWTRLPQGFKNSPTLFNEALHRDLASFRALNPQVVMLQYVDDLLVAAPTYRDCKEGTRRLLQELSKLGYRVSAKKAQLCREEVTYLGYLLKGGKRWLTPARKATVMKIPTPTTPRQVREFLGKAGFCRLFIPGFASLAAPLYPLTRPKVPFTWTEAHQEAFGRIKEALLSAPALALPDLTKPFALYVDEKEGVARGVLTQTLGPWRRPVAYLSKKLDPVASGWPTCLKAIAAVALLLKDADKLTLGQNVLVIAPHNLESIVRQPPDRWMTNARMTHYQSLLLNERVSFAPPAILNPATLLPVESDDTPIHICSEILAEETGTRPDLRDQPLPGVPAWYTDGSSFIMDGRRQAGAAIVDNKRTVWASNLPEGTSAQKAELIALTQALRLAEGKSINIYTDSRYAFATAHVHGAIYKQRGWLTSAGKDIKNKEEILALLEAIHLPKRVAIIHCPGHQRGTDPVATGNRKADEAAKQAAQSTRILTETTKNAGKRTADGSEFEKRTADGSEFESPKKKAKVE

SEQ ID NO: 1824 - protein, 2216 aa, synthetic construct
MPAAKRVKLDGGDKKYSIGLDIGTNSVGWAVITDEYKVPSKKFKVLGNTDRHSIKKNLIGALLFDSGETAEATRLKRTARRRYTRRKNRICYLQEIFSNEMAKVDDSFFHRLEESFLVEEDKKHERHPIFGNIVDEVAYHEKYPTIYHLRKKLVDSTDKADLRLIYLALAHMIKFRGHFLIEGDLNPDNSDVDKLFIQLVQTYNQLFEENPINASGVDAKAILSARLSKSRRLENLIAQLPGEKKNGLFGNLIALSLGLTPNFKSNFDLAEDAKLQLSKDTYDDDLDNLLAQIGDQYADLFLAAKNLSDAILLSDILRVNTEITKAPLSASMIKRYDEHHQDLTLLKALVRQQLPEKYKEIFFDQSKNGYAGYIDGGASQEEFYKFIKPILEKMDGTEELLVKLNREDLLRKQRTFDNGSIPHQIHLGELHAILRRQEDFYPFLKDNREKIEKILTFRIPYYVGPLARGNSRFAWMTRKSEETITPWNFEEVVDKGASAQSFIERMTNFDKNLPNEKVLPKHSLLYEYFTVYNELTKVKYVTEGMRKPAFLSGEQKKAIVDLLFKTNRKVTVKQLKEDYFKKIECFDSVEISGVEDRFNASLGTYHDLLKIIKDKDFLDNEENEDILEDIVLTLTLFEDREMIEERLKTYAHLFDDKVMKQLKRRRYTGWGRLSRKLINGIRDKQSGKTILDFLKSDGFANRNFMQLIHDDSLTFKEDIQKAQVSGQGDSLHEHIANLAGSPAIKKGILQTVKVVDELVKVMGRHKPENIVIEMARENQTTQKGQKNSRERMKRIEEGIKELGSQILKEHPVENTQLQNEKLYLYYLQNGRDMYVDQELDINRLSDYDVDHIVPQSFLKDDSIDNKVLTRSDKARGKSDNVPSEEVVKKMKNYWRQLLNAKLITQRKFDNLTKAERGGLSELDKAGFIKRQLVETRQITKHVAQILDSRMNTKYDENDKLIREVKVITLKSKLVSDFRKDFQFYKVREINNYHHAHDAYLNAVVGTALIKKYPKLESEFVYGDYKVYDVRKMIAKSEQEIGKATAKYFFYSNIMNFFKTEITLANGEIRKRPLIETNGETGEIVWDKGRDFATVRKVLSMPQVNIVKKTEVQTGGFSKESILPKRNSDKLIARKKDWDPKKYGGFDSPTVAYSVLVVAKVEKGKSKKLKSVKELLGITIMERSSFEKNPIDFLEAKGYKEVKKDLIIKLPKYSLFELENGRKRMLASAGELQKGNELALPSKYVNFLYLASHYEKLKGSPEDNEQKQLFVEQHKHYLDEIIEQISEFSKRVILADANLDKVLSAYNKHRDKPIREQAENIIHLFTLTNLGAPAAFKYFDTTIDRKRYTSTKEVLDATLIHQSITGLYETRIDLSQLGGDGGPAPAPAPAPGGTLGDQGSRGSDPLPEPRVTLTVEGIPTEFLVNTGAEHSVLTKPMGKMGSKRTVVAGATGSKVYPWTTKRLLKIGQKQVTHSFLVIPECPAPLLGRDLLTKLKAQIQFSTEGPQVTWEDRPAMCLVLNLEEEYRLHEKPVPPSIDPSWLQLFPMVWAEKAGMGLANQVPPVVVELKSDASPVAVRQYPMSKEAREGIRPHIQRFLDLGILVPCQSPWNTPLLPVKKPGTNDYRPVQDLREVNKRVQDIHPTVPNPYNLLSSLPPSHTWYSVLDLKDAFFCLKLHPNSQPLFAFEWRDPEKGNTGQLTWTRLPQGFKNSPTLFNEALHRDLASFRALNPQVVMLQYVDDLLVAAPTYRDCKEGTRRLLQELSKLGYRVSAKKAQLCREEVTYLGYLLKGGKRWLTPARKATVMKIPTPTTPRQVREFLGKAGFCRLFIPGFASLAAPLYPLTRPKVPFTWTEAHQEAFGRIKEALLSAPALALPDLTKPFALYVDEKEGVARGVLTQTLGPWRRPVAYLSKKLDPVASGWPTCLKAIAAVALLLKDADKLTLGQNVLVIAPHNLESIVRQPPDRWMTNARMTHYQSLLLNERVSFAPPAILNPATLLPVESDDTPIHICSEILAEETGTRPDLRDQPLPGVPAWYTDGSSFIMDGRRQAGAAIVDNKRTVWASNLPEGTSAQKAELIALTQALRLAEGKSINIYTDSRYAFATAHVHGAIYKQRGWLTSAGKDIKNKEEILALLEAIHLPKRVAIIHCPGHQRGTDPVATGNRKADEAAKQAAQSTRILTETTKNAGKRTADGSEFEKRTADGSEFESPKKKAKVE

SEQ ID NO: 1825 - protein, 2215 aa, synthetic construct
MPAAKRVKLDGGDKKYSIGLDIGTNSVGWAVITDEYKVPSKKFKVLGNTDRHSIKKNLIGALLFDSGETAEATRLKRTARRRYTRRKNRICYLQEIFSNEMAKVDDSFFHRLEESFLVEEDKKHERHPIFGNIVDEVAYHEKYPTIYHLRKKLVDSTDKADLRLIYLALAHMIKFRGHFLIEGDLNPDNSDVDKLFIQLVQTYNQLFEENPINASGVDAKAILSARLSKSRRLENLIAQLPGEKKNGLFGNLIALSLGLTPNFKSNFDLAEDAKLQLSKDTYDDDLDNLLAQIGDQYADLFLAAKNLSDAILLSDILRVNTEITKAPLSASMIKRYDEHHQDLTLLKALVRQQLPEKYKEIFFDQSKNGYAGYIDGGASQEEFYKFIKPILEKMDGTEELLVKLNREDLLRKQRTFDNGSIPHQIHLGELHAILRRQEDFYPFLKDNREKIEKILTFRIPYYVGPLARGNSRFAWMTRKSEETITPWNFEEVVDKGASAQSFIERMTNFDKNLPNEKVLPKHSLLYEYFTVYNELTKVKYVTEGMRKPAFLSGEQKKAIVDLLFKTNRKVTVKQLKEDYFKKIECFDSVEISGVEDRFNASLGTYHDLLKIIKDKDFLDNEENEDILEDIVLTLTLFEDREMIEERLKTYAHLFDDKVMKQLKRRRYTGWGRLSRKLINGIRDKQSGKTILDFLKSDGFANRNFMQLIHDDSLTFKEDIQKAQVSGQGDSLHEHIANLAGSPAIKKGILQTVKVVDELVKVMGRHKPENIVIEMARENQTTQKGQKNSRERMKRIEEGIKELGSQILKEHPVENTQLQNEKLYLYYLQNGRDMYVDQELDINRLSDYDVDHIVPQSFLKDDSIDNKVLTRSDKARGKSDNVPSEEVVKKMKNYWRQLLNAKLITQRKFDNLTKAERGGLSELDKAGFIKRQLVETRQITKHVAQILDSRMNTKYDENDKLIREVKVITLKSKLVSDFRKDFQFYKVREINNYHHAHDAYLNAVVGTALIKKYPKLESEFVYGDYKVYDVRKMIAKSEQEIGKATAKYFFYSNIMNFFKTEITLANGEIRKRPLIETNGETGEIVWDKGRDFATVRKVLSMPQVNIVKKTEVQTGGFSKESILPKRNSDKLIARKKDWDPKKYGGFDSPTVAYSVLVVAKVEKGKSKKLKSVKELLGITIMERSSFEKNPIDFLEAKGYKEVKKDLIIKLPKYSLFELENGRKRMLASAGELQKGNELALPSKYVNFLYLASHYEKLKGSPEDNEQKQLFVEQHKHYLDEIIEQISEFSKRVILADANLDKVLSAYNKHRDKPIREQAENIIHLFTLTNLGAPAAFKYFDTTIDRKRYTSTKEVLDATLIHQSITGLYETRIDLSQLGGDGGGGSEAAAKGGTLGDQGSRGSDPLPEPRVTLTVEGIPTEFLVNTGAEHSVLTKPMGKMGSKRTVVAGATGSKVYPWTTKRLLKIGQKQVTHSFLVIPECPAPLLGRDLLTKLKAQIQFSTEGPQVTWEDRPAMCLVLNLEEEYRLHEKPVPPSIDPSWLQLFPMVWAEKAGMGLANQVPPVVVELKSDASPVAVRQYPMSKEAREGIRPHIQRFLDLGILVPCQSPWNTPLLPVKKPGTNDYRPVQDLREVNKRVQDIHPTVPNPYNLLSSLPPSHTWYSVLDLKDAFFCLKLHPNSQPLFAFEWRDPEKGNTGQLTWTRLPQGFKNSPTLFNEALHRDLASFRALNPQVVMLQYVDDLLVAAPTYRDCKEGTRRLLQELSKLGYRVSAKKAQLCREEVTYLGYLLKGGKRWLTPARKATVMKIPTPTTPRQVREFLGKAGFCRLFIPGFASLAAPLYPLTRPKVPFTWTEAHQEAFGRIKEALLSAPALALPDLTKPFALYVDEKEGVARGVLTQTLGPWRRPVAYLSKKLDPVASGWPTCLKAIAAVALLLKDADKLTLGQNVLVIAPHNLESIVRQPPDRWMTNARMTHYQSLLLNERVSFAPPAILNPATLLPVESDDTPIHICSEILAEETGTRPDLRDQPLPGVPAWYTDGSSFIMDGRRQAGAAIVDNKRTVWASNLPEGTSAQKAELIALTQALRLAEGKSINIYTDSRYAFATAHVHGAIYKQRGWLTSAGKDIKNKEEILALLEAIHLPKRVAIIHCPGHQRGTDPVATGNRKADEAAKQAAQSTRILTETTKNAGKRTADGSEFEKRTADGSEFESPKKKAKVE

SEQ ID NO: 1826 - protein, 2216 aa, synthetic construct
MPAAKRVKLDGGDKKYSIGLDIGTNSVGWAVITDEYKVPSKKFKVLGNTDRHSIKKNLIGALLFDSGETAEATRLKRTARRRYTRRKNRICYLQEIFSNEMAKVDDSFFHRLEESFLVEEDKKHERHPIFGNIVDEVAYHEKYPTIYHLRKKLVDSTDKADLRLIYLALAHMIKFRGHFLIEGDLNPDNSDVDKLFIQLVQTYNQLFEENPINASGVDAKAILSARLSKSRRLENLIAQLPGEKKNGLFGNLIALSLGLTPNFKSNFDLAEDAKLQLSKDTYDDDLDNLLAQIGDQYADLFLAAKNLSDAILLSDILRVNTEITKAPLSASMIKRYDEHHQDLTLLKALVRQQLPEKYKEIFFDQSKNGYAGYIDGGASQEEFYKFIKPILEKMDGTEELLVKLNREDLLRKQRTFDNGSIPHQIHLGELHAILRRQEDFYPFLKDNREKIEKILTFRIPYYVGPLARGNSRFAWMTRKSEETITPWNFEEVVDKGASAQSFIERMTNFDKNLPNEKVLPKHSLLYEYFTVYNELTKVKYVTEGMRKPAFLSGEQKKAIVDLLFKTNRKVTVKQLKEDYFKKIECFDSVEISGVEDRFNASLGTYHDLLKIIKDKDFLDNEENEDILEDIVLTLTLFEDREMIEERLKTYAHLFDDKVMKQLKRRRYTGWGRLSRKLINGIRDKQSGKTILDFLKSDGFANRNFMQLIHDDSLTFKEDIQKAQVSGQGDSLHEHIANLAGSPAIKKGILQTVKVVDELVKVMGRHKPENIVIEMARENQTTQKGQKNSRERMKRIEEGIKELGSQILKEHPVENTQLQNEKLYLYYLQNGRDMYVDQELDINRLSDYDVDHIVPQSFLKDDSIDNKVLTRSDKARGKSDNVPSEEVVKKMKNYWRQLLNAKLITQRKFDNLTKAERGGLSELDKAGFIKRQLVETRQITKHVAQILDSRMNTKYDENDKLIREVKVITLKSKLVSDFRKDFQFYKVREINNYHHAHDAYLNAVVGTALIKKYPKLESEFVYGDYKVYDVRKMIAKSEQEIGKATAKYFFYSNIMNFFKTEITLANGEIRKRPLIETNGETGEIVWDKGRDFATVRKVLSMPQVNIVKKTEVQTGGFSKESILPKRNSDKLIARKKDWDPKKYGGFDSPTVAYSVLVVAKVEKGKSKKLKSVKELLGITIMERSSFEKNPIDFLEAKGYKEVKKDLIIKLPKYSLFELENGRKRMLASAGELQKGNELALPSKYVNFLYLASHYEKLKGSPEDNEQKQLFVEQHKHYLDEIIEQISEFSKRVILADANLDKVLSAYNKHRDKPIREQAENIIHLFTLTNLGAPAAFKYFDTTIDRKRYTSTKEVLDATLIHQSITGLYETRIDLSQLGGDGGGGGPAPGGSGGTLGDQGSRGSDPLPEPRVTLTVEGIPTEFLVNTGAEHSVLTKPMGKMGSKRTVVAGATGSKVYPWTTKRLLKIGQKQVTHSFLVIPECPAPLLGRDLLTKLKAQIQFSTEGPQVTWEDRPAMCLVLNLEEEYRLHEKPVPPSIDPSWLQLFPMVWAEKAGMGLANQVPPVVVELKSDASPVAVRQYPMSKEAREGIRPHIQRFLDLGILVPCQSPWNTPLLPVKKPGTNDYRPVQDLREVNKRVQDIHPTVPNPYNLLSSLPPSHTWYSVLDLKDAFFCLKLHPNSQPLFAFEWRDPEKGNTGQLTWTRLPQGFKNSPTLFNEALHRDLASFRALNPQVVMLQYVDDLLVAAPTYRDCKEGTRRLLQELSKLGYRVSAKKAQLCREEVTYLGYLLKGGKRWLTPARKATVMKIPTPTTPRQVREFLGKAGFCRLFIPGFASLAAPLYPLTRPKVPFTWTEAHQEAFGRIKEALLSAPALALPDLTKPFALYVDEKEGVARGVLTQTLGPWRRPVAYLSKKLDPVASGWPTCLKAIAAVALLLKDADKLTLGQNVLVIAPHNLESIVRQPPDRWMTNARMTHYQSLLLNERVSFAPPAILNPATLLPVESDDTPIHICSEILAEETGTRPDLRDQPLPGVPAWYTDGSSFIMDGRRQAGAAIVDNKRTVWASNLPEGTSAQKAELIALTQALRLAEGKSINIYTDSRYAFATAHVHGAIYKQRGWLTSAGKDIKNKEEILALLEAIHLPKRVAIIHCPGHQRGTDPVATGNRKADEAAKQAAQSTRILTETTKNAGKRTADGSEFEKRTADGSEFESPKKKAKVE

SEQ ID NO: 1827 - protein, 2216 aa, synthetic construct
MPAAKRVKLDGGDKKYSIGLDIGTNSVGWAVITDEYKVPSKKFKVLGNTDRHSIKKNLIGALLFDSGETAEATRLKRTARRRYTRRKNRICYLQEIFSNEMAKVDDSFFHRLEESFLVEEDKKHERHPIFGNIVDEVAYHEKYPTIYHLRKKLVDSTDKADLRLIYLALAHMIKFRGHFLIEGDLNPDNSDVDKLFIQLVQTYNQLFEENPINASGVDAKAILSARLSKSRRLENLIAQLPGEKKNGLFGNLIALSLGLTPNFKSNFDLAEDAKLQLSKDTYDDDLDNLLAQIGDQYADLFLAAKNLSDAILLSDILRVNTEITKAPLSASMIKRYDEHHQDLTLLKALVRQQLPEKYKEIFFDQSKNGYAGYIDGGASQEEFYKFIKPILEKMDGTEELLVKLNREDLLRKQRTFDNGSIPHQIHLGELHAILRRQEDFYPFLKDNREKIEKILTFRIPYYVGPLARGNSRFAWMTRKSEETITPWNFEEVVDKGASAQSFIERMTNFDKNLPNEKVLPKHSLLYEYFTVYNELTKVKYVTEGMRKPAFLSGEQKKAIVDLLFKTNRKVTVKQLKEDYFKKIECFDSVEISGVEDRFNASLGTYHDLLKIIKDKDFLDNEENEDILEDIVLTLTLFEDREMIEERLKTYAHLFDDKVMKQLKRRRYTGWGRLSRKLINGIRDKQSGKTILDFLKSDGFANRNFMQLIHDDSLTFKEDIQKAQVSGQGDSLHEHIANLAGSPAIKKGILQTVKVVDELVKVMGRHKPENIVIEMARENQTTQKGQKNSRERMKRIEEGIKELGSQILKEHPVENTQLQNEKLYLYYLQNGRDMYVDQELDINRLSDYDVDHIVPQSFLKDDSIDNKVLTRSDKARGKSDNVPSEEVVKKMKNYWRQLLNAKLITQRKFDNLTKAERGGLSELDKAGFIKRQLVETRQITKHVAQILDSRMNTKYDENDKLIREVKVITLKSKLVSDFRKDFQFYKVREINNYHHAHDAYLNAVVGTALIKKYPKLESEFVYGDYKVYDVRKMIAKSEQEIGKATAKYFFYSNIMNFFKTEITLANGEIRKRPLIETNGETGEIVWDKGRDFATVRKVLSMPQVNIVKKTEVQTGGFSKESILPKRNSDKLIARKKDWDPKKYGGFDSPTVAYSVLVVAKVEKGKSKKLKSVKELLGITIMERSSFEKNPIDFLEAKGYKEVKKDLIIKLPKYSLFELENGRKRMLASAGELQKGNELALPSKYVNFLYLASHYEKLKGSPEDNEQKQLFVEQHKHYLDEIIEQISEFSKRVILADANLDKVLSAYNKHRDKPIREQAENIIHLFTLTNLGAPAAFKYFDTTIDRKRYTSTKEVLDATLIHQSITGLYETRIDLSQLGGDGGPAPGGSGSSGGTLGDQGSRGSDPLPEPRVTLTVEGIPTEFLVNTGAEHSVLTKPMGKMGSKRTVVAGATGSKVYPWTTKRLLKIGQKQVTHSFLVIPECPAPLLGRDLLTKLKAQIQFSTEGPQVTWEDRPAMCLVLNLEEEYRLHEKPVPPSIDPSWLQLFPMVWAEKAGMGLANQVPPVVVELKSDASPVAVRQYPMSKEAREGIRPHIQRFLDLGILVPCQSPWNTPLLPVKKPGTNDYRPVQDLREVNKRVQDIHPTVPNPYNLLSSLPPSHTWYSVLDLKDAFFCLKLHPNSQPLFAFEWRDPEKGNTGQLTWTRLPQGFKNSPTLFNEALHRDLASFRALNPQVVMLQYVDDLLVAAPTYRDCKEGTRRLLQELSKLGYRVSAKKAQLCREEVTYLGYLLKGGKRWLTPARKATVMKIPTPTTPRQVREFLGKAGFCRLFIPGFASLAAPLYPLTRPKVPFTWTEAHQEAFGRIKEALLSAPALALPDLTKPFALYVDEKEGVARGVLTQTLGPWRRPVAYLSKKLDPVASGWPTCLKAIAAVALLLKDADKLTLGQNVLVIAPHNLESIVRQPPDRWMTNARMTHYQSLLLNERVSFAPPAILNPATLLPVESDDTPIHICSEILAEETGTRPDLRDQPLPGVPAWYTDGSSFIMDGRRQAGAAIVDNKRTVWASNLPEGTSAQKAELIALTQALRLAEGKSINIYTDSRYAFATAHVHGAIYKQRGWLTSAGKDIKNKEEILALLEAIHLPKRVAIIHCPGHQRGTDPVATGNRKADEAAKQAAQSTRILTETTKNAGKRTADGSEFEKRTADGSEFESPKKKAKVE

SEQ ID NO: 1828 - protein, 2212 aa, synthetic construct
MPAAKRVKLDGGDKKYSIGLDIGTNSVGWAVITDEYKVPSKKFKVLGNTDRHSIKKNLIGALLFDSGETAEATRLKRTARRRYTRRKNRICYLQEIFSNEMAKVDDSFFHRLEESFLVEEDKKHERHPIFGNIVDEVAYHEKYPTIYHLRKKLVDSTDKADLRLIYLALAHMIKFRGHFLIEGDLNPDNSDVDKLFIQLVQTYNQLFEENPINASGVDAKAILSARLSKSRRLENLIAQLPGEKKNGLFGNLIALSLGLTPNFKSNFDLAEDAKLQLSKDTYDDDLDNLLAQIGDQYADLFLAAKNLSDAILLSDILRVNTEITKAPLSASMIKRYDEHHQDLTLLKALVRQQLPEKYKEIFFDQSKNGYAGYIDGGASQEEFYKFIKPILEKMDGTEELLVKLNREDLLRKQRTFDNGSIPHQIHLGELHAILRRQEDFYPFLKDNREKIEKILTFRIPYYVGPLARGNSRFAWMTRKSEETITPWNFEEVVDKGASAQSFIERMTNFDKNLPNEKVLPKHSLLYEYFTVYNELTKVKYVTEGMRKPAFLSGEQKKAIVDLLFKTNRKVTVKQLKEDYFKKIECFDSVEISGVEDRFNASLGTYHDLLKIIKDKDFLDNEENEDILEDIVLTLTLFEDREMIEERLKTYAHLFDDKVMKQLKRRRYTGWGRLSRKLINGIRDKQSGKTILDFLKSDGFANRNFMQLIHDDSLTFKEDIQKAQVSGQGDSLHEHIANLAGSPAIKKGILQTVKVVDELVKVMGRHKPENIVIEMARENQTTQKGQKNSRERMKRIEEGIKELGSQILKEHPVENTQLQNEKLYLYYLQNGRDMYVDQELDINRLSDYDVDHIVPQSFLKDDSIDNKVLTRSDKARGKSDNVPSEEVVKKMKNYWRQLLNAKLITQRKFDNLTKAERGGLSELDKAGFIKRQLVETRQITKHVAQILDSRMNTKYDENDKLIREVKVITLKSKLVSDFRKDFQFYKVREINNYHHAHDAYLNAVVGTALIKKYPKLESEFVYGDYKVYDVRKMIAKSEQEIGKATAKYFFYSNIMNFFKTEITLANGEIRKRPLIETNGETGEIVWDKGRDFATVRKVLSMPQVNIVKKTEVQTGGFSKESILPKRNSDKLIARKKDWDPKKYGGFDSPTVAYSVLVVAKVEKGKSKKLKSVKELLGITIMERSSFEKNPIDFLEAKGYKEVKKDLIIKLPKYSLFELENGRKRMLASAGELQKGNELALPSKYVNFLYLASHYEKLKGSPEDNEQKQLFVEQHKHYLDEIIEQISEFSKRVILADANLDKVLSAYNKHRDKPIREQAENIIHLFTLTNLGAPAAFKYFDTTIDRKRYTSTKEVLDATLIHQSITGLYETRIDLSQLGGDGGGGGGGGGTLGDQGSRGSDPLPEPRVTLTVEGIPTEFLVNTGAEHSVLTKPMGKMGSKRTVVAGATGSKVYPWTTKRLLKIGQKQVTHSFLVIPECPAPLLGRDLLTKLKAQIQFSTEGPQVTWEDRPAMCLVLNLEEEYRLHEKPVPPSIDPSWLQLFPMVWAEKAGMGLANQVPPVVVELKSDASPVAVRQYPMSKEAREGIRPHIQRFLDLGILVPCQSPWNTPLLPVKKPGTNDYRPVQDLREVNKRVQDIHPTVPNPYNLLSSLPPSHTWYSVLDLKDAFFCLKLHPNSQPLFAFEWRDPEKGNTGQLTWTRLPQGFKNSPTLFNEALHRDLASFRALNPQVVMLQYVDDLLVAAPTYRDCKEGTRRLLQELSKLGYRVSAKKAQLCREEVTYLGYLLKGGKRWLTPARKATVMKIPTPTTPRQVREFLGKAGFCRLFIPGFASLAAPLYPLTRPKVPFTWTEAHQEAFGRIKEALLSAPALALPDLTKPFALYVDEKEGVARGVLTQTLGPWRRPVAYLSKKLDPVASGWPTCLKAIAAVALLLKDADKLTLGQNVLVIAPHNLESIVRQPPDRWMTNARMTHYQSLLLNERVSFAPPAILNPATLLPVESDDTPIHICSEILAEETGTRPDLRDQPLPGVPAWYTDGSSFIMDGRRQAGAAIVDNKRTVWASNLPEGTSAQKAELIALTQALRLAEGKSINIYTDSRYAFATAHVHGAIYKQRGWLTSAGKDIKNKEEILALLEAIHLPKRVAIIHCPGHQRGTDPVATGNRKADEAAKQAAQSTRILTETTKNAGKRTADGSEFEKRTADGSEFESPKKKAKVE

SEQ ID NO: 1829 - protein, 2218 aa, synthetic construct
MPAAKRVKLDGGDKKYSIGLDIGTNSVGWAVITDEYKVPSKKFKVLGNTDRHSIKKNLIGALLFDSGETAEATRLKRTARRRYTRRKNRICYLQEIFSNEMAKVDDSFFHRLEESFLVEEDKKHERHPIFGNIVDEVAYHEKYPTIYHLRKKLVDSTDKADLRLIYLALAHMIKFRGHFLIEGDLNPDNSDVDKLFIQLVQTYNQLFEENPINASGVDAKAILSARLSKSRRLENLIAQLPGEKKNGLFGNLIALSLGLTPNFKSNFDLAEDAKLQLSKDTYDDDLDNLLAQIGDQYADLFLAAKNLSDAILLSDILRVNTEITKAPLSASMIKRYDEHHQDLTLLKALVRQQLPEKYKEIFFDQSKNGYAGYIDGGASQEEFYKFIKPILEKMDGTEELLVKLNREDLLRKQRTFDNGSIPHQIHLGELHAILRRQEDFYPFLKDNREKIEKILTFRIPYYVGPLARGNSRFAWMTRKSEETITPWNFEEVVDKGASAQSFIERMTNFDKNLPNEKVLPKHSLLYEYFTVYNELTKVKYVTEGMRKPAFLSGEQKKAIVDLLFKTNRKVTVKQLKEDYFKKIECFDSVEISGVEDRFNASLGTYHDLLKIIKDKDFLDNEENEDILEDIVLTLTLFEDREMIEERLKTYAHLFDDKVMKQLKRRRYTGWGRLSRKLINGIRDKQSGKTILDFLKSDGFANRNFMQLIHDDSLTFKEDIQKAQVSGQGDSLHEHIANLAGSPAIKKGILQTVKVVDELVKVMGRHKPENIVIEMARENQTTQKGQKNSRERMKRIEEGIKELGSQILKEHPVENTQLQNEKLYLYYLQNGRDMYVDQELDINRLSDYDVDHIVPQSFLKDDSIDNKVLTRSDKARGKSDNVPSEEVVKKMKNYWRQLLNAKLITQRKFDNLTKAERGGLSELDKAGFIKRQLVETRQITKHVAQILDSRMNTKYDENDKLIREVKVITLKSKLVSDFRKDFQFYKVREINNYHHAHDAYLNAVVGTALIKKYPKLESEFVYGDYKVYDVRKMIAKSEQEIGKATAKYFFYSNIMNFFKTEITLANGEIRKRPLIETNGETGEIVWDKGRDFATVRKVLSMPQVNIVKKTEVQTGGFSKESILPKRNSDKLIARKKDWDPKKYGGFDSPTVAYSVLVVAKVEKGKSKKLKSVKELLGITIMERSSFEKNPIDFLEAKGYKEVKKDLIIKLPKYSLFELENGRKRMLASAGELQKGNELALPSKYVNFLYLASHYEKLKGSPEDNEQKQLFVEQHKHYLDEIIEQISEFSKRVILADANLDKVLSAYNKHRDKPIREQAENIIHLFTLTNLGAPAAFKYFDTTIDRKRYTSTKEVLDATLIHQSITGLYETRIDLSQLGGDGGGGSEAAAKGGGGGTLGDQGSRGSDPLPEPRVTLTVEGIPTEFLVNTGAEHSVLTKPMGKMGSKRTVVAGATGSKVYPWTTKRLLKIGQKQVTHSFLVIPECPAPLLGRDLLTKLKAQIQFSTEGPQVTWEDRPAMCLVLNLEEEYRLHEKPVPPSIDPSWLQLFPMVWAEKAGMGLANQVPPVVVELKSDASPVAVRQYPMSKEAREGIRPHIQRFLDLGILVPCQSPWNTPLLPVKKPGTNDYRPVQDLREVNKRVQDIHPTVPNPYNLLSSLPPSHTWYSVLDLKDAFFCLKLHPNSQPLFAFEWRDPEKGNTGQLTWTRLPQGFKNSPTLFNEALHRDLASFRALNPQVVMLQYVDDLLVAAPTYRDCKEGTRRLLQELSKLGYRVSAKKAQLCREEVTYLGYLLKGGKRWLTPARKATVMKIPTPTTPRQVREFLGKAGFCRLFIPGFASLAAPLYPLTRPKVPFTWTEAHQEAFGRIKEALLSAPALALPDLTKPFALYVDEKEGVARGVLTQTLGPWRRPVAYLSKKLDPVASGWPTCLKAIAAVALLLKDADKLTLGQNVLVIAPHNLESIVRQPPDRWMTNARMTHYQSLLLNERVSFAPPAILNPATLLPVESDDTPIHICSEILAEETGTRPDLRDQPLPGVPAWYTDGSSFIMDGRRQAGAAIVDNKRTVWASNLPEGTSAQKAELIALTQALRLAEGKSINIYTDSRYAFATAHVHGAIYKQRGWLTSAGKDIKNKEEILALLEAIHLPKRVAIIHCPGHQRGTDPVATGNRKADEAAKQAAQSTRILTETTKNAGKRTADGSEFEKRTADGSEFESPKKKAKVE

SEQ ID NO: 1830 - protein, 2216 aa, synthetic construct
MPAAKRVKLDGGDKKYSIGLDIGTNSVGWAVITDEYKVPSKKFKVLGNTDRHSIKKNLIGALLFDSGETAEATRLKRTARRRYTRRKNRICYLQEIFSNEMAKVDDSFFHRLEESFLVEEDKKHERHPIFGNIVDEVAYHEKYPTIYHLRKKLVDSTDKADLRLIYLALAHMIKFRGHFLIEGDLNPDNSDVDKLFIQLVQTYNQLFEENPINASGVDAKAILSARLSKSRRLENLIAQLPGEKKNGLFGNLIALSLGLTPNFKSNFDLAEDAKLQLSKDTYDDDLDNLLAQIGDQYADLFLAAKNLSDAILLSDILRVNTEITKAPLSASMIKRYDEHHQDLTLLKALVRQQLPEKYKEIFFDQSKNGYAGYIDGGASQEEFYKFIKPILEKMDGTEELLVKLNREDLLRKQRTFDNGSIPHQIHLGELHAILRRQEDFYPFLKDNREKIEKILTFRIPYYVGPLARGNSRFAWMTRKSEETITPWNFEEVVDKGASAQSFIERMTNFDKNLPNEKVLPKHSLLYEYFTVYNELTKVKYVTEGMRKPAFLSGEQKKAIVDLLFKTNRKVTVKQLKEDYFKKIECFDSVEISGVEDRFNASLGTYHDLLKIIKDKDFLDNEENEDILEDIVLTLTLFEDREMIEERLKTYAHLFDDKVMKQLKRRRYTGWGRLSRKLINGIRDKQSGKTILDFLKSDGFANRNFMQLIHDDSLTFKEDIQKAQVSGQGDSLHEHIANLAGSPAIKKGILQTVKVVDELVKVMGRHKPENIVIEMARENQTTQKGQKNSRERMKRIEEGIKELGSQILKEHPVENTQLQNEKLYLYYLQNGRDMYVDQELDINRLSDYDVDHIVPQSFLKDDSIDNKVLTRSDKARGKSDNVPSEEVVKKMKNYWRQLLNAKLITQRKFDNLTKAERGGLSELDKAGFIKRQLVETRQITKHVAQILDSRMNTKYDENDKLIREVKVITLKSKLVSDFRKDFQFYKVREINNYHHAHDAYLNAVVGTALIKKYPKLESEFVYGDYKVYDVRKMIAKSEQEIGKATAKYFFYSNIMNFFKTEITLANGEIRKRPLIETNGETGEIVWDKGRDFATVRKVLSMPQVNIVKKTEVQTGGFSKESILPKRNSDKLIARKKDWDPKKYGGFDSPTVAYSVLVVAKVEKGKSKKLKSVKELLGITIMERSSFEKNPIDFLEAKGYKEVKKDLIIKLPKYSLFELENGRKRMLASAGELQKGNELALPSKYVNFLYLASHYEKLKGSPEDNEQKQLFVEQHKHYLDEIIEQISEFSKRVILADANLDKVLSAYNKHRDKPIREQAENIIHLFTLTNLGAPAAFKYFDTTIDRKRYTSTKEVLDATLIHQSITGLYETRIDLSQLGGDGGGSSGGSPAPGGTLGDQGSRGSDPLPEPRVTLTVEGIPTEFLVNTGAEHSVLTKPMGKMGSKRTVVAGATGSKVYPWTTKRLLKIGQKQVTHSFLVIPECPAPLLGRDLLTKLKAQIQFSTEGPQVTWEDRPAMCLVLNLEEEYRLHEKPVPPSIDPSWLQLFPMVWAEKAGMGLANQVPPVVVELKSDASPVAVRQYPMSKEAREGIRPHIQRFLDLGILVPCQSPWNTPLLPVKKPGTNDYRPVQDLREVNKRVQDIHPTVPNPYNLLSSLPPSHTWYSVLDLKDAFFCLKLHPNSQPLFAFEWRDPEKGNTGQLTWTRLPQGFKNSPTLFNEALHRDLASFRALNPQVVMLQYVDDLLVAAPTYRDCKEGTRRLLQELSKLGYRVSAKKAQLCREEVTYLGYLLKGGKRWLTPARKATVMKIPTPTTPRQVREFLGKAGFCRLFIPGFASLAAPLYPLTRPKVPFTWTEAHQEAFGRIKEALLSAPALALPDLTKPFALYVDEKEGVARGVLTQTLGPWRRPVAYLSKKLDPVASGWPTCLKAIAAVALLLKDADKLTLGQNVLVIAPHNLESIVRQPPDRWMTNARMTHYQSLLLNERVSFAPPAILNPATLLPVESDDTPIHICSEILAEETGTRPDLRDQPLPGVPAWYTDGSSFIMDGRRQAGAAIVDNKRTVWASNLPEGTSAQKAELIALTQALRLAEGKSINIYTDSRYAFATAHVHGAIYKQRGWLTSAGKDIKNKEEILALLEAIHLPKRVAIIHCPGHQRGTDPVATGNRKADEAAKQAAQSTRILTETTKNAGKRTADGSEFEKRTADGSEFESPKKKAKVE

SEQ ID NO: 1831 - protein, 2213 aa, synthetic construct
MPAAKRVKLDGGDKKYSIGLDIGTNSVGWAVITDEYKVPSKKFKVLGNTDRHSIKKNLIGALLFDSGETAEATRLKRTARRRYTRRKNRICYLQEIFSNEMAKVDDSFFHRLEESFLVEEDKKHERHPIFGNIVDEVAYHEKYPTIYHLRKKLVDSTDKADLRLIYLALAHMIKFRGHFLIEGDLNPDNSDVDKLFIQLVQTYNQLFEENPINASGVDAKAILSARLSKSRRLENLIAQLPGEKKNGLFGNLIALSLGLTPNFKSNFDLAEDAKLQLSKDTYDDDLDNLLAQIGDQYADLFLAAKNLSDAILLSDILRVNTEITKAPLSASMIKRYDEHHQDLTLLKALVRQQLPEKYKEIFFDQSKNGYAGYIDGGASQEEFYKFIKPILEKMDGTEELLVKLNREDLLRKQRTFDNGSIPHQIHLGELHAILRRQEDFYPFLKDNREKIEKILTFRIPYYVGPLARGNSRFAWMTRKSEETITPWNFEEVVDKGASAQSFIERMTNFDKNLPNEKVLPKHSLLYEYFTVYNELTKVKYVTEGMRKPAFLSGEQKKAIVDLLFKTNRKVTVKQLKEDYFKKIECFDSVEISGVEDRFNASLGTYHDLLKIIKDKDFLDNEENEDILEDIVLTLTLFEDREMIEERLKTYAHLFDDKVMKQLKRRRYTGWGRLSRKLINGIRDKQSGKTILDFLKSDGFANRNFMQLIHDDSLTFKEDIQKAQVSGQGDSLHEHIANLAGSPAIKKGILQTVKVVDELVKVMGRHKPENIVIEMARENQTTQKGQKNSRERMKRIEEGIKELGSQILKEHPVENTQLQNEKLYLYYLQNGRDMYVDQELDINRLSDYDVDHIVPQSFLKDDSIDNKVLTRSDKARGKSDNVPSEEVVKKMKNYWRQLLNAKLITQRKFDNLTKAERGGLSELDKAGFIKRQLVETRQITKHVAQILDSRMNTKYDENDKLIREVKVITLKSKLVSDFRKDFQFYKVREINNYHHAHDAYLNAVVGTALIKKYPKLESEFVYGDYKVYDVRKMIAKSEQEIGKATAKYFFYSNIMNFFKTEITLANGEIRKRPLIETNGETGEIVWDKGRDFATVRKVLSMPQVNIVKKTEVQTGGFSKESILPKRNSDKLIARKKDWDPKKYGGFDSPTVAYSVLVVAKVEKGKSKKLKSVKELLGITIMERSSFEKNPIDFLEAKGYKEVKKDLIIKLPKYSLFELENGRKRMLASAGELQKGNELALPSKYVNFLYLASHYEKLKGSPEDNEQKQLFVEQHKHYLDEIIEQISEFSKRVILADANLDKVLSAYNKHRDKPIREQAENIIHLFTLTNLGAPAAFKYFDTTIDRKRYTSTKEVLDATLIHQSITGLYETRIDLSQLGGDGGGSSGSSGGTLGDQGSRGSDPLPEPRVTLTVEGIPTEFLVNTGAEHSVLTKPMGKMGSKRTVVAGATGSKVYPWTTKRLLKIGQKQVTHSFLVIPECPAPLLGRDLLTKLKAQIQFSTEGPQVTWEDRPAMCLVLNLEEEYRLHEKPVPPSIDPSWLQLFPMVWAEKAGMGLANQVPPVVVELKSDASPVAVRQYPMSKEAREGIRPHIQRFLDLGILVPCQSPWNTPLLPVKKPGTNDYRPVQDLREVNKRVQDIHPTVPNPYNLLSSLPPSHTWYSVLDLKDAFFCLKLHPNSQPLFAFEWRDPEKGNTGQLTWTRLPQGFKNSPTLFNEALHRDLASFRALNPQVVMLQYVDDLLVAAPTYRDCKEGTRRLLQELSKLGYRVSAKKAQLCREEVTYLGYLLKGGKRWLTPARKATVMKIPTPTTPRQVREFLGKAGFCRLFIPGFASLAAPLYPLTRPKVPFTWTEAHQEAFGRIKEALLSAPALALPDLTKPFALYVDEKEGVARGVLTQTLGPWRRPVAYLSKKLDPVASGWPTCLKAIAAVALLLKDADKLTLGQNVLVIAPHNLESIVRQPPDRWMTNARMTHYQSLLLNERVSFAPPAILNPATLLPVESDDTPIHICSEILAEETGTRPDLRDQPLPGVPAWYTDGSSFIMDGRRQAGAAIVDNKRTVWASNLPEGTSAQKAELIALTQALRLAEGKSINIYTDSRYAFATAHVHGAIYKQRGWLTSAGKDIKNKEEILALLEAIHLPKRVAIIHCPGHQRGTDPVATGNRKADEAAKQAAQSTRILTETTKNAGKRTADGSEFEKRTADGSEFESPKKKAKVE

SEQ ID NO: 1832 - protein, 2216 aa, synthetic construct
MPAAKRVKLDGGDKKYSIGLDIGTNSVGWAVITDEYKVPSKKFKVLGNTDRHSIKKNLIGALLFDSGETAEATRLKRTARRRYTRRKNRICYLQEIFSNEMAKVDDSFFHRLEESFLVEEDKKHERHPIFGNIVDEVAYHEKYPTIYHLRKKLVDSTDKADLRLIYLALAHMIKFRGHFLIEGDLNPDNSDVDKLFIQLVQTYNQLFEENPINASGVDAKAILSARLSKSRRLENLIAQLPGEKKNGLFGNLIALSLGLTPNFKSNFDLAEDAKLQLSKDTYDDDLDNLLAQIGDQYADLFLAAKNLSDAILLSDILRVNTEITKAPLSASMIKRYDEHHQDLTLLKALVRQQLPEKYKEIFFDQSKNGYAGYIDGGASQEEFYKFIKPILEKMDGTEELLVKLNREDLLRKQRTFDNGSIPHQIHLGELHAILRRQEDFYPFLKDNREKIEKILTFRIPYYVGPLARGNSRFAWMTRKSEETITPWNFEEVVDKGASAQSFIERMTNFDKNLPNEKVLPKHSLLYEYFTVYNELTKVKYVTEGMRKPAFLSGEQKKAIVDLLFKTNRKVTVKQLKEDYFKKIECFDSVEISGVEDRFNASLGTYHDLLKIIKDKDFLDNEENEDILEDIVLTLTLFEDREMIEERLKTYAHLFDDKVMKQLKRRRYTGWGRLSRKLINGIRDKQSGKTILDFLKSDGFANRNFMQLIHDDSLTFKEDIQKAQVSGQGDSLHEHIANLAGSPAIKKGILQTVKVVDELVKVMGRHKPENIVIEMARENQTTQKGQKNSRERMKRIEEGIKELGSQILKEHPVENTQLQNEKLYLYYLQNGRDMYVDQELDINRLSDYDVDHIVPQSFLKDDSIDNKVLTRSDKARGKSDNVPSEEVVKKMKNYWRQLLNAKLITQRKFDNLTKAERGGLSELDKAGFIKRQLVETRQITKHVAQILDSRMNTKYDENDKLIREVKVITLKSKLVSDFRKDFQFYKVREINNYHHAHDAYLNAVVGTALIKKYPKLESEFVYGDYKVYDVRKMIAKSEQEIGKATAKYFFYSNIMNFFKTEITLANGEIRKRPLIETNGETGEIVWDKGRDFATVRKVLSMPQVNIVKKTEVQTGGFSKESILPKRNSDKLIARKKDWDPKKYGGFDSPTVAYSVLVVAKVEKGKSKKLKSVKELLGITIMERSSFEKNPIDFLEAKGYKEVKKDLIIKLPKYSLFELENGRKRMLASAGELQKGNELALPSKYVNFLYLASHYEKLKGSPEDNEQKQLFVEQHKHYLDEIIEQISEFSKRVILADANLDKVLSAYNKHRDKPIREQAENIIHLFTLTNLGAPAAFKYFDTTIDRKRYTSTKEVLDATLIHQSITGLYETRIDLSQLGGDGGGGSGGGPAPGGTLGDQGSRGSDPLPEPRVTLTVEGIPTEFLVNTGAEHSVLTKPMGKMGSKRTVVAGATGSKVYPWTTKRLLKIGQKQVTHSFLVIPECPAPLLGRDLLTKLKAQIQFSTEGPQVTWEDRPAMCLVLNLEEEYRLHEKPVPPSIDPSWLQLFPMVWAEKAGMGLANQVPPVVVELKSDASPVAVRQYPMSKEAREGIRPHIQRFLDLGILVPCQSPWNTPLLPVKKPGTNDYRPVQDLREVNKRVQDIHPTVPNPYNLLSSLPPSHTWYSVLDLKDAFFCLKLHPNSQPLFAFEWRDPEKGNTGQLTWTRLPQGFKNSPTLFNEALHRDLASFRALNPQVVMLQYVDDLLVAAPTYRDCKEGTRRLLQELSKLGYRVSAKKAQLCREEVTYLGYLLKGGKRWLTPARKATVMKIPTPTTPRQVREFLGKAGFCRLFIPGFASLAAPLYPLTRPKVPFTWTEAHQEAFGRIKEALLSAPALALPDLTKPFALYVDEKEGVARGVLTQTLGPWRRPVAYLSKKLDPVASGWPTCLKAIAAVALLLKDADKLTLGQNVLVIAPHNLESIVRQPPDRWMTNARMTHYQSLLLNERVSFAPPAILNPATLLPVESDDTPIHICSEILAEETGTRPDLRDQPLPGVPAWYTDGSSFIMDGRRQAGAAIVDNKRTVWASNLPEGTSAQKAELIALTQALRLAEGKSINIYTDSRYAFATAHVHGAIYKQRGWLTSAGKDIKNKEEILALLEAIHLPKRVAIIHCPGHQRGTDPVATGNRKADEAAKQAAQSTRILTETTKNAGKRTADGSEFEKRTADGSEFESPKKKAKVE

SEQ ID NO: 1833 - protein, 2218 aa, synthetic construct
MPAAKRVKLDGGDKKYSIGLDIGTNSVGWAVITDEYKVPSKKFKVLGNTDRHSIKKNLIGALLFDSGETAEATRLKRTARRRYTRRKNRICYLQEIFSNEMAKVDDSFFHRLEESFLVEEDKKHERHPIFGNIVDEVAYHEKYPTIYHLRKKLVDSTDKADLRLIYLALAHMIKFRGHFLIEGDLNPDNSDVDKLFIQLVQTYNQLFEENPINASGVDAKAILSARLSKSRRLENLIAQLPGEKKNGLFGNLIALSLGLTPNFKSNFDLAEDAKLQLSKDTYDDDLDNLLAQIGDQYADLFLAAKNLSDAILLSDILRVNTEITKAPLSASMIKRYDEHHQDLTLLKALVRQQLPEKYKEIFFDQSKNGYAGYIDGGASQEEFYKFIKPILEKMDGTEELLVKLNREDLLRKQRTFDNGSIPHQIHLGELHAILRRQEDFYPFLKDNREKIEKILTFRIPYYVGPLARGNSRFAWMTRKSEETITPWNFEEVVDKGASAQSFIERMTNFDKNLPNEKVLPKHSLLYEYFTVYNELTKVKYVTEGMRKPAFLSGEQKKAIVDLLFKTNRKVTVKQLKEDYFKKIECFDSVEISGVEDRFNASLGTYHDLLKIIKDKDFLDNEENEDILEDIVLTLTLFEDREMIEERLKTYAHLFDDKVMKQLKRRRYTGWGRLSRKLINGIRDKQSGKTILDFLKSDGFANRNFMQLIHDDSLTFKEDIQKAQVSGQGDSLHEHIANLAGSPAIKKGILQTVKVVDELVKVMGRHKPENIVIEMARENQTTQKGQKNSRERMKRIEEGIKELGSQILKEHPVENTQLQNEKLYLYYLQNGRDMYVDQELDINRLSDYDVDHIVPQSFLKDDSIDNKVLTRSDKARGKSDNVPSEEVVKKMKNYWRQLLNAKLITQRKFDNLTKAERGGLSELDKAGFIKRQLVETRQITKHVAQILDSRMNTKYDENDKLIREVKVITLKSKLVSDFRKDFQFYKVREINNYHHAHDAYLNAVVGTALIKKYPKLESEFVYGDYKVYDVRKMIAKSEQEIGKATAKYFFYSNIMNFFKTEITLANGEIRKRPLIETNGETGEIVWDKGRDFATVRKVLSMPQVNIVKKTEVQTGGFSKESILPKRNSDKLIARKKDWDPKKYGGFDSPTVAYSVLVVAKVEKGKSKKLKSVKELLGITIMERSSFEKNPIDFLEAKGYKEVKKDLIIKLPKYSLFELENGRKRMLASAGELQKGNELALPSKYVNFLYLASHYEKLKGSPEDNEQKQLFVEQHKHYLDEIIEQISEFSKRVILADANLDKVLSAYNKHRDKPIREQAENIIHLFTLTNLGAPAAFKYFDTTIDRKRYTSTKEVLDATLIHQSITGLYETRIDLSQLGGDGGEAAAKGGSPAPGGTLGDQGSRGSDPLPEPRVTLTVEGIPTEFLVNTGAEHSVLTKPMGKMGSKRTVVAGATGSKVYPWTTKRLLKIGQKQVTHSFLVIPECPAPLLGRDLLTKLKAQIQFSTEGPQVTWEDRPAMCLVLNLEEEYRLHEKPVPPSIDPSWLQLFPMVWAEKAGMGLANQVPPVVVELKSDASPVAVRQYPMSKEAREGIRPHIQRFLDLGILVPCQSPWNTPLLPVKKPGTNDYRPVQDLREVNKRVQDIHPTVPNPYNLLSSLPPSHTWYSVLDLKDAFFCLKLHPNSQPLFAFEWRDPEKGNTGQLTWTRLPQGFKNSPTLFNEALHRDLASFRALNPQVVMLQYVDDLLVAAPTYRDCKEGTRRLLQELSKLGYRVSAKKAQLCREEVTYLGYLLKGGKRWLTPARKATVMKIPTPTTPRQVREFLGKAGFCRLFIPGFASLAAPLYPLTRPKVPFTWTEAHQEAFGRIKEALLSAPALALPDLTKPFALYVDEKEGVARGVLTQTLGPWRRPVAYLSKKLDPVASGWPTCLKAIAAVALLLKDADKLTLGQNVLVIAPHNLESIVRQPPDRWMTNARMTHYQSLLLNERVSFAPPAILNPATLLPVESDDTPIHICSEILAEETGTRPDLRDQPLPGVPAWYTDGSSFIMDGRRQAGAAIVDNKRTVWASNLPEGTSAQKAELIALTQALRLAEGKSINIYTDSRYAFATAHVHGAIYKQRGWLTSAGKDIKNKEEILALLEAIHLPKRVAIIHCPGHQRGTDPVATGNRKADEAAKQAAQSTRILTETTKNAGKRTADGSEFEKRTADGSEFESPKKKAKVE

SEQ ID NO: 1834 - protein, 2216 aa, synthetic construct
MPAAKRVKLDGGDKKYSIGLDIGTNSVGWAVITDEYKVPSKKFKVLGNTDRHSIKKNLIGALLFDSGETAEATRLKRTARRRYTRRKNRICYLQEIFSNEMAKVDDSFFHRLEESFLVEEDKKHERHPIFGNIVDEVAYHEKYPTIYHLRKKLVDSTDKADLRLIYLALAHMIKFRGHFLIEGDLNPDNSDVDKLFIQLVQTYNQLFEENPINASGVDAKAILSARLSKSRRLENLIAQLPGEKKNGLFGNLIALSLGLTPNFKSNFDLAEDAKLQLSKDTYDDDLDNLLAQIGDQYADLFLAAKNLSDAILLSDILRVNTEITKAPLSASMIKRYDEHHQDLTLLKALVRQQLPEKYKEIFFDQSKNGYAGYIDGGASQEEFYKFIKPILEKMDGTEELLVKLNREDLLRKQRTFDNGSIPHQIHLGELHAILRRQEDFYPFLKDNREKIEKILTFRIPYYVGPLARGNSRFAWMTRKSEETITPWNFEEVVDKGASAQSFIERMTNFDKNLPNEKVLPKHSLLYEYFTVYNELTKVKYVTEGMRKPAFLSGEQKKAIVDLLFKTNRKVTVKQLKEDYFKKIECFDSVEISGVEDRFNASLGTYHDLLKIIKDKDFLDNEENEDILEDIVLTLTLFEDREMIEERLKTYAHLFDDKVMKQLKRRRYTGWGRLSRKLINGIRDKQSGKTILDFLKSDGFANRNFMQLIHDDSLTFKEDIQKAQVSGQGDSLHEHIANLAGSPAIKKGILQTVKVVDELVKVMGRHKPENIVIEMARENQTTQKGQKNSRERMKRIEEGIKELGSQILKEHPVENTQLQNEKLYLYYLQNGRDMYVDQELDINRLSDYDVDHIVPQSFLKDDSIDNKVLTRSDKARGKSDNVPSEEVVKKMKNYWRQLLNAKLITQRKFDNLTKAERGGLSELDKAGFIKRQLVETRQITKHVAQILDSRMNTKYDENDKLIREVKVITLKSKLVSDFRKDFQFYKVREINNYHHAHDAYLNAVVGTALIKKYPKLESEFVYGDYKVYDVRKMIAKSEQEIGKATAKYFFYSNIMNFFKTEITLANGEIRKRPLIETNGETGEIVWDKGRDFATVRKVLSMPQVNIVKKTEVQTGGFSKESILPKRNSDKLIARKKDWDPKKYGGFDSPTVAYSVLVVAKVEKGKSKKLKSVKELLGITIMERSSFEKNPIDFLEAKGYKEVKKDLIIKLPKYSLFELENGRKRMLASAGELQKGNELALPSKYVNFLYLASHYEKLKGSPEDNEQKQLFVEQHKHYLDEIIEQISEFSKRVILADANLDKVLSAYNKHRDKPIREQAENIIHLFTLTNLGAPAAFKYFDTTIDRKRYTSTKEVLDATLIHQSITGLYETRIDLSQLGGDGGGGGGGSPAPGGTLGDQGSRGSDPLPEPRVTLTVEGIPTEFLVNTGAEHSVLTKPMGKMGSKRTVVAGATGSKVYPWTTKRLLKIGQKQVTHSFLVIPECPAPLLGRDLLTKLKAQIQFSTEGPQVTWEDRPAMCLVLNLEEEYRLHEKPVPPSIDPSWLQLFPMVWAEKAGMGLANQVPPVVVELKSDASPVAVRQYPMSKEAREGIRPHIQRFLDLGILVPCQSPWNTPLLPVKKPGTNDYRPVQDLREVNKRVQDIHPTVPNPYNLLSSLPPSHTWYSVLDLKDAFFCLKLHPNSQPLFAFEWRDPEKGNTGQLTWTRLPQGFKNSPTLFNEALHRDLASFRALNPQVVMLQYVDDLLVAAPTYRDCKEGTRRLLQELSKLGYRVSAKKAQLCREEVTYLGYLLKGGKRWLTPARKATVMKIPTPTTPRQVREFLGKAGFCRLFIPGFASLAAPLYPLTRPKVPFTWTEAHQEAFGRIKEALLSAPALALPDLTKPFALYVDEKEGVARGVLTQTLGPWRRPVAYLSKKLDPVASGWPTCLKAIAAVALLLKDADKLTLGQNVLVIAPHNLESIVRQPPDRWMTNARMTHYQSLLLNERVSFAPPAILNPATLLPVESDDTPIHICSEILAEETGTRPDLRDQPLPGVPAWYTDGSSFIMDGRRQAGAAIVDNKRTVWASNLPEGTSAQKAELIALTQALRLAEGKSINIYTDSRYAFATAHVHGAIYKQRGWLTSAGKDIKNKEEILALLEAIHLPKRVAIIHCPGHQRGTDPVATGNRKADEAAKQAAQSTRILTETTKNAGKRTADGSEFEKRTADGSEFESPKKKAKVE

SEQ ID NO: 1835 - protein, 2216 aa, synthetic construct
MPAAKRVKLDGGDKKYSIGLDIGTNSVGWAVITDEYKVPSKKFKVLGNTDRHSIKKNLIGALLFDSGETAEATRLKRTARRRYTRRKNRICYLQEIFSNEMAKVDDSFFHRLEESFLVEEDKKHERHPIFGNIVDEVAYHEKYPTIYHLRKKLVDSTDKADLRLIYLALAHMIKFRGHFLIEGDLNPDNSDVDKLFIQLVQTYNQLFEENPINASGVDAKAILSARLSKSRRLENLIAQLPGEKKNGLFGNLIALSLGLTPNFKSNFDLAEDAKLQLSKDTYDDDLDNLLAQIGDQYADLFLAAKNLSDAILLSDILRVNTEITKAPLSASMIKRYDEHHQDLTLLKALVRQQLPEKYKEIFFDQSKNGYAGYIDGGASQEEFYKFIKPILEKMDGTEELLVKLNREDLLRKQRTFDNGSIPHQIHLGELHAILRRQEDFYPFLKDNREKIEKILTFRIPYYVGPLARGNSRFAWMTRKSEETITPWNFEEVVDKGASAQSFIERMTNFDKNLPNEKVLPKHSLLYEYFTVYNELTKVKYVTEGMRKPAFLSGEQKKAIVDLLFKTNRKVTVKQLKEDYFKKIECFDSVEISGVEDRFNASLGTYHDLLKIIKDKDFLDNEENEDILEDIVLTLTLFEDREMIEERLKTYAHLFDDKVMKQLKRRRYTGWGRLSRKLINGIRDKQSGKTILDFLKSDGFANRNFMQLIHDDSLTFKEDIQKAQVSGQGDSLHEHIANLAGSPAIKKGILQTVKVVDELVKVMGRHKPENIVIEMARENQTTQKGQKNSRERMKRIEEGIKELGSQILKEHPVENTQLQNEKLYLYYLQNGRDMYVDQELDINRLSDYDVDHIVPQSFLKDDSIDNKVLTRSDKARGKSDNVPSEEVVKKMKNYWRQLLNAKLITQRKFDNLTKAERGGLSELDKAGFIKRQLVETRQITKHVAQILDSRMNTKYDENDKLIREVKVITLKSKLVSDFRKDFQFYKVREINNYHHAHDAYLNAVVGTALIKKYPKLESEFVYGDYKVYDVRKMIAKSEQEIGKATAKYFFYSNIMNFFKTEITLANGEIRKRPLIETNGETGEIVWDKGRDFATVRKVLSMPQVNIVKKTEVQTGGFSKESILPKRNSDKLIARKKDWDPKKYGGFDSPTVAYSVLVVAKVEKGKSKKLKSVKELLGITIMERSSFEKNPIDFLEAKGYKEVKKDLIIKLPKYSLFELENGRKRMLASAGELQKGNELALPSKYVNFLYLASHYEKLKGSPEDNEQKQLFVEQHKHYLDEIIEQISEFSKRVILADANLDKVLSAYNKHRDKPIREQAENIIHLFTLTNLGAPAAFKYFDTTIDRKRYTSTKEVLDATLIHQSITGLYETRIDLSQLGGDGGPAPGGGGGSGGTLGDQGSRGSDPLPEPRVTLTVEGIPTEFLVNTGAEHSVLTKPMGKMGSKRTVVAGATGSKVYPWTTKRLLKIGQKQVTHSFLVIPECPAPLLGRDLLTKLKAQIQFSTEGPQVTWEDRPAMCLVLNLEEEYRLHEKPVPPSIDPSWLQLFPMVWAEKAGMGLANQVPPVVVELKSDASPVAVRQYPMSKEAREGIRPHIQRFLDLGILVPCQSPWNTPLLPVKKPGTNDYRPVQDLREVNKRVQDIHPTVPNPYNLLSSLPPSHTWYSVLDLKDAFFCLKLHPNSQPLFAFEWRDPEKGNTGQLTWTRLPQGFKNSPTLFNEALHRDLASFRALNPQVVMLQYVDDLLVAAPTYRDCKEGTRRLLQELSKLGYRVSAKKAQLCREEVTYLGYLLKGGKRWLTPARKATVMKIPTPTTPRQVREFLGKAGFCRLFIPGFASLAAPLYPLTRPKVPFTWTEAHQEAFGRIKEALLSAPALALPDLTKPFALYVDEKEGVARGVLTQTLGPWRRPVAYLSKKLDPVASGWPTCLKAIAAVALLLKDADKLTLGQNVLVIAPHNLESIVRQPPDRWMTNARMTHYQSLLLNERVSFAPPAILNPATLLPVESDDTPIHICSEILAEETGTRPDLRDQPLPGVPAWYTDGSSFIMDGRRQAGAAIVDNKRTVWASNLPEGTSAQKAELIALTQALRLAEGKSINIYTDSRYAFATAHVHGAIYKQRGWLTSAGKDIKNKEEILALLEAIHLPKRVAIIHCPGHQRGTDPVATGNRKADEAAKQAAQSTRILTETTKNAGKRTADGSEFEKRTADGSEFESPKKKAKVE

SEQ ID NO: 1836 - protein, 2118 aa, synthetic construct
MPAAKRVKLDGGDKKYSIGLDIGTNSVGWAVITDEYKVPSKKFKVLGNTDRHSIKKNLIGALLFDSGETAEATRLKRTARRRYTRRKNRICYLQEIFSNEMAKVDDSFFHRLEESFLVEEDKKHERHPIFGNIVDEVAYHEKYPTIYHLRKKLVDSTDKADLRLIYLALAHMIKFRGHFLIEGDLNPDNSDVDKLFIQLVQTYNQLFEENPINASGVDAKAILSARLSKSRRLENLIAQLPGEKKNGLFGNLIALSLGLTPNFKSNFDLAEDAKLQLSKDTYDDDLDNLLAQIGDQYADLFLAAKNLSDAILLSDILRVNTEITKAPLSASMIKRYDEHHQDLTLLKALVRQQLPEKYKEIFFDQSKNGYAGYIDGGASQEEFYKFIKPILEKMDGTEELLVKLNREDLLRKQRTFDNGSIPHQIHLGELHAILRRQEDFYPFLKDNREKIEKILTFRIPYYVGPLARGNSRFAWMTRKSEETITPWNFEEVVDKGASAQSFIERMTNFDKNLPNEKVLPKHSLLYEYFTVYNELTKVKYVTEGMRKPAFLSGEQKKAIVDLLFKTNRKVTVKQLKEDYFKKIECFDSVEISGVEDRFNASLGTYHDLLKIIKDKDFLDNEENEDILEDIVLTLTLFEDREMIEERLKTYAHLFDDKVMKQLKRRRYTGWGRLSRKLINGIRDKQSGKTILDFLKSDGFANRNFMQLIHDDSLTFKEDIQKAQVSGQGDSLHEHIANLAGSPAIKKGILQTVKVVDELVKVMGRHKPENIVIEMARENQTTQKGQKNSRERMKRIEEGIKELGSQILKEHPVENTQLQNEKLYLYYLQNGRDMYVDQELDINRLSDYDVDHIVPQSFLKDDSIDNKVLTRSDKARGKSDNVPSEEVVKKMKNYWRQLLNAKLITQRKFDNLTKAERGGLSELDKAGFIKRQLVETRQITKHVAQILDSRMNTKYDENDKLIREVKVITLKSKLVSDFRKDFQFYKVREINNYHHAHDAYLNAVVGTALIKKYPKLESEFVYGDYKVYDVRKMIAKSEQEIGKATAKYFFYSNIMNFFKTEITLANGEIRKRPLIETNGETGEIVWDKGRDFATVRKVLSMPQVNIVKKTEVQTGGFSKESILPKRNSDKLIARKKDWDPKKYGGFDSPTVAYSVLVVAKVEKGKSKKLKSVKELLGITIMERSSFEKNPIDFLEAKGYKEVKKDLIIKLPKYSLFELENGRKRMLASAGELQKGNELALPSKYVNFLYLASHYEKLKGSPEDNEQKQLFVEQHKHYLDEIIEQISEFSKRVILADANLDKVLSAYNKHRDKPIREQAENIIHLFTLTNLGAPAAFKYFDTTIDRKRYTSTKEVLDATLIHQSITGLYETRIDLSQLGGDGGSGGSSGGSSGSETPGTSESATPESSGGSSGGSSGGTLNLEDEYRLYETSAEPEVSPGSTWLSDFPQAWAETGGMGLAVRQAPLIIPLKATSTPVSIKQYPMSQEAKLGIKPHIQRLLDQGILVPCQSPWNTPLLPVKKPGTNDYRPVQDLREVNKRVEDIHPTVPNPYNLLSGLPPSHRWYTVLDLKDAFFCLRLHPTSQPLFAFEWRDPGMGISGQLTWTRLPQGFKNSPTLFDEALHRDLADFRIQHPDLILLQYVDDILLAATSELDCQQGTRALLLTLGNLGYRASAKKAQLCQKQVKYLGYLLKEGQRWLTEARKETVMGQPTPKTPRQLREFLGTAGFCRLWIPGFAEMAAPLYPLTKTGTLFNWGPDQQKAYQEIKQALLTAPALGLPDLTKPFELFVDEKQGYAKGVLTQKLGPWRRPVAYLSKKLDPVAAGWPPCLRMVAAIAVLRKDAGKLTMGQPLVILAPHAVEALVKQPPDRWLSNARMTHYQAMLLDTDRVQFGPVVALNPATLLPLPEEGAPHDCLEILAETHGTRPDLTDQPIPDADHTWYTDGSSFLQEGQRKAGAAVTTETEVIWARALPAGTSAQRAELIALTQALKMAEGKRLNVYTDSRYAFATAHIHGEIYRRRGLLTSEGREIKNKSEILALLKALFLPKRLSIIHCLGHQKGDSAEARGNRLADQAAREAAIKTPPDTSTLLAGKRTADGSEFEKRTADGSEFESPKKKAKVE

SEQ ID NO: 1837 - protein, 2105 aa, synthetic construct
MPAAKRVKLDGGDKKYSIGLDIGTNSVGWAVITDEYKVPSKKFKVLGNTDRHSIKKNLIGALLFDSGETAEATRLKRTARRRYTRRKNRICYLQEIFSNEMAKVDDSFFHRLEESFLVEEDKKHERHPIFGNIVDEVAYHEKYPTIYHLRKKLVDSTDKADLRLIYLALAHMIKFRGHFLIEGDLNPDNSDVDKLFIQLVQTYNQLFEENPINASGVDAKAILSARLSKSRRLENLIAQLPGEKKNGLFGNLIALSLGLTPNFKSNFDLAEDAKLQLSKDTYDDDLDNLLAQIGDQYADLFLAAKNLSDAILLSDILRVNTEITKAPLSASMIKRYDEHHQDLTLLKALVRQQLPEKYKEIFFDQSKNGYAGYIDGGASQEEFYKFIKPILEKMDGTEELLVKLNREDLLRKQRTFDNGSIPHQIHLGELHAILRRQEDFYPFLKDNREKIEKILTFRIPYYVGPLARGNSRFAWMTRKSEETITPWNFEEVVDKGASAQSFIERMTNFDKNLPNEKVLPKHSLLYEYFTVYNELTKVKYVTEGMRKPAFLSGEQKKAIVDLLFKTNRKVTVKQLKEDYFKKIECFDSVEISGVEDRFNASLGTYHDLLKIIKDKDFLDNEENEDILEDIVLTLTLFEDREMIEERLKTYAHLFDDKVMKQLKRRRYTGWGRLSRKLINGIRDKQSGKTILDFLKSDGFANRNFMQLIHDDSLTFKEDIQKAQVSGQGDSLHEHIANLAGSPAIKKGILQTVKVVDELVKVMGRHKPENIVIEMARENQTTQKGQKNSRERMKRIEEGIKELGSQILKEHPVENTQLQNEKLYLYYLQNGRDMYVDQELDINRLSDYDVDHIVPQSFLKDDSIDNKVLTRSDKARGKSDNVPSEEVVKKMKNYWRQLLNAKLITQRKFDNLTKAERGGLSELDKAGFIKRQLVETRQITKHVAQILDSRMNTKYDENDKLIREVKVITLKSKLVSDFRKDFQFYKVREINNYHHAHDAYLNAVVGTALIKKYPKLESEFVYGDYKVYDVRKMIAKSEQEIGKATAKYFFYSNIMNFFKTEITLANGEIRKRPLIETNGETGEIVWDKGRDFATVRKVLSMPQVNIVKKTEVQTGGFSKESILPKRNSDKLIARKKDWDPKKYGGFDSPTVAYSVLVVAKVEKGKSKKLKSVKELLGITIMERSSFEKNPIDFLEAKGYKEVKKDLIIKLPKYSLFELENGRKRMLASAGELQKGNELALPSKYVNFLYLASHYEKLKGSPEDNEQKQLFVEQHKHYLDEIIEQISEFSKRVILADANLDKVLSAYNKHRDKPIREQAENIIHLFTLTNLGAPAAFKYFDTTIDRKRYTSTKEVLDATLIHQSITGLYETRIDLSQLGGDGGEAAAKEAAAKEAAAKEAAAKGGTLNLEDEYRLYETSAEPEVSPGSTWLSDFPQAWAETGGMGLAVRQAPLIIPLKATSTPVSIKQYPMSQEAKLGIKPHIQRLLDQGILVPCQSPWNTPLLPVKKPGTNDYRPVQDLREVNKRVEDIHPTVPNPYNLLSGLPPSHRWYTVLDLKDAFFCLRLHPTSQPLFAFEWRDPGMGISGQLTWTRLPQGFKNSPTLFDEALHRDLADFRIQHPDLILLQYVDDILLAATSELDCQQGTRALLLTLGNLGYRASAKKAQLCQKQVKYLGYLLKEGQRWLTEARKETVMGQPTPKTPRQLREFLGTAGFCRLWIPGFAEMAAPLYPLTKTGTLFNWGPDQQKAYQEIKQALLTAPALGLPDLTKPFELFVDEKQGYAKGVLTQKLGPWRRPVAYLSKKLDPVAAGWPPCLRMVAAIAVLRKDAGKLTMGQPLVILAPHAVEALVKQPPDRWLSNARMTHYQAMLLDTDRVQFGPVVALNPATLLPLPEEGAPHDCLEILAETHGTRPDLTDQPIPDADHTWYTDGSSFLQEGQRKAGAAVTTETEVIWARALPAGTSAQRAELIALTQALKMAEGKRLNVYTDSRYAFATAHIHGEIYRRRGLLTSEGREIKNKSEILALLKALFLPKRLSIIHCLGHQKGDSAEARGNRLADQAAREAAIKTPPDTSTLLAGKRTADGSEFEKRTADGSEFESPKKKAKVE

SEQ ID NO: 1838 - protein, 2094 aa, synthetic construct
MPAAKRVKLDGGDKKYSIGLDIGTNSVGWAVITDEYKVPSKKFKVLGNTDRHSIKKNLIGALLFDSGETAEATRLKRTARRRYTRRKNRICYLQEIFSNEMAKVDDSFFHRLEESFLVEEDKKHERHPIFGNIVDEVAYHEKYPTIYHLRKKLVDSTDKADLRLIYLALAHMIKFRGHFLIEGDLNPDNSDVDKLFIQLVQTYNQLFEENPINASGVDAKAILSARLSKSRRLENLIAQLPGEKKNGLFGNLIALSLGLTPNFKSNFDLAEDAKLQLSKDTYDDDLDNLLAQIGDQYADLFLAAKNLSDAILLSDILRVNTEITKAPLSASMIKRYDEHHQDLTLLKALVRQQLPEKYKEIFFDQSKNGYAGYIDGGASQEEFYKFIKPILEKMDGTEELLVKLNREDLLRKQRTFDNGSIPHQIHLGELHAILRRQEDFYPFLKDNREKIEKILTFRIPYYVGPLARGNSRFAWMTRKSEETITPWNFEEVVDKGASAQSFIERMTNFDKNLPNEKVLPKHSLLYEYFTVYNELTKVKYVTEGMRKPAFLSGEQKKAIVDLLFKTNRKVTVKQLKEDYFKKIECFDSVEISGVEDRFNASLGTYHDLLKIIKDKDFLDNEENEDILEDIVLTLTLFEDREMIEERLKTYAHLFDDKVMKQLKRRRYTGWGRLSRKLINGIRDKQSGKTILDFLKSDGFANRNFMQLIHDDSLTFKEDIQKAQVSGQGDSLHEHIANLAGSPAIKKGILQTVKVVDELVKVMGRHKPENIVIEMARENQTTQKGQKNSRERMKRIEEGIKELGSQILKEHPVENTQLQNEKLYLYYLQNGRDMYVDQELDINRLSDYDVDHIVPQSFLKDDSIDNKVLTRSDKARGKSDNVPSEEVVKKMKNYWRQLLNAKLITQRKFDNLTKAERGGLSELDKAGFIKRQLVETRQITKHVAQILDSRMNTKYDENDKLIREVKVITLKSKLVSDFRKDFQFYKVREINNYHHAHDAYLNAVVGTALIKKYPKLESEFVYGDYKVYDVRKMIAKSEQEIGKATAKYFFYSNIMNFFKTEITLANGEIRKRPLIETNGETGEIVWDKGRDFATVRKVLSMPQVNIVKKTEVQTGGFSKESILPKRNSDKLIARKKDWDPKKYGGFDSPTVAYSVLVVAKVEKGKSKKLKSVKELLGITIMERSSFEKNPIDFLEAKGYKEVKKDLIIKLPKYSLFELENGRKRMLASAGELQKGNELALPSKYVNFLYLASHYEKLKGSPEDNEQKQLFVEQHKHYLDEIIEQISEFSKRVILADANLDKVLSAYNKHRDKPIREQAENIIHLFTLTNLGAPAAFKYFDTTIDRKRYTSTKEVLDATLIHQSITGLYETRIDLSQLGGDGGGSSGGGPAPGGTLNLEDEYRLYETSAEPEVSPGSTWLSDFPQAWAETGGMGLAVRQAPLIIPLKATSTPVSIKQYPMSQEAKLGIKPHIQRLLDQGILVPCQSPWNTPLLPVKKPGTNDYRPVQDLREVNKRVEDIHPTVPNPYNLLSGLPPSHRWYTVLDLKDAFFCLRLHPTSQPLFAFEWRDPGMGISGQLTWTRLPQGFKNSPTLFDEALHRDLADFRIQHPDLILLQYVDDILLAATSELDCQQGTRALLLTLGNLGYRASAKKAQLCQKQVKYLGYLLKEGQRWLTEARKETVMGQPTPKTPRQLREFLGTAGFCRLWIPGFAEMAAPLYPLTKTGTLFNWGPDQQKAYQEIKQALLTAPALGLPDLTKPFELFVDEKQGYAKGVLTQKLGPWRRPVAYLSKKLDPVAAGWPPCLRMVAAIAVLRKDAGKLTMGQPLVILAPHAVEALVKQPPDRWLSNARMTHYQAMLLDTDRVQFGPVVALNPATLLPLPEEGAPHDCLEILAETHGTRPDLTDQPIPDADHTWYTDGSSFLQEGQRKAGAAVTTETEVIWARALPAGTSAQRAELIALTQALKMAEGKRLNVYTDSRYAFATAHIHGEIYRRRGLLTSEGREIKNKSEILALLKALFLPKRLSIIHCLGHQKGDSAEARGNRLADQAAREAAIKTPPDTSTLLAGKRTADGSEFEKRTADGSEFESPKKKAKVE

SEQ ID NO: 1839 - protein, 2096 aa, synthetic construct
MPAAKRVKLDGGDKKYSIGLDIGTNSVGWAVITDEYKVPSKKFKVLGNTDRHSIKKNLIGALLFDSGETAEATRLKRTARRRYTRRKNRICYLQEIFSNEMAKVDDSFFHRLEESFLVEEDKKHERHPIFGNIVDEVAYHEKYPTIYHLRKKLVDSTDKADLRLIYLALAHMIKFRGHFLIEGDLNPDNSDVDKLFIQLVQTYNQLFEENPINASGVDAKAILSARLSKSRRLENLIAQLPGEKKNGLFGNLIALSLGLTPNFKSNFDLAEDAKLQLSKDTYDDDLDNLLAQIGDQYADLFLAAKNLSDAILLSDILRVNTEITKAPLSASMIKRYDEHHQDLTLLKALVRQQLPEKYKEIFFDQSKNGYAGYIDGGASQEEFYKFIKPILEKMDGTEELLVKLNREDLLRKQRTFDNGSIPHQIHLGELHAILRRQEDFYPFLKDNREKIEKILTFRIPYYVGPLARGNSRFAWMTRKSEETITPWNFEEVVDKGASAQSFIERMTNFDKNLPNEKVLPKHSLLYEYFTVYNELTKVKYVTEGMRKPAFLSGEQKKAIVDLLFKTNRKVTVKQLKEDYFKKIECFDSVEISGVEDRFNASLGTYHDLLKIIKDKDFLDNEENEDILEDIVLTLTLFEDREMIEERLKTYAHLFDDKVMKQLKRRRYTGWGRLSRKLINGIRDKQSGKTILDFLKSDGFANRNFMQLIHDDSLTFKEDIQKAQVSGQGDSLHEHIANLAGSPAIKKGILQTVKVVDELVKVMGRHKPENIVIEMARENQTTQKGQKNSRERMKRIEEGIKELGSQILKEHPVENTQLQNEKLYLYYLQNGRDMYVDQELDINRLSDYDVDHIVPQSFLKDDSIDNKVLTRSDKARGKSDNVPSEEVVKKMKNYWRQLLNAKLITQRKFDNLTKAERGGLSELDKAGFIKRQLVETRQITKHVAQILDSRMNTKYDENDKLIREVKVITLKSKLVSDFRKDFQFYKVREINNYHHAHDAYLNAVVGTALIKKYPKLESEFVYGDYKVYDVRKMIAKSEQEIGKATAKYFFYSNIMNFFKTEITLANGEIRKRPLIETNGETGEIVWDKGRDFATVRKVLSMPQVNIVKKTEVQTGGFSKESILPKRNSDKLIARKKDWDPKKYGGFDSPTVAYSVLVVAKVEKGKSKKLKSVKELLGITIMERSSFEKNPIDFLEAKGYKEVKKDLIIKLPKYSLFELENGRKRMLASAGELQKGNELALPSKYVNFLYLASHYEKLKGSPEDNEQKQLFVEQHKHYLDEIIEQISEFSKRVILADANLDKVLSAYNKHRDKPIREQAENIIHLFTLTNLGAPAAFKYFDTTIDRKRYTSTKEVLDATLIHQSITGLYETRIDLSQLGGDGGEAAAKGGGPAPGGTLNLEDEYRLYETSAEPEVSPGSTWLSDFPQAWAETGGMGLAVRQAPLIIPLKATSTPVSIKQYPMSQEAKLGIKPHIQRLLDQGILVPCQSPWNTPLLPVKKPGTNDYRPVQDLREVNKRVEDIHPTVPNPYNLLSGLPPSHRWYTVLDLKDAFFCLRLHPTSQPLFAFEWRDPGMGISGQLTWTRLPQGFKNSPTLFDEALHRDLADFRIQHPDLILLQYVDDILLAATSELDCQQGTRALLLTLGNLGYRASAKKAQLCQKQVKYLGYLLKEGQRWLTEARKETVMGQPTPKTPRQLREFLGTAGFCRLWIPGFAEMAAPLYPLTKTGTLFNWGPDQQKAYQEIKQALLTAPALGLPDLTKPFELFVDEKQGYAKGVLTQKLGPWRRPVAYLSKKLDPVAAGWPPCLRMVAAIAVLRKDAGKLTMGQPLVILAPHAVEALVKQPPDRWLSNARMTHYQAMLLDTDRVQFGPVVALNPATLLPLPEEGAPHDCLEILAETHGTRPDLTDQPIPDADHTWYTDGSSFLQEGQRKAGAAVTTETEVIWARALPAGTSAQRAELIALTQALKMAEGKRLNVYTDSRYAFATAHIHGEIYRRRGLLTSEGREIKNKSEILALLKALFLPKRLSIIHCLGHQKGDSAEARGNRLADQAAREAAIKTPPDTSTLLAGKRTADGSEFEKRTADGSEFESPKKKAKVE

SEQ ID NO: 1840 - protein, 2096 aa, synthetic construct
MPAAKRVKLDGGDKKYSIGLDIGTNSVGWAVITDEYKVPSKKFKVLGNTDRHSIKKNLIGALLFDSGETAEATRLKRTARRRYTRRKNRICYLQEIFSNEMAKVDDSFFHRLEESFLVEEDKKHERHPIFGNIVDEVAYHEKYPTIYHLRKKLVDSTDKADLRLIYLALAHMIKFRGHFLIEGDLNPDNSDVDKLFIQLVQTYNQLFEENPINASGVDAKAILSARLSKSRRLENLIAQLPGEKKNGLFGNLIALSLGLTPNFKSNFDLAEDAKLQLSKDTYDDDLDNLLAQIGDQYADLFLAAKNLSDAILLSDILRVNTEITKAPLSASMIKRYDEHHQDLTLLKALVRQQLPEKYKEIFFDQSKNGYAGYIDGGASQEEFYKFIKPILEKMDGTEELLVKLNREDLLRKQRTFDNGSIPHQIHLGELHAILRRQEDFYPFLKDNREKIEKILTFRIPYYVGPLARGNSRFAWMTRKSEETITPWNFEEVVDKGASAQSFIERMTNFDKNLPNEKVLPKHSLLYEYFTVYNELTKVKYVTEGMRKPAFLSGEQKKAIVDLLFKTNRKVTVKQLKEDYFKKIECFDSVEISGVEDRFNASLGTYHDLLKIIKDKDFLDNEENEDILEDIVLTLTLFEDREMIEERLKTYAHLFDDKVMKQLKRRRYTGWGRLSRKLINGIRDKQSGKTILDFLKSDGFANRNFMQLIHDDSLTFKEDIQKAQVSGQGDSLHEHIANLAGSPAIKKGILQTVKVVDELVKVMGRHKPENIVIEMARENQTTQKGQKNSRERMKRIEEGIKELGSQILKEHPVENTQLQNEKLYLYYLQNGRDMYVDQELDINRLSDYDVDHIVPQSFLKDDSIDNKVLTRSDKARGKSDNVPSEEVVKKMKNYWRQLLNAKLITQRKFDNLTKAERGGLSELDKAGFIKRQLVETRQITKHVAQILDSRMNTKYDENDKLIREVKVITLKSKLVSDFRKDFQFYKVREINNYHHAHDAYLNAVVGTALIKKYPKLESEFVYGDYKVYDVRKMIAKSEQEIGKATAKYFFYSNIMNFFKTEITLANGEIRKRPLIETNGETGEIVWDKGRDFATVRKVLSMPQVNIVKKTEVQTGGFSKESILPKRNSDKLIARKKDWDPKKYGGFDSPTVAYSVLVVAKVEKGKSKKLKSVKELLGITIMERSSFEKNPIDFLEAKGYKEVKKDLIIKLPKYSLFELENGRKRMLASAGELQKGNELALPSKYVNFLYLASHYEKLKGSPEDNEQKQLFVEQHKHYLDEIIEQISEFSKRVILADANLDKVLSAYNKHRDKPIREQAENIIHLFTLTNLGAPAAFKYFDTTIDRKRYTSTKEVLDATLIHQSITGLYETRIDLSQLGGDGGGGGPAPEAAAKGGTLNLEDEYRLYETSAEPEVSPGSTWLSDFPQAWAETGGMGLAVRQAPLIIPLKATSTPVSIKQYPMSQEAKLGIKPHIQRLLDQGILVPCQSPWNTPLLPVKKPGTNDYRPVQDLREVNKRVEDIHPTVPNPYNLLSGLPPSHRWYTVLDLKDAFFCLRLHPTSQPLFAFEWRDPGMGISGQLTWTRLPQGFKNSPTLFDEALHRDLADFRIQHPDLILLQYVDDILLAATSELDCQQGTRALLLTLGNLGYRASAKKAQLCQKQVKYLGYLLKEGQRWLTEARKETVMGQPTPKTPRQLREFLGTAGFCRLWIPGFAEMAAPLYPLTKTGTLFNWGPDQQKAYQEIKQALLTAPALGLPDLTKPFELFVDEKQGYAKGVLTQKLGPWRRPVAYLSKKLDPVAAGWPPCLRMVAAIAVLRKDAGKLTMGQPLVILAPHAVEALVKQPPDRWLSNARMTHYQAMLLDTDRVQFGPVVALNPATLLPLPEEGAPHDCLEILAETHGTRPDLTDQPIPDADHTWYTDGSSFLQEGQRKAGAAVTTETEVIWARALPAGTSAQRAELIALTQALKMAEGKRLNVYTDSRYAFATAHIHGEIYRRRGLLTSEGREIKNKSEILALLKALFLPKRLSIIHCLGHQKGDSAEARGNRLADQAAREAAIKTPPDTSTLLAGKRTADGSEFEKRTADGSEFESPKKKAKVE

SEQ ID NO: 1841 - protein, 2096 aa, synthetic construct
MPAAKRVKLDGGDKKYSIGLDIGTNSVGWAVITDEYKVPSKKFKVLGNTDRHSIKKNLIGALLFDSGETAEATRLKRTARRRYTRRKNRICYLQEIFSNEMAKVDDSFFHRLEESFLVEEDKKHERHPIFGNIVDEVAYHEKYPTIYHLRKKLVDSTDKADLRLIYLALAHMIKFRGHFLIEGDLNPDNSDVDKLFIQLVQTYNQLFEENPINASGVDAKAILSARLSKSRRLENLIAQLPGEKKNGLFGNLIALSLGLTPNFKSNFDLAEDAKLQLSKDTYDDDLDNLLAQIGDQYADLFLAAKNLSDAILLSDILRVNTEITKAPLSASMIKRYDEHHQDLTLLKALVRQQLPEKYKEIFFDQSKNGYAGYIDGGASQEEFYKFIKPILEKMDGTEELLVKLNREDLLRKQRTFDNGSIPHQIHLGELHAILRRQEDFYPFLKDNREKIEKILTFRIPYYVGPLARGNSRFAWMTRKSEETITPWNFEEVVDKGASAQSFIERMTNFDKNLPNEKVLPKHSLLYEYFTVYNELTKVKYVTEGMRKPAFLSGEQKKAIVDLLFKTNRKVTVKQLKEDYFKKIECFDSVEISGVEDRFNASLGTYHDLLKIIKDKDFLDNEENEDILEDIVLTLTLFEDREMIEERLKTYAHLFDDKVMKQLKRRRYTGWGRLSRKLINGIRDKQSGKTILDFLKSDGFANRNFMQLIHDDSLTFKEDIQKAQVSGQGDSLHEHIANLAGSPAIKKGILQTVKVVDELVKVMGRHKPENIVIEMARENQTTQKGQKNSRERMKRIEEGIKELGSQILKEHPVENTQLQNEKLYLYYLQNGRDMYVDQELDINRLSDYDVDHIVPQSFLKDDSIDNKVLTRSDKARGKSDNVPSEEVVKKMKNYWRQLLNAKLITQRKFDNLTKAERGGLSELDKAGFIKRQLVETRQITKHVAQILDSRMNTKYDENDKLIREVKVITLKSKLVSDFRKDFQFYKVREINNYHHAHDAYLNAVVGTALIKKYPKLESEFVYGDYKVYDVRKMIAKSEQEIGKATAKYFFYSNIMNFFKTEITLANGEIRKRPLIETNGETGEIVWDKGRDFATVRKVLSMPQVNIVKKTEVQTGGFSKESILPKRNSDKLIARKKDWDPKKYGGFDSPTVAYSVLVVAKVEKGKSKKLKSVKELLGITIMERSSFEKNPIDFLEAKGYKEVKKDLIIKLPKYSLFELENGRKRMLASAGELQKGNELALPSKYVNFLYLASHYEKLKGSPEDNEQKQLFVEQHKHYLDEIIEQISEFSKRVILADANLDKVLSAYNKHRDKPIREQAENIIHLFTLTNLGAPAAFKYFDTTIDRKRYTSTKEVLDATLIHQSITGLYETRIDLSQLGGDGGEAAAKGGGGGSGGTLNLEDEYRLYETSAEPEVSPGSTWLSDFPQAWAETGGMGLAVRQAPLIIPLKATSTPVSIKQYPMSQEAKLGIKPHIQRLLDQGILVPCQSPWNTPLLPVKKPGTNDYRPVQDLREVNKRVEDIHPTVPNPYNLLSGLPPSHRWYTVLDLKDAFFCLRLHPTSQPLFAFEWRDPGMGISGQLTWTRLPQGFKNSPTLFDEALHRDLADFRIQHPDLILLQYVDDILLAATSELDCQQGTRALLLTLGNLGYRASAKKAQLCQKQVKYLGYLLKEGQRWLTEARKETVMGQPTPKTPRQLREFLGTAGFCRLWIPGFAEMAAPLYPLTKTGTLFNWGPDQQKAYQEIKQALLTAPALGLPDLTKPFELFVDEKQGYAKGVLTQKLGPWRRPVAYLSKKLDPVAAGWPPCLRMVAAIAVLRKDAGKLTMGQPLVILAPHAVEALVKQPPDRWLSNARMTHYQAMLLDTDRVQFGPVVALNPATLLPLPEEGAPHDCLEILAETHGTRPDLTDQPIPDADHTWYTDGSSFLQEGQRKAGAAVTTETEVIWARALPAGTSAQRAELIALTQALKMAEGKRLNVYTDSRYAFATAHIHGEIYRRRGLLTSEGREIKNKSEILALLKALFLPKRLSIIHCLGHQKGDSAEARGNRLADQAAREAAIKTPPDTSTLLAGKRTADGSEFEKRTADGSEFESPKKKAKVE

SEQ ID NO: 1842 - protein, 2096 aa, synthetic construct
MPAAKRVKLDGGDKKYSIGLDIGTNSVGWAVITDEYKVPSKKFKVLGNTDRHSIKKNLIGALLFDSGETAEATRLKRTARRRYTRRKNRICYLQEIFSNEMAKVDDSFFHRLEESFLVEEDKKHERHPIFGNIVDEVAYHEKYPTIYHLRKKLVDSTDKADLRLIYLALAHMIKFRGHFLIEGDLNPDNSDVDKLFIQLVQTYNQLFEENPINASGVDAKAILSARLSKSRRLENLIAQLPGEKKNGLFGNLIALSLGLTPNFKSNFDLAEDAKLQLSKDTYDDDLDNLLAQIGDQYADLFLAAKNLSDAILLSDILRVNTEITKAPLSASMIKRYDEHHQDLTLLKALVRQQLPEKYKEIFFDQSKNGYAGYIDGGASQEEFYKFIKPILEKMDGTEELLVKLNREDLLRKQRTFDNGSIPHQIHLGELHAILRRQEDFYPFLKDNREKIEKILTFRIPYYVGPLARGNSRFAWMTRKSEETITPWNFEEVVDKGASAQSFIERMTNFDKNLPNEKVLPKHSLLYEYFTVYNELTKVKYVTEGMRKPAFLSGEQKKAIVDLLFKTNRKVTVKQLKEDYFKKIECFDSVEISGVEDRFNASLGTYHDLLKIIKDKDFLDNEENEDILEDIVLTLTLFEDREMIEERLKTYAHLFDDKVMKQLKRRRYTGWGRLSRKLINGIRDKQSGKTILDFLKSDGFANRNFMQLIHDDSLTFKEDIQKAQVSGQGDSLHEHIANLAGSPAIKKGILQTVKVVDELVKVMGRHKPENIVIEMARENQTTQKGQKNSRERMKRIEEGIKELGSQILKEHPVENTQLQNEKLYLYYLQNGRDMYVDQELDINRLSDYDVDHIVPQSFLKDDSIDNKVLTRSDKARGKSDNVPSEEVVKKMKNYWRQLLNAKLITQRKFDNLTKAERGGLSELDKAGFIKRQLVETRQITKHVAQILDSRMNTKYDENDKLIREVKVITLKSKLVSDFRKDFQFYKVREINNYHHAHDAYLNAVVGTALIKKYPKLESEFVYGDYKVYDVRKMIAKSEQEIGKATAKYFFYSNIMNFFKTEITLANGEIRKRPLIETNGETGEIVWDKGRDFATVRKVLSMPQVNIVKKTEVQTGGFSKESILPKRNSDKLIARKKDWDPKKYGGFDSPTVAYSVLVVAKVEKGKSKKLKSVKELLGITIMERSSFEKNPIDFLEAKGYKEVKKDLIIKLPKYSLFELENGRKRMLASAGELQKGNELALPSKYVNFLYLASHYEKLKGSPEDNEQKQLFVEQHKHYLDEIIEQISEFSKRVILADANLDKVLSAYNKHRDKPIREQAENIIHLFTLTNLGAPAAFKYFDTTIDRKRYTSTKEVLDATLIHQSITGLYETRIDLSQLGGDGGPAPEAAAKGSSGGTLNLEDEYRLYETSAEPEVSPGSTWLSDFPQAWAETGGMGLAVRQAPLIIPLKATSTPVSIKQYPMSQEAKLGIKPHIQRLLDQGILVPCQSPWNTPLLPVKKPGTNDYRPVQDLREVNKRVEDIHPTVPNPYNLLSGLPPSHRWYTVLDLKDAFFCLRLHPTSQPLFAFEWRDPGMGISGQLTWTRLPQGFKNSPTLFNEALHRDLADFRIQHPDLILLQYVDDILLAATSELDCQQGTRALLLTLGNLGYRASAKKAQLCQKQVKYLGYLLKEGQRWLTEARKETVMGQPTPKTPRQLREFLGTAGFCRLWIPGFAEMAAPLYPLTKPGTLFNWGPDQQKAYQEIKQALLTAPALGLPDLTKPFELFVDEKQGYAKGVLTQKLGPWRRPVAYLSKKLDPVAAGWPPCLRMVAAIAVLRKDAGKLTMGQPLVILAPHAVEALVKQPPDRWLSNARMTHYQAMLLDTDRVQFGPVVALNPATLLPLPEEGAPHDCLEILAETHGTRPDLTDQPIPDADHTWYTDGSSFLQEGQRKAGAAVTTETEVIWARALPAGTSAQRAELIALTQALKMAEGKRLNVYTDSRYAFATAHIHGEIYRRRGWLTSEGREIKNKSEILALLKALFLPKRLSIIHCLGHQKGDSAEARGNRLADQAAREAAIKTPPDTSTLLAGKRTADGSEFEKRTADGSEFESPKKKAKVE

SEQ ID NO: 1843 - protein, 2093 aa, synthetic construct
MPAAKRVKLDGGDKKYSIGLDIGTNSVGWAVITDEYKVPSKKFKVLGNTDRHSIKKNLIGALLFDSGETAEATRLKRTARRRYTRRKNRICYLQEIFSNEMAKVDDSFFHRLEESFLVEEDKKHERHPIFGNIVDEVAYHEKYPTIYHLRKKLVDSTDKADLRLIYLALAHMIKFRGHFLIEGDLNPDNSDVDKLFIQLVQTYNQLFEENPINASGVDAKAILSARLSKSRRLENLIAQLPGEKKNGLFGNLIALSLGLTPNFKSNFDLAEDAKLQLSKDTYDDDLDNLLAQIGDQYADLFLAAKNLSDAILLSDILRVNTEITKAPLSASMIKRYDEHHQDLTLLKALVRQQLPEKYKEIFFDQSKNGYAGYIDGGASQEEFYKFIKPILEKMDGTEELLVKLNREDLLRKQRTFDNGSIPHQIHLGELHAILRRQEDFYPFLKDNREKIEKILTFRIPYYVGPLARGNSRFAWMTRKSEETITPWNFEEVVDKGASAQSFIERMTNFDKNLPNEKVLPKHSLLYEYFTVYNELTKVKYVTEGMRKPAFLSGEQKKAIVDLLFKTNRKVTVKQLKEDYFKKIECFDSVEISGVEDRFNASLGTYHDLLKIIKDKDFLDNEENEDILEDIVLTLTLFEDREMIEERLKTYAHLFDDKVMKQLKRRRYTGWGRLSRKLINGIRDKQSGKTILDFLKSDGFANRNFMQLIHDDSLTFKEDIQKAQVSGQGDSLHEHIANLAGSPAIKKGILQTVKVVDELVKVMGRHKPENIVIEMARENQTTQKGQKNSRERMKRIEEGIKELGSQILKEHPVENTQLQNEKLYLYYLQNGRDMYVDQELDINRLSDYDVDHIVPQSFLKDDSIDNKVLTRSDKARGKSDNVPSEEVVKKMKNYWRQLLNAKLITQRKFDNLTKAERGGLSELDKAGFIKRQLVETRQITKHVAQILDSRMNTKYDENDKLIREVKVITLKSKLVSDFRKDFQFYKVREINNYHHAHDAYLNAVVGTALIKKYPKLESEFVYGDYKVYDVRKMIAKSEQEIGKATAKYFFYSNIMNFFKTEITLANGEIRKRPLIETNGETGEIVWDKGRDFATVRKVLSMPQVNIVKKTEVQTGGFSKESILPKRNSDKLIARKKDWDPKKYGGFDSPTVAYSVLVVAKVEKGKSKKLKSVKELLGITIMERSSFEKNPIDFLEAKGYKEVKKDLIIKLPKYSLFELENGRKRMLASAGELQKGNELALPSKYVNFLYLASHYEKLKGSPEDNEQKQLFVEQHKHYLDEIIEQISEFSKRVILADANLDKVLSAYNKHRDKPIREQAENIIHLFTLTNLGAPAAFKYFDTTIDRKRYTSTKEVLDATLIHQSITGLYETRIDLSQLGGDGGPAPEAAAKGGTLNLEDEYRLYETSAEPEVSPGSTWLSDFPQAWAETGGMGLAVRQAPLIIPLKATSTPVSIKQYPMSQEAKLGIKPHIQRLLDQGILVPCQSPWNTPLLPVKKPGTNDYRPVQDLREVNKRVEDIHPTVPNPYNLLSGLPPSHRWYTVLDLKDAFFCLRLHPTSQPLFAFEWRDPGMGISGQLTWTRLPQGFKNSPTLFNEALHRDLADFRIQHPDLILLQYVDDILLAATSELDCQQGTRALLLTLGNLGYRASAKKAQLCQKQVKYLGYLLKEGQRWLTEARKETVMGQPTPKTPRQLREFLGTAGFCRLWIPGFAEMAAPLYPLTKPGTLFNWGPDQQKAYQEIKQALLTAPALGLPDLTKPFELFVDEKQGYAKGVLTQKLGPWRRPVAYLSKKLDPVAAGWPPCLRMVAAIAVLRKDAGKLTMGQPLVILAPHAVEALVKQPPDRWLSNARMTHYQAMLLDTDRVQFGPVVALNPATLLPLPEEGAPHDCLEILAETHGTRPDLTDQPIPDADHTWYTDGSSFLQEGQRKAGAAVTTETEVIWARALPAGTSAQRAELIALTQALKMAEGKRLNVYTDSRYAFATAHIHGEIYRRRGWLTSEGREIKNKSEILALLKALFLPKRLSIIHCLGHQKGDSAEARGNRLADQAAREAAIKTPPDTSTLLAGKRTADGSEFEKRTADGSEFESPKKKAKVE

SEQ ID NO: 1844 - protein, 2098 aa, synthetic construct
MPAAKRVKLDGGDKKYSIGLDIGTNSVGWAVITDEYKVPSKKFKVLGNTDRHSIKKNLIGALLFDSGETAEATRLKRTARRRYTRRKNRICYLQEIFSNEMAKVDDSFFHRLEESFLVEEDKKHERHPIFGNIVDEVAYHEKYPTIYHLRKKLVDSTDKADLRLIYLALAHMIKFRGHFLIEGDLNPDNSDVDKLFIQLVQTYNQLFEENPINASGVDAKAILSARLSKSRRLENLIAQLPGEKKNGLFGNLIALSLGLTPNFKSNFDLAEDAKLQLSKDTYDDDLDNLLAQIGDQYADLFLAAKNLSDAILLSDILRVNTEITKAPLSASMIKRYDEHHQDLTLLKALVRQQLPEKYKEIFFDQSKNGYAGYIDGGASQEEFYKFIKPILEKMDGTEELLVKLNREDLLRKQRTFDNGSIPHQIHLGELHAILRRQEDFYPFLKDNREKIEKILTFRIPYYVGPLARGNSRFAWMTRKSEETITPWNFEEVVDKGASAQSFIERMTNFDKNLPNEKVLPKHSLLYEYFTVYNELTKVKYVTEGMRKPAFLSGEQKKAIVDLLFKTNRKVTVKQLKEDYFKKIECFDSVEISGVEDRFNASLGTYHDLLKIIKDKDFLDNEENEDILEDIVLTLTLFEDREMIEERLKTYAHLFDDKVMKQLKRRRYTGWGRLSRKLINGIRDKQSGKTILDFLKSDGFANRNFMQLIHDDSLTFKEDIQKAQVSGQGDSLHEHIANLAGSPAIKKGILQTVKVVDELVKVMGRHKPENIVIEMARENQTTQKGQKNSRERMKRIEEGIKELGSQILKEHPVENTQLQNEKLYLYYLQNGRDMYVDQELDINRLSDYDVDHIVPQSFLKDDSIDNKVLTRSDKARGKSDNVPSEEVVKKMKNYWRQLLNAKLITQRKFDNLTKAERGGLSELDKAGFIKRQLVETRQITKHVAQILDSRMNTKYDENDKLIREVKVITLKSKLVSDFRKDFQFYKVREINNYHHAHDAYLNAVVGTALIKKYPKLESEFVYGDYKVYDVRKMIAKSEQEIGKATAKYFFYSNIMNFFKTEITLANGEIRKRPLIETNGETGEIVWDKGRDFATVRKVLSMPQVNIVKKTEVQTGGFSKESILPKRNSDKLIARKKDWDPKKYGGFDSPTVAYSVLVVAKVEKGKSKKLKSVKELLGITIMERSSFEKNPIDFLEAKGYKEVKKDLIIKLPKYSLFELENGRKRMLASAGELQKGNELALPSKYVNFLYLASHYEKLKGSPEDNEQKQLFVEQHKHYLDEIIEQISEFSKRVILADANLDKVLSAYNKHRDKPIREQAENIIHLFTLTNLGAPAAFKYFDTTIDRKRYTSTKEVLDATLIHQSITGLYETRIDLSQLGGDGGPAPAPAPAPAPAPGGTLNLEDEYRLYETSAEPEVSPGSTWLSDFPQAWAETGGMGLAVRQAPLIIPLKATSTPVSIKQYPMSQEAKLGIKPHIQRLLDQGILVPCQSPWNTPLLPVKKPGTNDYRPVQDLREVNKRVEDIHPTVPNPYNLLSGLPPSHRWYTVLDLKDAFFCLRLHPTSQPLFAFEWRDPGMGISGQLTWTRLPQGFKNSPTLFNEALHRDLADFRIQHPDLILLQYVDDILLAATSELDCQQGTRALLLTLGNLGYRASAKKAQLCQKQVKYLGYLLKEGQRWLTEARKETVMGQPTPKTPRQLREFLGTAGFCRLWIPGFAEMAAPLYPLTKPGTLFNWGPDQQKAYQEIKQALLTAPALGLPDLTKPFELFVDEKQGYAKGVLTQKLGPWRRPVAYLSKKLDPVAAGWPPCLRMVAAIAVLRKDAGKLTMGQPLVILAPHAVEALVKQPPDRWLSNARMTHYQAMLLDTDRVQFGPVVALNPATLLPLPEEGAPHDCLEILAETHGTRPDLTDQPIPDADHTWYTDGSSFLQEGQRKAGAAVTTETEVIWARALPAGTSAQRAELIALTQALKMAEGKRLNVYTDSRYAFATAHIHGEIYRRRGWLTSEGREIKNKSEILALLKALFLPKRLSIIHCLGHQKGDSAEARGNRLADQAAREAAIKTPPDTSTLLAGKRTADGSEFEKRTADGSEFESPKKKAKVE

SEQ ID NO: 1845 - protein, 2096 aa, synthetic construct
MPAAKRVKLDGGDKKYSIGLDIGTNSVGWAVITDEYKVPSKKFKVLGNTDRHSIKKNLIGALLFDSGETAEATRLKRTARRRYTRRKNRICYLQEIFSNEMAKVDDSFFHRLEESFLVEEDKKHERHPIFGNIVDEVAYHEKYPTIYHLRKKLVDSTDKADLRLIYLALAHMIKFRGHFLIEGDLNPDNSDVDKLFIQLVQTYNQLFEENPINASGVDAKAILSARLSKSRRLENLIAQLPGEKKNGLFGNLIALSLGLTPNFKSNFDLAEDAKLQLSKDTYDDDLDNLLAQIGDQYADLFLAAKNLSDAILLSDILRVNTEITKAPLSASMIKRYDEHHQDLTLLKALVRQQLPEKYKEIFFDQSKNGYAGYIDGGASQEEFYKFIKPILEKMDGTEELLVKLNREDLLRKQRTFDNGSIPHQIHLGELHAILRRQEDFYPFLKDNREKIEKILTFRIPYYVGPLARGNSRFAWMTRKSEETITPWNFEEVVDKGASAQSFIERMTNFDKNLPNEKVLPKHSLLYEYFTVYNELTKVKYVTEGMRKPAFLSGEQKKAIVDLLFKTNRKVTVKQLKEDYFKKIECFDSVEISGVEDRFNASLGTYHDLLKIIKDKDFLDNEENEDILEDIVLTLTLFEDREMIEERLKTYAHLFDDKVMKQLKRRRYTGWGRLSRKLINGIRDKQSGKTILDFLKSDGFANRNFMQLIHDDSLTFKEDIQKAQVSGQGDSLHEHIANLAGSPAIKKGILQTVKVVDELVKVMGRHKPENIVIEMARENQTTQKGQKNSRERMKRIEEGIKELGSQILKEHPVENTQLQNEKLYLYYLQNGRDMYVDQELDINRLSDYDVDHIVPQSFLKDDSIDNKVLTRSDKARGKSDNVPSEEVVKKMKNYWRQLLNAKLITQRKFDNLTKAERGGLSELDKAGFIKRQLVETRQITKHVAQILDSRMNTKYDENDKLIREVKVITLKSKLVSDFRKDFQFYKVREINNYHHAHDAYLNAVVGTALIKKYPKLESEFVYGDYKVYDVRKMIAKSEQEIGKATAKYFFYSNIMNFFKTEITLANGEIRKRPLIETNGETGEIVWDKGRDFATVRKVLSMPQVNIVKKTEVQTGGFSKESILPKRNSDKLIARKKDWDPKKYGGFDSPTVAYSVLVVAKVEKGKSKKLKSVKELLGITIMERSSFEKNPIDFLEAKGYKEVKKDLIIKLPKYSLFELENGRKRMLASAGELQKGNELALPSKYVNFLYLASHYEKLKGSPEDNEQKQLFVEQHKHYLDEIIEQISEFSKRVILADANLDKVLSAYNKHRDKPIREQAENIIHLFTLTNLGAPAAFKYFDTTIDRKRYTSTKEVLDATLIHQSITGLYETRIDLSQLGGDGGGSSGGGEAAAKGGTLNLEDEYRLYETSAEPEVSPGSTWLSDFPQAWAETGGMGLAVRQAPLIIPLKATSTPVSIKQYPMSQEAKLGIKPHIQRLLDQGILVPCQSPWNTPLLPVKKPGTNDYRPVQDLREVNKRVEDIHPTVPNPYNLLSGLPPSHRWYTVLDLKDAFFCLRLHPTSQPLFAFEWRDPGMGISGQLTWTRLPQGFKNSPTLFNEALHRDLADFRIQHPDLILLQYVDDILLAATSELDCQQGTRALLLTLGNLGYRASAKKAQLCQKQVKYLGYLLKEGQRWLTEARKETVMGQPTPKTPRQLREFLGTAGFCRLWIPGFAEMAAPLYPLTKPGTLFNWGPDQQKAYQEIKQALLTAPALGLPDLTKPFELFVDEKQGYAKGVLTQKLGPWRRPVAYLSKKLDPVAAGWPPCLRMVAAIAVLRKDAGKLTMGQPLVILAPHAVEALVKQPPDRWLSNARMTHYQAMLLDTDRVQFGPVVALNPATLLPLPEEGAPHDCLEILAETHGTRPDLTDQPIPDADHTWYTDGSSFLQEGQRKAGAAVTTETEVIWARALPAGTSAQRAELIALTQALKMAEGKRLNVYTDSRYAFATAHIHGEIYRRRGWLTSEGREIKNKSEILALLKALFLPKRLSIIHCLGHQKGDSAEARGNRLADQAAREAAIKTPPDTSTLLAGKRTADGSEFEKRTADGSEFESPKKKAKVE

SEQ ID NO: 1846 - protein, 2096 aa, synthetic construct
MPAAKRVKLDGGDKKYSIGLDIGTNSVGWAVITDEYKVPSKKFKVLGNTDRHSIKKNLIGALLFDSGETAEATRLKRTARRRYTRRKNRICYLQEIFSNEMAKVDDSFFHRLEESFLVEEDKKHERHPIFGNIVDEVAYHEKYPTIYHLRKKLVDSTDKADLRLIYLALAHMIKFRGHFLIEGDLNPDNSDVDKLFIQLVQTYNQLFEENPINASGVDAKAILSARLSKSRRLENLIAQLPGEKKNGLFGNLIALSLGLTPNFKSNFDLAEDAKLQLSKDTYDDDLDNLLAQIGDQYADLFLAAKNLSDAILLSDILRVNTEITKAPLSASMIKRYDEHHQDLTLLKALVRQQLPEKYKEIFFDQSKNGYAGYIDGGASQEEFYKFIKPILEKMDGTEELLVKLNREDLLRKQRTFDNGSIPHQIHLGELHAILRRQEDFYPFLKDNREKIEKILTFRIPYYVGPLARGNSRFAWMTRKSEETITPWNFEEVVDKGASAQSFIERMTNFDKNLPNEKVLPKHSLLYEYFTVYNELTKVKYVTEGMRKPAFLSGEQKKAIVDLLFKTNRKVTVKQLKEDYFKKIECFDSVEISGVEDRFNASLGTYHDLLKIIKDKDFLDNEENEDILEDIVLTLTLFEDREMIEERLKTYAHLFDDKVMKQLKRRRYTGWGRLSRKLINGIRDKQSGKTILDFLKSDGFANRNFMQLIHDDSLTFKEDIQKAQVSGQGDSLHEHIANLAGSPAIKKGILQTVKVVDELVKVMGRHKPENIVIEMARENQTTQKGQKNSRERMKRIEEGIKELGSQILKEHPVENTQLQNEKLYLYYLQNGRDMYVDQELDINRLSDYDVDHIVPQSFLKDDSIDNKVLTRSDKARGKSDNVPSEEVVKKMKNYWRQLLNAKLITQRKFDNLTKAERGGLSELDKAGFIKRQLVETRQITKHVAQILDSRMNTKYDENDKLIREVKVITLKSKLVSDFRKDFQFYKVREINNYHHAHDAYLNAVVGTALIKKYPKLESEFVYGDYKVYDVRKMIAKSEQEIGKATAKYFFYSNIMNFFKTEITLANGEIRKRPLIETNGETGEIVWDKGRDFATVRKVLSMPQVNIVKKTEVQTGGFSKESILPKRNSDKLIARKKDWDPKKYGGFDSPTVAYSVLVVAKVEKGKSKKLKSVKELLGITIMERSSFEKNPIDFLEAKGYKEVKKDLIIKLPKYSLFELENGRKRMLASAGELQKGNELALPSKYVNFLYLASHYEKLKGSPEDNEQKQLFVEQHKHYLDEIIEQISEFSKRVILADANLDKVLSAYNKHRDKPIREQAENIIHLFTLTNLGAPAAFKYFDTTIDRKRYTSTKEVLDATLIHQSITGLYETRIDLSQLGGDGGEAAAKGGGGSSGGTLNLEDEYRLYETSAEPEVSPGSTWLSDFPQAWAETGGMGLAVRQAPLIIPLKATSTPVSIKQYPMSQEAKLGIKPHIQRLLDQGILVPCQSPWNTPLLPVKKPGTNDYRPVQDLREVNKRVEDIHPTVPNPYNLLSGLPPSHRWYTVLDLKDAFFCLRLHPTSQPLFAFEWRDPGMGISGQLTWTRLPQGFKNSPTLFNEALHRDLADFRIQHPDLILLQYVDDILLAATSELDCQQGTRALLLTLGNLGYRASAKKAQLCQKQVKYLGYLLKEGQRWLTEARKETVMGQPTPKTPRQLREFLGTAGFCRLWIPGFAEMAAPLYPLTKPGTLFNWGPDQQKAYQEIKQALLTAPALGLPDLTKPFELFVDEKQGYAKGVLTQKLGPWRRPVAYLSKKLDPVAAGWPPCLRMVAAIAVLRKDAGKLTMGQPLVILAPHAVEALVKQPPDRWLSNARMTHYQAMLLDTDRVQFGPVVALNPATLLPLPEEGAPHDCLEILAETHGTRPDLTDQPIPDADHTWYTDGSSFLQEGQRKAGAAVTTETEVIWARALPAGTSAQRAELIALTQALKMAEGKRLNVYTDSRYAFATAHIHGEIYRRRGWLTSEGREIKNKSEILALLKALFLPKRLSIIHCLGHQKGDSAEARGNRLADQAAREAAIKTPPDTSTLLAGKRTADGSEFEKRTADGSEFESPKKKAKVE

SEQ ID NO: 1847 - protein, 2095 aa, synthetic construct
MPAAKRVKLDGGDKKYSIGLDIGTNSVGWAVITDEYKVPSKKFKVLGNTDRHSIKKNLIGALLFDSGETAEATRLKRTARRRYTRRKNRICYLQEIFSNEMAKVDDSFFHRLEESFLVEEDKKHERHPIFGNIVDEVAYHEKYPTIYHLRKKLVDSTDKADLRLIYLALAHMIKFRGHFLIEGDLNPDNSDVDKLFIQLVQTYNQLFEENPINASGVDAKAILSARLSKSRRLENLIAQLPGEKKNGLFGNLIALSLGLTPNFKSNFDLAEDAKLQLSKDTYDDDLDNLLAQIGDQYADLFLAAKNLSDAILLSDILRVNTEITKAPLSASMIKRYDEHHQDLTLLKALVRQQLPEKYKEIFFDQSKNGYAGYIDGGASQEEFYKFIKPILEKMDGTEELLVKLNREDLLRKQRTFDNGSIPHQIHLGELHAILRRQEDFYPFLKDNREKIEKILTFRIPYYVGPLARGNSRFAWMTRKSEETITPWNFEEVVDKGASAQSFIERMTNFDKNLPNEKVLPKHSLLYEYFTVYNELTKVKYVTEGMRKPAFLSGEQKKAIVDLLFKTNRKVTVKQLKEDYFKKIECFDSVEISGVEDRFNASLGTYHDLLKIIKDKDFLDNEENEDILEDIVLTLTLFEDREMIEERLKTYAHLFDDKVMKQLKRRRYTGWGRLSRKLINGIRDKQSGKTILDFLKSDGFANRNFMQLIHDDSLTFKEDIQKAQVSGQGDSLHEHIANLAGSPAIKKGILQTVKVVDELVKVMGRHKPENIVIEMARENQTTQKGQKNSRERMKRIEEGIKELGSQILKEHPVENTQLQNEKLYLYYLQNGRDMYVDQELDINRLSDYDVDHIVPQSFLKDDSIDNKVLTRSDKARGKSDNVPSEEVVKKMKNYWRQLLNAKLITQRKFDNLTKAERGGLSELDKAGFIKRQLVETRQITKHVAQILDSRMNTKYDENDKLIREVKVITLKSKLVSDFRKDFQFYKVREINNYHHAHDAYLNAVVGTALIKKYPKLESEFVYGDYKVYDVRKMIAKSEQEIGKATAKYFFYSNIMNFFKTEITLANGEIRKRPLIETNGETGEIVWDKGRDFATVRKVLSMPQVNIVKKTEVQTGGFSKESILPKRNSDKLIARKKDWDPKKYGGFDSPTVAYSVLVVAKVEKGKSKKLKSVKELLGITIMERSSFEKNPIDFLEAKGYKEVKKDLIIKLPKYSLFELENGRKRMLASAGELQKGNELALPSKYVNFLYLASHYEKLKGSPEDNEQKQLFVEQHKHYLDEIIEQISEFSKRVILADANLDKVLSAYNKHRDKPIREQAENIIHLFTLTNLGAPAAFKYFDTTIDRKRYTSTKEVLDATLIHQSITGLYETRIDLSQLGGDGGEAAAKEAAAKGGTLNLEDEYRLYETSAEPEVSPGSTWLSDFPQAWAETGGMGLAVRQAPLIIPLKATSTPVSIKQYPMSQEAKLGIKPHIQRLLDQGILVPCQSPWNTPLLPVKKPGTNDYRPVQDLREVNKRVEDIHPTVPNPYNLLSGLPPSHRWYTVLDLKDAFFCLRLHPTSQPLFAFEWRDPGMGISGQLTWTRLPQGFKNSPTLFNEALHRDLADFRIQHPDLILLQYVDDILLAATSELDCQQGTRALLLTLGNLGYRASAKKAQLCQKQVKYLGYLLKEGQRWLTEARKETVMGQPTPKTPRQLREFLGTAGFCRLWIPGFAEMAAPLYPLTKPGTLFNWGPDQQKAYQEIKQALLTAPALGLPDLTKPFELFVDEKQGYAKGVLTQKLGPWRRPVAYLSKKLDPVAAGWPPCLRMVAAIAVLRKDAGKLTMGQPLVILAPHAVEALVKQPPDRWLSNARMTHYQAMLLDTDRVQFGPVVALNPATLLPLPEEGAPHDCLEILAETHGTRPDLTDQPIPDADHTWYTDGSSFLQEGQRKAGAAVTTETEVIWARALPAGTSAQRAELIALTQALKMAEGKRLNVYTDSRYAFATAHIHGEIYRRRGWLTSEGREIKNKSEILALLKALFLPKRLSIIHCLGHQKGDSAEARGNRLADQAAREAAIKTPPDTSTLLAGKRTADGSEFEKRTADGSEFESPKKKAKVE

SEQ ID NO: 1848 - protein, 2091 aa, synthetic construct
MPAAKRVKLDGGDKKYSIGLDIGTNSVGWAVITDEYKVPSKKFKVLGNTDRHSIKKNLIGALLFDSGETAEATRLKRTARRRYTRRKNRICYLQEIFSNEMAKVDDSFFHRLEESFLVEEDKKHERHPIFGNIVDEVAYHEKYPTIYHLRKKLVDSTDKADLRLIYLALAHMIKFRGHFLIEGDLNPDNSDVDKLFIQLVQTYNQLFEENPINASGVDAKAILSARLSKSRRLENLIAQLPGEKKNGLFGNLIALSLGLTPNFKSNFDLAEDAKLQLSKDTYDDDLDNLLAQIGDQYADLFLAAKNLSDAILLSDILRVNTEITKAPLSASMIKRYDEHHQDLTLLKALVRQQLPEKYKEIFFDQSKNGYAGYIDGGASQEEFYKFIKPILEKMDGTEELLVKLNREDLLRKQRTFDNGSIPHQIHLGELHAILRRQEDFYPFLKDNREKIEKILTFRIPYYVGPLARGNSRFAWMTRKSEETITPWNFEEVVDKGASAQSFIERMTNFDKNLPNEKVLPKHSLLYEYFTVYNELTKVKYVTEGMRKPAFLSGEQKKAIVDLLFKTNRKVTVKQLKEDYFKKIECFDSVEISGVEDRFNASLGTYHDLLKIIKDKDFLDNEENEDILEDIVLTLTLFEDREMIEERLKTYAHLFDDKVMKQLKRRRYTGWGRLSRKLINGIRDKQSGKTILDFLKSDGFANRNFMQLIHDDSLTFKEDIQKAQVSGQGDSLHEHIANLAGSPAIKKGILQTVKVVDELVKVMGRHKPENIVIEMARENQTTQKGQKNSRERMKRIEEGIKELGSQILKEHPVENTQLQNEKLYLYYLQNGRDMYVDQELDINRLSDYDVDHIVPQSFLKDDSIDNKVLTRSDKARGKSDNVPSEEVVKKMKNYWRQLLNAKLITQRKFDNLTKAERGGLSELDKAGFIKRQLVETRQITKHVAQILDSRMNTKYDENDKLIREVKVITLKSKLVSDFRKDFQFYKVREINNYHHAHDAYLNAVVGTALIKKYPKLESEFVYGDYKVYDVRKMIAKSEQEIGKATAKYFFYSNIMNFFKTEITLANGEIRKRPLIETNGETGEIVWDKGRDFATVRKVLSMPQVNIVKKTEVQTGGFSKESILPKRNSDKLIARKKDWDPKKYGGFDSPTVAYSVLVVAKVEKGKSKKLKSVKELLGITIMERSSFEKNPIDFLEAKGYKEVKKDLIIKLPKYSLFELENGRKRMLASAGELQKGNELALPSKYVNFLYLASHYEKLKGSPEDNEQKQLFVEQHKHYLDEIIEQISEFSKRVILADANLDKVLSAYNKHRDKPIREQAENIIHLFTLTNLGAPAAFKYFDTTIDRKRYTSTKEVLDATLIHQSITGLYETRIDLSQLGGDGGPAPGGGGGTLNLEDEYRLYETSAEPEVSPGSTWLSDFPQAWAETGGMGLAVRQAPLIIPLKATSTPVSIKQYPMSQEAKLGIKPHIQRLLDQGILVPCQSPWNTPLLPVKKPGTNDYRPVQDLREVNKRVEDIHPTVPNPYNLLSGLPPSHRWYTVLDLKDAFFCLRLHPTSQPLFAFEWRDPGMGISGQLTWTRLPQGFKNSPTLFNEALHRDLADFRIQHPDLILLQYVDDILLAATSELDCQQGTRALLLTLGNLGYRASAKKAQLCQKQVKYLGYLLKEGQRWLTEARKETVMGQPTPKTPRQLREFLGTAGFCRLWIPGFAEMAAPLYPLTKPGTLFNWGPDQQKAYQEIKQALLTAPALGLPDLTKPFELFVDEKQGYAKGVLTQKLGPWRRPVAYLSKKLDPVAAGWPPCLRMVAAIAVLRKDAGKLTMGQPLVILAPHAVEALVKQPPDRWLSNARMTHYQAMLLDTDRVQFGPVVALNPATLLPLPEEGAPHDCLEILAETHGTRPDLTDQPIPDADHTWYTDGSSFLQEGQRKAGAAVTTETEVIWARALPAGTSAQRAELIALTQALKMAEGKRLNVYTDSRYAFATAHIHGEIYRRRGWLTSEGREIKNKSEILALLKALFLPKRLSIIHCLGHQKGDSAEARGNRLADQAAREAAIKTPPDTSTLLAGKRTADGSEFEKRTADGSEFESPKKKAKVE

SEQ ID NO: 1849 - protein, 2097 aa, synthetic construct
MPAAKRVKLDGGDKKYSIGLDIGTNSVGWAVITDEYKVPSKKFKVLGNTDRHSIKKNLIGALLFDSGETAEATRLKRTARRRYTRRKNRICYLQEIFSNEMAKVDDSFFHRLEESFLVEEDKKHERHPIFGNIVDEVAYHEKYPTIYHLRKKLVDSTDKADLRLIYLALAHMIKFRGHFLIEGDLNPDNSDVDKLFIQLVQTYNQLFEENPINASGVDAKAILSARLSKSRRLENLIAQLPGEKKNGLFGNLIALSLGLTPNFKSNFDLAEDAKLQLSKDTYDDDLDNLLAQIGDQYADLFLAAKNLSDAILLSDILRVNTEITKAPLSASMIKRYDEHHQDLTLLKALVRQQLPEKYKEIFFDQSKNGYAGYIDGGASQEEFYKFIKPILEKMDGTEELLVKLNREDLLRKQRTFDNGSIPHQIHLGELHAILRRQEDFYPFLKDNREKIEKILTFRIPYYVGPLARGNSRFAWMTRKSEETITPWNFEEVVDKGASAQSFIERMTNFDKNLPNEKVLPKHSLLYEYFTVYNELTKVKYVTEGMRKPAFLSGEQKKAIVDLLFKTNRKVTVKQLKEDYFKKIECFDSVEISGVEDRFNASLGTYHDLLKIIKDKDFLDNEENEDILEDIVLTLTLFEDREMIEERLKTYAHLFDDKVMKQLKRRRYTGWGRLSRKLINGIRDKQSGKTILDFLKSDGFANRNFMQLIHDDSLTFKEDIQKAQVSGQGDSLHEHIANLAGSPAIKKGILQTVKVVDELVKVMGRHKPENIVIEMARENQTTQKGQKNSRERMKRIEEGIKELGSQILKEHPVENTQLQNEKLYLYYLQNGRDMYVDQELDINRLSDYDVDHIVPQSFLKDDSIDNKVLTRSDKARGKSDNVPSEEVVKKMKNYWRQLLNAKLITQRKFDNLTKAERGGLSELDKAGFIKRQLVETRQITKHVAQILDSRMNTKYDENDKLIREVKVITLKSKLVSDFRKDFQFYKVREINNYHHAHDAYLNAVVGTALIKKYPKLESEFVYGDYKVYDVRKMIAKSEQEIGKATAKYFFYSNIMNFFKTEITLANGEIRKRPLIETNGETGEIVWDKGRDFATVRKVLSMPQVNIVKKTEVQTGGFSKESILPKRNSDKLIARKKDWDPKKYGGFDSPTVAYSVLVVAKVEKGKSKKLKSVKELLGITIMERSSFEKNPIDFLEAKGYKEVKKDLIIKLPKYSLFELENGRKRMLASAGELQKGNELALPSKYVNFLYLASHYEKLKGSPEDNEQKQLFVEQHKHYLDEIIEQISEFSKRVILADANLDKVLSAYNKHRDKPIREQAENIIHLFTLTNLGAPAAFKYFDTTIDRKRYTSTKEVLDATLIHQSITGLYETRIDLSQLGGDGGGGSGGSGGSGGSGGTLNLEDEYRLYETSAEPEVSPGSTWLSDFPQAWAETGGMGLAVRQAPLIIPLKATSTPVSIKQYPMSQEAKLGIKPHIQRLLDQGILVPCQSPWNTPLLPVKKPGTNDYRPVQDLREVNKRVEDIHPTVPNPYNLLSGLPPSHRWYTVLDLKDAFFCLRLHPTSQPLFAFEWRDPGMGISGQLTWTRLPQGFKNSPTLFNEALHRDLADFRIQHPDLILLQYVDDILLAATSELDCQQGTRALLLTLGNLGYRASAKKAQLCQKQVKYLGYLLKEGQRWLTEARKETVMGQPTPKTPRQLREFLGTAGFCRLWIPGFAEMAAPLYPLTKPGTLFNWGPDQQKAYQEIKQALLTAPALGLPDLTKPFELFVDEKQGYAKGVLTQKLGPWRRPVAYLSKKLDPVAAGWPPCLRMVAAIAVLRKDAGKLTMGQPLVILAPHAVEALVKQPPDRWLSNARMTHYQAMLLDTDRVQFGPVVALNPATLLPLPEEGAPHDCLEILAETHGTRPDLTDQPIPDADHTWYTDGSSFLQEGQRKAGAAVTTETEVIWARALPAGTSAQRAELIALTQALKMAEGKRLNVYTDSRYAFATAHIHGEIYRRRGWLTSEGREIKNKSEILALLKALFLPKRLSIIHCLGHQKGDSAEARGNRLADQAAREAAIKTPPDTSTLLAGKRTADGSEFEKRTADGSEFESPKKKAKVE

SEQ ID NO: 1850 - protein, 2096 aa, synthetic construct
MPAAKRVKLDGGDKKYSIGLDIGTNSVGWAVITDEYKVPSKKFKVLGNTDRHSIKKNLIGALLFDSGETAEATRLKRTARRRYTRRKNRICYLQEIFSNEMAKVDDSFFHRLEESFLVEEDKKHERHPIFGNIVDEVAYHEKYPTIYHLRKKLVDSTDKADLRLIYLALAHMIKFRGHFLIEGDLNPDNSDVDKLFIQLVQTYNQLFEENPINASGVDAKAILSARLSKSRRLENLIAQLPGEKKNGLFGNLIALSLGLTPNFKSNFDLAEDAKLQLSKDTYDDDLDNLLAQIGDQYADLFLAAKNLSDAILLSDILRVNTEITKAPLSASMIKRYDEHHQDLTLLKALVRQQLPEKYKEIFFDQSKNGYAGYIDGGASQEEFYKFIKPILEKMDGTEELLVKLNREDLLRKQRTFDNGSIPHQIHLGELHAILRRQEDFYPFLKDNREKIEKILTFRIPYYVGPLARGNSRFAWMTRKSEETITPWNFEEVVDKGASAQSFIERMTNFDKNLPNEKVLPKHSLLYEYFTVYNELTKVKYVTEGMRKPAFLSGEQKKAIVDLLFKTNRKVTVKQLKEDYFKKIECFDSVEISGVEDRFNASLGTYHDLLKIIKDKDFLDNEENEDILEDIVLTLTLFEDREMIEERLKTYAHLFDDKVMKQLKRRRYTGWGRLSRKLINGIRDKQSGKTILDFLKSDGFANRNFMQLIHDDSLTFKEDIQKAQVSGQGDSLHEHIANLAGSPAIKKGILQTVKVVDELVKVMGRHKPENIVIEMARENQTTQKGQKNSRERMKRIEEGIKELGSQILKEHPVENTQLQNEKLYLYYLQNGRDMYVDQELDINRLSDYDVDHIVPQSFLKDDSIDNKVLTRSDKARGKSDNVPSEEVVKKMKNYWRQLLNAKLITQRKFDNLTKAERGGLSELDKAGFIKRQLVETRQITKHVAQILDSRMNTKYDENDKLIREVKVITLKSKLVSDFRKDFQFYKVREINNYHHAHDAYLNAVVGTALIKKYPKLESEFVYGDYKVYDVRKMIAKSEQEIGKATAKYFFYSNIMNFFKTEITLANGEIRKRPLIETNGETGEIVWDKGRDFATVRKVLSMPQVNIVKKTEVQTGGFSKESILPKRNSDKLIARKKDWDPKKYGGFDSPTVAYSVLVVAKVEKGKSKKLKSVKELLGITIMERSSFEKNPIDFLEAKGYKEVKKDLIIKLPKYSLFELENGRKRMLASAGELQKGNELALPSKYVNFLYLASHYEKLKGSPEDNEQKQLFVEQHKHYLDEIIEQISEFSKRVILADANLDKVLSAYNKHRDKPIREQAENIIHLFTLTNLGAPAAFKYFDTTIDRKRYTSTKEVLDATLIHQSITGLYETRIDLSQLGGDGGGSSEAAAKGGGGGTLNLEDEYRLYETSAEPEVSPGSTWLSDFPQAWAETGGMGLAVRQAPLIIPLKATSTPVSIKQYPMSQEAKLGIKPHIQRLLDQGILVPCQSPWNTPLLPVKKPGTNDYRPVQDLREVNKRVEDIHPTVPNPYNLLSGLPPSHRWYTVLDLKDAFFCLRLHPTSQPLFAFEWRDPGMGISGQLTWTRLPQGFKNSPTLFNEALHRDLADFRIQHPDLILLQYVDDILLAATSELDCQQGTRALLLTLGNLGYRASAKKAQLCQKQVKYLGYLLKEGQRWLTEARKETVMGQPTPKTPRQLREFLGTAGFCRLWIPGFAEMAAPLYPLTKPGTLFNWGPDQQKAYQEIKQALLTAPALGLPDLTKPFELFVDEKQGYAKGVLTQKLGPWRRPVAYLSKKLDPVAAGWPPCLRMVAAIAVLRKDAGKLTMGQPLVILAPHAVEALVKQPPDRWLSNARMTHYQAMLLDTDRVQFGPVVALNPATLLPLPEEGAPHDCLEILAETHGTRPDLTDQPIPDADHTWYTDGSSFLQEGQRKAGAAVTTETEVIWARALPAGTSAQRAELIALTQALKMAEGKRLNVYTDSRYAFATAHIHGEIYRRRGWLTSEGREIKNKSEILALLKALFLPKRLSIIHCLGHQKGDSAEARGNRLADQAAREAAIKTPPDTSTLLAGKRTADGSEFEKRTADGSEFESPKKKAKVE

SEQ ID NO: 1851 - protein, 2096 aa, synthetic construct
MPAAKRVKLDGGDKKYSIGLDIGTNSVGWAVITDEYKVPSKKFKVLGNTDRHSIKKNLIGALLFDSGETAEATRLKRTARRRYTRRKNRICYLQEIFSNEMAKVDDSFFHRLEESFLVEEDKKHERHPIFGNIVDEVAYHEKYPTIYHLRKKLVDSTDKADLRLIYLALAHMIKFRGHFLIEGDLNPDNSDVDKLFIQLVQTYNQLFEENPINASGVDAKAILSARLSKSRRLENLIAQLPGEKKNGLFGNLIALSLGLTPNFKSNFDLAEDAKLQLSKDTYDDDLDNLLAQIGDQYADLFLAAKNLSDAILLSDILRVNTEITKAPLSASMIKRYDEHHQDLTLLKALVRQQLPEKYKEIFFDQSKNGYAGYIDGGASQEEFYKFIKPILEKMDGTEELLVKLNREDLLRKQRTFDNGSIPHQIHLGELHAILRRQEDFYPFLKDNREKIEKILTFRIPYYVGPLARGNSRFAWMTRKSEETITPWNFEEVVDKGASAQSFIERMTNFDKNLPNEKVLPKHSLLYEYFTVYNELTKVKYVTEGMRKPAFLSGEQKKAIVDLLFKTNRKVTVKQLKEDYFKKIECFDSVEISGVEDRFNASLGTYHDLLKIIKDKDFLDNEENEDILEDIVLTLTLFEDREMIEERLKTYAHLFDDKVMKQLKRRRYTGWGRLSRKLINGIRDKQSGKTILDFLKSDGFANRNFMQLIHDDSLTFKEDIQKAQVSGQGDSLHEHIANLAGSPAIKKGILQTVKVVDELVKVMGRHKPENIVIEMARENQTTQKGQKNSRERMKRIEEGIKELGSQILKEHPVENTQLQNEKLYLYYLQNGRDMYVDQELDINRLSDYDVDHIVPQSFLKDDSIDNKVLTRSDKARGKSDNVPSEEVVKKMKNYWRQLLNAKLITQRKFDNLTKAERGGLSELDKAGFIKRQLVETRQITKHVAQILDSRMNTKYDENDKLIREVKVITLKSKLVSDFRKDFQFYKVREINNYHHAHDAYLNAVVGTALIKKYPKLESEFVYGDYKVYDVRKMIAKSEQEIGKATAKYFFYSNIMNFFKTEITLANGEIRKRPLIETNGETGEIVWDKGRDFATVRKVLSMPQVNIVKKTEVQTGGFSKESILPKRNSDKLIARKKDWDPKKYGGFDSPTVAYSVLVVAKVEKGKSKKLKSVKELLGITIMERSSFEKNPIDFLEAKGYKEVKKDLIIKLPKYSLFELENGRKRMLASAGELQKGNELALPSKYVNFLYLASHYEKLKGSPEDNEQKQLFVEQHKHYLDEIIEQISEFSKRVILADANLDKVLSAYNKHRDKPIREQAENIIHLFTLTNLGAPAAFKYFDTTIDRKRYTSTKEVLDATLIHQSITGLYETRIDLSQLGGDGGEAAAKPAPGGSGGTLNLEDEYRLYETSAEPEVSPGSTWLSDFPQAWAETGGMGLAVRQAPLIIPLKATSTPVSIKQYPMSQEAKLGIKPHIQRLLDQGILVPCQSPWNTPLLPVKKPGTNDYRPVQDLREVNKRVEDIHPTVPNPYNLLSGLPPSHRWYTVLDLKDAFFCLRLHPTSQPLFAFEWRDPGMGISGQLTWTRLPQGFKNSPTLFNEALHRDLADFRIQHPDLILLQYVDDILLAATSELDCQQGTRALLLTLGNLGYRASAKKAQLCQKQVKYLGYLLKEGQRWLTEARKETVMGQPTPKTPRQLREFLGTAGFCRLWIPGFAEMAAPLYPLTKPGTLFNWGPDQQKAYQEIKQALLTAPALGLPDLTKPFELFVDEKQGYAKGVLTQKLGPWRRPVAYLSKKLDPVAAGWPPCLRMVAAIAVLRKDAGKLTMGQPLVILAPHAVEALVKQPPDRWLSNARMTHYQAMLLDTDRVQFGPVVALNPATLLPLPEEGAPHDCLEILAETHGTRPDLTDQPIPDADHTWYTDGSSFLQEGQRKAGAAVTTETEVIWARALPAGTSAQRAELIALTQALKMAEGKRLNVYTDSRYAFATAHIHGEIYRRRGWLTSEGREIKNKSEILALLKALFLPKRLSIIHCLGHQKGDSAEARGNRLADQAAREAAIKTPPDTSTLLAGKRTADGSEFEKRTADGSEFESPKKKAKVE

SEQ ID NO: 1852 - protein, 2094 aa, synthetic construct
MPAAKRVKLDGGDKKYSIGLDIGTNSVGWAVITDEYKVPSKKFKVLGNTDRHSIKKNLIGALLFDSGETAEATRLKRTARRRYTRRKNRICYLQEIFSNEMAKVDDSFFHRLEESFLVEEDKKHERHPIFGNIVDEVAYHEKYPTIYHLRKKLVDSTDKADLRLIYLALAHMIKFRGHFLIEGDLNPDNSDVDKLFIQLVQTYNQLFEENPINASGVDAKAILSARLSKSRRLENLIAQLPGEKKNGLFGNLIALSLGLTPNFKSNFDLAEDAKLQLSKDTYDDDLDNLLAQIGDQYADLFLAAKNLSDAILLSDILRVNTEITKAPLSASMIKRYDEHHQDLTLLKALVRQQLPEKYKEIFFDQSKNGYAGYIDGGASQEEFYKFIKPILEKMDGTEELLVKLNREDLLRKQRTFDNGSIPHQIHLGELHAILRRQEDFYPFLKDNREKIEKILTFRIPYYVGPLARGNSRFAWMTRKSEETITPWNFEEVVDKGASAQSFIERMTNFDKNLPNEKVLPKHSLLYEYFTVYNELTKVKYVTEGMRKPAFLSGEQKKAIVDLLFKTNRKVTVKQLKEDYFKKIECFDSVEISGVEDRFNASLGTYHDLLKIIKDKDFLDNEENEDILEDIVLTLTLFEDREMIEERLKTYAHLFDDKVMKQLKRRRYTGWGRLSRKLINGIRDKQSGKTILDFLKSDGFANRNFMQLIHDDSLTFKEDIQKAQVSGQGDSLHEHIANLAGSPAIKKGILQTVKVVDELVKVMGRHKPENIVIEMARENQTTQKGQKNSRERMKRIEEGIKELGSQILKEHPVENTQLQNEKLYLYYLQNGRDMYVDQELDINRLSDYDVDHIVPQSFLKDDSIDNKVLTRSDKARGKSDNVPSEEVVKKMKNYWRQLLNAKLITQRKFDNLTKAERGGLSELDKAGFIKRQLVETRQITKHVAQILDSRMNTKYDENDKLIREVKVITLKSKLVSDFRKDFQFYKVREINNYHHAHDAYLNAVVGTALIKKYPKLESEFVYGDYKVYDVRKMIAKSEQEIGKATAKYFFYSNIMNFFKTEITLANGEIRKRPLIETNGETGEIVWDKGRDFATVRKVLSMPQVNIVKKTEVQTGGFSKESILPKRNSDKLIARKKDWDPKKYGGFDSPTVAYSVLVVAKVEKGKSKKLKSVKELLGITIMERSSFEKNPIDFLEAKGYKEVKKDLIIKLPKYSLFELENGRKRMLASAGELQKGNELALPSKYVNFLYLASHYEKLKGSPEDNEQKQLFVEQHKHYLDEIIEQISEFSKRVILADANLDKVLSAYNKHRDKPIREQAENIIHLFTLTNLGAPAAFKYFDTTIDRKRYTSTKEVLDATLIHQSITGLYETRIDLSQLGGDGGPAPAPAPAPGGTLNLEDEYRLYETSAEPEVSPGSTWLSDFPQAWAETGGMGLAVRQAPLIIPLKATSTPVSIKQYPMSQEAKLGIKPHIQRLLDQGILVPCQSPWNTPLLPVKKPGTNDYRPVQDLREVNKRVEDIHPTVPNPYNLLSGLPPSHRWYTVLDLKDAFFCLRLHPTSQPLFAFEWRDPGMGISGQLTWTRLPQGFKNSPTLFNEALHRDLADFRIQHPDLILLQYVDDILLAATSELDCQQGTRALLLTLGNLGYRASAKKAQLCQKQVKYLGYLLKEGQRWLTEARKETVMGQPTPKTPRQLREFLGTAGFCRLWIPGFAEMAAPLYPLTKPGTLFNWGPDQQKAYQEIKQALLTAPALGLPDLTKPFELFVDEKQGYAKGVLTQKLGPWRRPVAYLSKKLDPVAAGWPPCLRMVAAIAVLRKDAGKLTMGQPLVILAPHAVEALVKQPPDRWLSNARMTHYQAMLLDTDRVQFGPVVALNPATLLPLPEEGAPHDCLEILAETHGTRPDLTDQPIPDADHTWYTDGSSFLQEGQRKAGAAVTTETEVIWARALPAGTSAQRAELIALTQALKMAEGKRLNVYTDSRYAFATAHIHGEIYRRRGWLTSEGREIKNKSEILALLKALFLPKRLSIIHCLGHQKGDSAEARGNRLADQAAREAAIKTPPDTSTLLAGKRTADGSEFEKRTADGSEFESPKKKAKVE

SEQ ID NO: 1853 - protein, 2091 aa, synthetic construct
MPAAKRVKLDGGDKKYSIGLDIGTNSVGWAVITDEYKVPSKKFKVLGNTDRHSIKKNLIGALLFDSGETAEATRLKRTARRRYTRRKNRICYLQEIFSNEMAKVDDSFFHRLEESFLVEEDKKHERHPIFGNIVDEVAYHEKYPTIYHLRKKLVDSTDKADLRLIYLALAHMIKFRGHFLIEGDLNPDNSDVDKLFIQLVQTYNQLFEENPINASGVDAKAILSARLSKSRRLENLIAQLPGEKKNGLFGNLIALSLGLTPNFKSNFDLAEDAKLQLSKDTYDDDLDNLLAQIGDQYADLFLAAKNLSDAILLSDILRVNTEITKAPLSASMIKRYDEHHQDLTLLKALVRQQLPEKYKEIFFDQSKNGYAGYIDGGASQEEFYKFIKPILEKMDGTEELLVKLNREDLLRKQRTFDNGSIPHQIHLGELHAILRRQEDFYPFLKDNREKIEKILTFRIPYYVGPLARGNSRFAWMTRKSEETITPWNFEEVVDKGASAQSFIERMTNFDKNLPNEKVLPKHSLLYEYFTVYNELTKVKYVTEGMRKPAFLSGEQKKAIVDLLFKTNRKVTVKQLKEDYFKKIECFDSVEISGVEDRFNASLGTYHDLLKIIKDKDFLDNEENEDILEDIVLTLTLFEDREMIEERLKTYAHLFDDKVMKQLKRRRYTGWGRLSRKLINGIRDKQSGKTILDFLKSDGFANRNFMQLIHDDSLTFKEDIQKAQVSGQGDSLHEHIANLAGSPAIKKGILQTVKVVDELVKVMGRHKPENIVIEMARENQTTQKGQKNSRERMKRIEEGIKELGSQILKEHPVENTQLQNEKLYLYYLQNGRDMYVDQELDINRLSDYDVDHIVPQSFLKDDSIDNKVLTRSDKARGKSDNVPSEEVVKKMKNYWRQLLNAKLITQRKFDNLTKAERGGLSELDKAGFIKRQLVETRQITKHVAQILDSRMNTKYDENDKLIREVKVITLKSKLVSDFRKDFQFYKVREINNYHHAHDAYLNAVVGTALIKKYPKLESEFVYGDYKVYDVRKMIAKSEQEIGKATAKYFFYSNIMNFFKTEITLANGEIRKRPLIETNGETGEIVWDKGRDFATVRKVLSMPQVNIVKKTEVQTGGFSKESILPKRNSDKLIARKKDWDPKKYGGFDSPTVAYSVLVVAKVEKGKSKKLKSVKELLGITIMERSSFEKNPIDFLEAKGYKEVKKDLIIKLPKYSLFELENGRKRMLASAGELQKGNELALPSKYVNFLYLASHYEKLKGSPEDNEQKQLFVEQHKHYLDEIIEQISEFSKRVILADANLDKVLSAYNKHRDKPIREQAENIIHLFTLTNLGAPAAFKYFDTTIDRKRYTSTKEVLDATLIHQSITGLYETRIDLSQLGGDGGGGGGSSGGTLNLEDEYRLYETSAEPEVSPGSTWLSDFPQAWAETGGMGLAVRQAPLIIPLKATSTPVSIKQYPMSQEAKLGIKPHIQRLLDQGILVPCQSPWNTPLLPVKKPGTNDYRPVQDLREVNKRVEDIHPTVPNPYNLLSGLPPSHRWYTVLDLKDAFFCLRLHPTSQPLFAFEWRDPGMGISGQLTWTRLPQGFKNSPTLFNEALHRDLADFRIQHPDLILLQYVDDILLAATSELDCQQGTRALLLTLGNLGYRASAKKAQLCQKQVKYLGYLLKEGQRWLTEARKETVMGQPTPKTPRQLREFLGTAGFCRLWIPGFAEMAAPLYPLTKPGTLFNWGPDQQKAYQEIKQALLTAPALGLPDLTKPFELFVDEKQGYAKGVLTQKLGPWRRPVAYLSKKLDPVAAGWPPCLRMVAAIAVLRKDAGKLTMGQPLVILAPHAVEALVKQPPDRWLSNARMTHYQAMLLDTDRVQFGPVVALNPATLLPLPEEGAPHDCLEILAETHGTRPDLTDQPIPDADHTWYTDGSSFLQEGQRKAGAAVTTETEVIWARALPAGTSAQRAELIALTQALKMAEGKRLNVYTDSRYAFATAHIHGEIYRRRGWLTSEGREIKNKSEILALLKALFLPKRLSIIHCLGHQKGDSAEARGNRLADQAAREAAIKTPPDTSTLLAGKRTADGSEFEKRTADGSEFESPKKKAKVE

SEQ ID NO: 1854 - protein, 2091 aa, synthetic construct
MPAAKRVKLDGGDKKYSIGLDIGTNSVGWAVITDEYKVPSKKFKVLGNTDRHSIKKNLIGALLFDSGETAEATRLKRTARRRYTRRKNRICYLQEIFSNEMAKVDDSFFHRLEESFLVEEDKKHERHPIFGNIVDEVAYHEKYPTIYHLRKKLVDSTDKADLRLIYLALAHMIKFRGHFLIEGDLNPDNSDVDKLFIQLVQTYNQLFEENPINASGVDAKAILSARLSKSRRLENLIAQLPGEKKNGLFGNLIALSLGLTPNFKSNFDLAEDAKLQLSKDTYDDDLDNLLAQIGDQYADLFLAAKNLSDAILLSDILRVNTEITKAPLSASMIKRYDEHHQDLTLLKALVRQQLPEKYKEIFFDQSKNGYAGYIDGGASQEEFYKFIKPILEKMDGTEELLVKLNREDLLRKQRTFDNGSIPHQIHLGELHAILRRQEDFYPFLKDNREKIEKILTFRIPYYVGPLARGNSRFAWMTRKSEETITPWNFEEVVDKGASAQSFIERMTNFDKNLPNEKVLPKHSLLYEYFTVYNELTKVKYVTEGMRKPAFLSGEQKKAIVDLLFKTNRKVTVKQLKEDYFKKIECFDSVEISGVEDRFNASLGTYHDLLKIIKDKDFLDNEENEDILEDIVLTLTLFEDREMIEERLKTYAHLFDDKVMKQLKRRRYTGWGRLSRKLINGIRDKQSGKTILDFLKSDGFANRNFMQLIHDDSLTFKEDIQKAQVSGQGDSLHEHIANLAGSPAIKKGILQTVKVVDELVKVMGRHKPENIVIEMARENQTTQKGQKNSRERMKRIEEGIKELGSQILKEHPVENTQLQNEKLYLYYLQNGRDMYVDQELDINRLSDYDVDHIVPQSFLKDDSIDNKVLTRSDKARGKSDNVPSEEVVKKMKNYWRQLLNAKLITQRKFDNLTKAERGGLSELDKAGFIKRQLVETRQITKHVAQILDSRMNTKYDENDKLIREVKVITLKSKLVSDFRKDFQFYKVREINNYHHAHDAYLNAVVGTALIKKYPKLESEFVYGDYKVYDVRKMIAKSEQEIGKATAKYFFYSNIMNFFKTEITLANGEIRKRPLIETNGETGEIVWDKGRDFATVRKVLSMPQVNIVKKTEVQTGGFSKESILPKRNSDKLIARKKDWDPKKYGGFDSPTVAYSVLVVAKVEKGKSKKLKSVKELLGITIMERSSFEKNPIDFLEAKGYKEVKKDLIIKLPKYSLFELENGRKRMLASAGELQKGNELALPSKYVNFLYLASHYEKLKGSPEDNEQKQLFVEQHKHYLDEIIEQISEFSKRVILADANLDKVLSAYNKHRDKPIREQAENIIHLFTLTNLGAPAAFKYFDTTIDRKRYTSTKEVLDATLIHQSITGLYETRIDLSQLGGDGGGGGPAPGGTLNLEDEYRLYETSAEPEVSPGSTWLSDFPQAWAETGGMGLAVRQAPLIIPLKATSTPVSIKQYPMSQEAKLGIKPHIQRLLDQGILVPCQSPWNTPLLPVKKPGTNDYRPVQDLREVNKRVEDIHPTVPNPYNLLSGLPPSHRWYTVLDLKDAFFCLRLHPTSQPLFAFEWRDPGMGISGQLTWTRLPQGFKNSPTLFNEALHRDLADFRIQHPDLILLQYVDDILLAATSELDCQQGTRALLLTLGNLGYRASAKKAQLCQKQVKYLGYLLKEGQRWLTEARKETVMGQPTPKTPRQLREFLGTAGFCRLWIPGFAEMAAPLYPLTKPGTLFNWGPDQQKAYQEIKQALLTAPALGLPDLTKPFELFVDEKQGYAKGVLTQKLGPWRRPVAYLSKKLDPVAAGWPPCLRMVAAIAVLRKDAGKLTMGQPLVILAPHAVEALVKQPPDRWLSNARMTHYQAMLLDTDRVQFGPVVALNPATLLPLPEEGAPHDCLEILAETHGTRPDLTDQPIPDADHTWYTDGSSFLQEGQRKAGAAVTTETEVIWARALPAGTSAQRAELIALTQALKMAEGKRLNVYTDSRYAFATAHIHGEIYRRRGWLTSEGREIKNKSEILALLKALFLPKRLSIIHCLGHQKGDSAEARGNRLADQAAREAAIKTPPDTSTLLAGKRTADGSEFEKRTADGSEFESPKKKAKVE

SEQ ID NO: 1855 - protein, 2090 aa, synthetic construct
MPAAKRVKLDGGDKKYSIGLDIGTNSVGWAVITDEYKVPSKKFKVLGNTDRHSIKKNLIGALLFDSGETAEATRLKRTARRRYTRRKNRICYLQEIFSNEMAKVDDSFFHRLEESFLVEEDKKHERHPIFGNIVDEVAYHEKYPTIYHLRKKLVDSTDKADLRLIYLALAHMIKFRGHFLIEGDLNPDNSDVDKLFIQLVQTYNQLFEENPINASGVDAKAILSARLSKSRRLENLIAQLPGEKKNGLFGNLIALSLGLTPNFKSNFDLAEDAKLQLSKDTYDDDLDNLLAQIGDQYADLFLAAKNLSDAILLSDILRVNTEITKAPLSASMIKRYDEHHQDLTLLKALVRQQLPEKYKEIFFDQSKNGYAGYIDGGASQEEFYKFIKPILEKMDGTEELLVKLNREDLLRKQRTFDNGSIPHQIHLGELHAILRRQEDFYPFLKDNREKIEKILTFRIPYYVGPLARGNSRFAWMTRKSEETITPWNFEEVVDKGASAQSFIERMTNFDKNLPNEKVLPKHSLLYEYFTVYNELTKVKYVTEGMRKPAFLSGEQKKAIVDLLFKTNRKVTVKQLKEDYFKKIECFDSVEISGVEDRFNASLGTYHDLLKIIKDKDFLDNEENEDILEDIVLTLTLFEDREMIEERLKTYAHLFDDKVMKQLKRRRYTGWGRLSRKLINGIRDKQSGKTILDFLKSDGFANRNFMQLIHDDSLTFKEDIQKAQVSGQGDSLHEHIANLAGSPAIKKGILQTVKVVDELVKVMGRHKPENIVIEMARENQTTQKGQKNSRERMKRIEEGIKELGSQILKEHPVENTQLQNEKLYLYYLQNGRDMYVDQELDINRLSDYDVDHIVPQSFLKDDSIDNKVLTRSDKARGKSDNVPSEEVVKKMKNYWRQLLNAKLITQRKFDNLTKAERGGLSELDKAGFIKRQLVETRQITKHVAQILDSRMNTKYDENDKLIREVKVITLKSKLVSDFRKDFQFYKVREINNYHHAHDAYLNAVVGTALIKKYPKLESEFVYGDYKVYDVRKMIAKSEQEIGKATAKYFFYSNIMNFFKTEITLANGEIRKRPLIETNGETGEIVWDKGRDFATVRKVLSMPQVNIVKKTEVQTGGFSKESILPKRNSDKLIARKKDWDPKKYGGFDSPTVAYSVLVVAKVEKGKSKKLKSVKELLGITIMERSSFEKNPIDFLEAKGYKEVKKDLIIKLPKYSLFELENGRKRMLASAGELQKGNELALPSKYVNFLYLASHYEKLKGSPEDNEQKQLFVEQHKHYLDEIIEQISEFSKRVILADANLDKVLSAYNKHRDKPIREQAENIIHLFTLTNLGAPAAFKYFDTTIDRKRYTSTKEVLDATLIHQSITGLYETRIDLSQLGGDGGPAPAPGGTLNLEDEYRLYETSAEPEVSPGSTWLSDFPQAWAETGGMGLAVRQAPLIIPLKATSTPVSIKQYPMSQEAKLGIKPHIQRLLDQGILVPCQSPWNTPLLPVKKPGTNDYRPVQDLREVNKRVEDIHPTVPNPYNLLSGLPPSHRWYTVLDLKDAFFCLRLHPTSQPLFAFEWRDPGMGISGQLTWTRLPQGFKNSPTLFNEALHRDLADFRIQHPDLILLQYVDDILLAATSELDCQQGTRALLLTLGNLGYRASAKKAQLCQKQVKYLGYLLKEGQRWLTEARKETVMGQPTPKTPRQLREFLGTAGFCRLWIPGFAEMAAPLYPLTKPGTLFNWGPDQQKAYQEIKQALLTAPALGLPDLTKPFELFVDEKQGYAKGVLTQKLGPWRRPVAYLSKKLDPVAAGWPPCLRMVAAIAVLRKDAGKLTMGQPLVILAPHAVEALVKQPPDRWLSNARMTHYQAMLLDTDRVQFGPVVALNPATLLPLPEEGAPHDCLEILAETHGTRPDLTDQPIPDADHTWYTDGSSFLQEGQRKAGAAVTTETEVIWARALPAGTSAQRAELIALTQALKMAEGKRLNVYTDSRYAFATAHIHGEIYRRRGWLTSEGREIKNKSEILALLKALFLPKRLSIIHCLGHQKGDSAEARGNRLADQAAREAAIKTPPDTSTLLAGKRTADGSEFEKRTADGSEFESPKKKAKVE

SEQ ID NO: 1856 - protein, 2096 aa, synthetic construct
MPAAKRVKLDGGDKKYSIGLDIGTNSVGWAVITDEYKVPSKKFKVLGNTDRHSIKKNLIGALLFDSGETAEATRLKRTARRRYTRRKNRICYLQEIFSNEMAKVDDSFFHRLEESFLVEEDKKHERHPIFGNIVDEVAYHEKYPTIYHLRKKLVDSTDKADLRLIYLALAHMIKFRGHFLIEGDLNPDNSDVDKLFIQLVQTYNQLFEENPINASGVDAKAILSARLSKSRRLENLIAQLPGEKKNGLFGNLIALSLGLTPNFKSNFDLAEDAKLQLSKDTYDDDLDNLLAQIGDQYADLFLAAKNLSDAILLSDILRVNTEITKAPLSASMIKRYDEHHQDLTLLKALVRQQLPEKYKEIFFDQSKNGYAGYIDGGASQEEFYKFIKPILEKMDGTEELLVKLNREDLLRKQRTFDNGSIPHQIHLGELHAILRRQEDFYPFLKDNREKIEKILTFRIPYYVGPLARGNSRFAWMTRKSEETITPWNFEEVVDKGASAQSFIERMTNFDKNLPNEKVLPKHSLLYEYFTVYNELTKVKYVTEGMRKPAFLSGEQKKAIVDLLFKTNRKVTVKQLKEDYFKKIECFDSVEISGVEDRFNASLGTYHDLLKIIKDKDFLDNEENEDILEDIVLTLTLFEDREMIEERLKTYAHLFDDKVMKQLKRRRYTGWGRLSRKLINGIRDKQSGKTILDFLKSDGFANRNFMQLIHDDSLTFKEDIQKAQVSGQGDSLHEHIANLAGSPAIKKGILQTVKVVDELVKVMGRHKPENIVIEMARENQTTQKGQKNSRERMKRIEEGIKELGSQILKEHPVENTQLQNEKLYLYYLQNGRDMYVDQELDINRLSDYDVDHIVPQSFLKDDSIDNKVLTRSDKARGKSDNVPSEEVVKKMKNYWRQLLNAKLITQRKFDNLTKAERGGLSELDKAGFIKRQLVETRQITKHVAQILDSRMNTKYDENDKLIREVKVITLKSKLVSDFRKDFQFYKVREINNYHHAHDAYLNAVVGTALIKKYPKLESEFVYGDYKVYDVRKMIAKSEQEIGKATAKYFFYSNIMNFFKTEITLANGEIRKRPLIETNGETGEIVWDKGRDFATVRKVLSMPQVNIVKKTEVQTGGFSKESILPKRNSDKLIARKKDWDPKKYGGFDSPTVAYSVLVVAKVEKGKSKKLKSVKELLGITIMERSSFEKNPIDFLEAKGYKEVKKDLIIKLPKYSLFELENGRKRMLASAGELQKGNELALPSKYVNFLYLASHYEKLKGSPEDNEQKQLFVEQHKHYLDEIIEQISEFSKRVILADANLDKVLSAYNKHRDKPIREQAENIIHLFTLTNLGAPAAFKYFDTTIDRKRYTSTKEVLDATLIHQSITGLYETRIDLSQLGGDGGPAPGGGEAAAKGGTLNLEDEYRLYETSAEPEVSPGSTWLSDFPQAWAETGGMGLAVRQAPLIIPLKATSTPVSIKQYPMSQEAKLGIKPHIQRLLDQGILVPCQSPWNTPLLPVKKPGTNDYRPVQDLREVNKRVEDIHPTVPNPYNLLSGLPPSHRWYTVLDLKDAFFCLRLHPTSQPLFAFEWRDPGMGISGQLTWTRLPQGFKNSPTLFNEALHRDLADFRIQHPDLILLQYVDDILLAATSELDCQQGTRALLLTLGNLGYRASAKKAQLCQKQVKYLGYLLKEGQRWLTEARKETVMGQPTPKTPRQLREFLGKAGFCRLFIPGFAEMAAPLYPLTKPGTLFNWGPDQQKAYQEIKQALLTAPALGLPDLTKPFELFVDEKQGYAKGVLTQKLGPWRRPVAYLSKKLDPVAAGWPPCLRMVAAIAVLRKDAGKLTMGQPLVILAPHAVEALVKQPPDRWLSNARMTHYQAMLLDTDRVQFGPVVALNPATLLPLPEEGAPHDCLEILAETHGTRPDLTDQPIPDADHTWYTDGSSFLQEGQRKAGAAVTTETEVIWARALPAGTSAQRAELIALTQALKMAEGKRLNVYTDSRYAFATAHIHGEIYRRRGWLTSEGREIKNKSEILALLKALFLPKRLSIIHCLGHQKGDSAEARGNRLADQAAREAAIKTPPDTSTLLAGKRTADGSEFEKRTADGSEFESPKKKAKVE

SEQ ID NO: 1857 - protein, 2094 aa, synthetic construct
MPAAKRVKLDGGDKKYSIGLDIGTNSVGWAVITDEYKVPSKKFKVLGNTDRHSIKKNLIGALLFDSGETAEATRLKRTARRRYTRRKNRICYLQEIFSNEMAKVDDSFFHRLEESFLVEEDKKHERHPIFGNIVDEVAYHEKYPTIYHLRKKLVDSTDKADLRLIYLALAHMIKFRGHFLIEGDLNPDNSDVDKLFIQLVQTYNQLFEENPINASGVDAKAILSARLSKSRRLENLIAQLPGEKKNGLFGNLIALSLGLTPNFKSNFDLAEDAKLQLSKDTYDDDLDNLLAQIGDQYADLFLAAKNLSDAILLSDILRVNTEITKAPLSASMIKRYDEHHQDLTLLKALVRQQLPEKYKEIFFDQSKNGYAGYIDGGASQEEFYKFIKPILEKMDGTEELLVKLNREDLLRKQRTFDNGSIPHQIHLGELHAILRRQEDFYPFLKDNREKIEKILTFRIPYYVGPLARGNSRFAWMTRKSEETITPWNFEEVVDKGASAQSFIERMTNFDKNLPNEKVLPKHSLLYEYFTVYNELTKVKYVTEGMRKPAFLSGEQKKAIVDLLFKTNRKVTVKQLKEDYFKKIECFDSVEISGVEDRFNASLGTYHDLLKIIKDKDFLDNEENEDILEDIVLTLTLFEDREMIEERLKTYAHLFDDKVMKQLKRRRYTGWGRLSRKLINGIRDKQSGKTILDFLKSDGFANRNFMQLIHDDSLTFKEDIQKAQVSGQGDSLHEHIANLAGSPAIKKGILQTVKVVDELVKVMGRHKPENIVIEMARENQTTQKGQKNSRERMKRIEEGIKELGSQILKEHPVENTQLQNEKLYLYYLQNGRDMYVDQELDINRLSDYDVDHIVPQSFLKDDSIDNKVLTRSDKARGKSDNVPSEEVVKKMKNYWRQLLNAKLITQRKFDNLTKAERGGLSELDKAGFIKRQLVETRQITKHVAQILDSRMNTKYDENDKLIREVKVITLKSKLVSDFRKDFQFYKVREINNYHHAHDAYLNAVVGTALIKKYPKLESEFVYGDYKVYDVRKMIAKSEQEIGKATAKYFFYSNIMNFFKTEITLANGEIRKRPLIETNGETGEIVWDKGRDFATVRKVLSMPQVNIVKKTEVQTGGFSKESILPKRNSDKLIARKKDWDPKKYGGFDSPTVAYSVLVVAKVEKGKSKKLKSVKELLGITIMERSSFEKNPIDFLEAKGYKEVKKDLIIKLPKYSLFELENGRKRMLASAGELQKGNELALPSKYVNFLYLASHYEKLKGSPEDNEQKQLFVEQHKHYLDEIIEQISEFSKRVILADANLDKVLSAYNKHRDKPIREQAENIIHLFTLTNLGAPAAFKYFDTTIDRKRYTSTKEVLDATLIHQSITGLYETRIDLSQLGGDGGGGGPAPGSSGGTLNLEDEYRLYETSAEPEVSPGSTWLSDFPQAWAETGGMGLAVRQAPLIIPLKATSTPVSIKQYPMSQEAKLGIKPHIQRLLDQGILVPCQSPWNTPLLPVKKPGTNDYRPVQDLREVNKRVEDIHPTVPNPYNLLSGLPPSHRWYTVLDLKDAFFCLRLHPTSQPLFAFEWRDPGMGISGQLTWTRLPQGFKNSPTLFNEALHRDLADFRIQHPDLILLQYVDDILLAATSELDCQQGTRALLLTLGNLGYRASAKKAQLCQKQVKYLGYLLKEGQRWLTEARKETVMGQPTPKTPRQLREFLGKAGFCRLFIPGFAEMAAPLYPLTKPGTLFNWGPDQQKAYQEIKQALLTAPALGLPDLTKPFELFVDEKQGYAKGVLTQKLGPWRRPVAYLSKKLDPVAAGWPPCLRMVAAIAVLRKDAGKLTMGQPLVILAPHAVEALVKQPPDRWLSNARMTHYQAMLLDTDRVQFGPVVALNPATLLPLPEEGAPHDCLEILAETHGTRPDLTDQPIPDADHTWYTDGSSFLQEGQRKAGAAVTTETEVIWARALPAGTSAQRAELIALTQALKMAEGKRLNVYTDSRYAFATAHIHGEIYRRRGWLTSEGREIKNKSEILALLKALFLPKRLSIIHCLGHQKGDSAEARGNRLADQAAREAAIKTPPDTSTLLAGKRTADGSEFEKRTADGSEFESPKKKAKVE

SEQ ID NO: 1858 - protein, 2093 aa, synthetic construct
MPAAKRVKLDGGDKKYSIGLDIGTNSVGWAVITDEYKVPSKKFKVLGNTDRHSIKKNLIGALLFDSGETAEATRLKRTARRRYTRRKNRICYLQEIFSNEMAKVDDSFFHRLEESFLVEEDKKHERHPIFGNIVDEVAYHEKYPTIYHLRKKLVDSTDKADLRLIYLALAHMIKFRGHFLIEGDLNPDNSDVDKLFIQLVQTYNQLFEENPINASGVDAKAILSARLSKSRRLENLIAQLPGEKKNGLFGNLIALSLGLTPNFKSNFDLAEDAKLQLSKDTYDDDLDNLLAQIGDQYADLFLAAKNLSDAILLSDILRVNTEITKAPLSASMIKRYDEHHQDLTLLKALVRQQLPEKYKEIFFDQSKNGYAGYIDGGASQEEFYKFIKPILEKMDGTEELLVKLNREDLLRKQRTFDNGSIPHQIHLGELHAILRRQEDFYPFLKDNREKIEKILTFRIPYYVGPLARGNSRFAWMTRKSEETITPWNFEEVVDKGASAQSFIERMTNFDKNLPNEKVLPKHSLLYEYFTVYNELTKVKYVTEGMRKPAFLSGEQKKAIVDLLFKTNRKVTVKQLKEDYFKKIECFDSVEISGVEDRFNASLGTYHDLLKIIKDKDFLDNEENEDILEDIVLTLTLFEDREMIEERLKTYAHLFDDKVMKQLKRRRYTGWGRLSRKLINGIRDKQSGKTILDFLKSDGFANRNFMQLIHDDSLTFKEDIQKAQVSGQGDSLHEHIANLAGSPAIKKGILQTVKVVDELVKVMGRHKPENIVIEMARENQTTQKGQKNSRERMKRIEEGIKELGSQILKEHPVENTQLQNEKLYLYYLQNGRDMYVDQELDINRLSDYDVDHIVPQSFLKDDSIDNKVLTRSDKARGKSDNVPSEEVVKKMKNYWRQLLNAKLITQRKFDNLTKAERGGLSELDKAGFIKRQLVETRQITKHVAQILDSRMNTKYDENDKLIREVKVITLKSKLVSDFRKDFQFYKVREINNYHHAHDAYLNAVVGTALIKKYPKLESEFVYGDYKVYDVRKMIAKSEQEIGKATAKYFFYSNIMNFFKTEITLANGEIRKRPLIETNGETGEIVWDKGRDFATVRKVLSMPQVNIVKKTEVQTGGFSKESILPKRNSDKLIARKKDWDPKKYGGFDSPTVAYSVLVVAKVEKGKSKKLKSVKELLGITIMERSSFEKNPIDFLEAKGYKEVKKDLIIKLPKYSLFELENGRKRMLASAGELQKGNELALPSKYVNFLYLASHYEKLKGSPEDNEQKQLFVEQHKHYLDEIIEQISEFSKRVILADANLDKVLSAYNKHRDKPIREQAENIIHLFTLTNLGAPAAFKYFDTTIDRKRYTSTKEVLDATLIHQSITGLYETRIDLSQLGGDGGPAPEAAAKGGTLNLEDEYRLYETSAEPEVSPGSTWLSDFPQAWAETGGMGLAVRQAPLIIPLKATSTPVSIKQYPMSQEAKLGIKPHIQRLLDQGILVPCQSPWNTPLLPVKKPGTNDYRPVQDLREVNKRVEDIHPTVPNPYNLLSGLPPSHRWYTVLDLKDAFFCLRLHPTSQPLFAFEWRDPGMGISGQLTWTRLPQGFKNSPTLFNEALHRDLADFRIQHPDLILLQYVDDILLAATSELDCQQGTRALLLTLGNLGYRASAKKAQLCQKQVKYLGYLLKEGQRWLTEARKETVMGQPTPKTPRQLREFLGKAGFCRLFIPGFAEMAAPLYPLTKPGTLFNWGPDQQKAYQEIKQALLTAPALGLPDLTKPFELFVDEKQGYAKGVLTQKLGPWRRPVAYLSKKLDPVAAGWPPCLRMVAAIAVLRKDAGKLTMGQPLVILAPHAVEALVKQPPDRWLSNARMTHYQAMLLDTDRVQFGPVVALNPATLLPLPEEGAPHDCLEILAETHGTRPDLTDQPIPDADHTWYTDGSSFLQEGQRKAGAAVTTETEVIWARALPAGTSAQRAELIALTQALKMAEGKRLNVYTDSRYAFATAHIHGEIYRRRGWLTSEGREIKNKSEILALLKALFLPKRLSIIHCLGHQKGDSAEARGNRLADQAAREAAIKTPPDTSTLLAGKRTADGSEFEKRTADGSEFESPKKKAKVE

SEQ ID NO: 1859 - protein, 2096 aa, synthetic construct
MPAAKRVKLDGGDKKYSIGLDIGTNSVGWAVITDEYKVPSKKFKVLGNTDRHSIKKNLIGALLFDSGETAEATRLKRTARRRYTRRKNRICYLQEIFSNEMAKVDDSFFHRLEESFLVEEDKKHERHPIFGNIVDEVAYHEKYPTIYHLRKKLVDSTDKADLRLIYLALAHMIKFRGHFLIEGDLNPDNSDVDKLFIQLVQTYNQLFEENPINASGVDAKAILSARLSKSRRLENLIAQLPGEKKNGLFGNLIALSLGLTPNFKSNFDLAEDAKLQLSKDTYDDDLDNLLAQIGDQYADLFLAAKNLSDAILLSDILRVNTEITKAPLSASMIKRYDEHHQDLTLLKALVRQQLPEKYKEIFFDQSKNGYAGYIDGGASQEEFYKFIKPILEKMDGTEELLVKLNREDLLRKQRTFDNGSIPHQIHLGELHAILRRQEDFYPFLKDNREKIEKILTFRIPYYVGPLARGNSRFAWMTRKSEETITPWNFEEVVDKGASAQSFIERMTNFDKNLPNEKVLPKHSLLYEYFTVYNELTKVKYVTEGMRKPAFLSGEQKKAIVDLLFKTNRKVTVKQLKEDYFKKIECFDSVEISGVEDRFNASLGTYHDLLKIIKDKDFLDNEENEDILEDIVLTLTLFEDREMIEERLKTYAHLFDDKVMKQLKRRRYTGWGRLSRKLINGIRDKQSGKTILDFLKSDGFANRNFMQLIHDDSLTFKEDIQKAQVSGQGDSLHEHIANLAGSPAIKKGILQTVKVVDELVKVMGRHKPENIVIEMARENQTTQKGQKNSRERMKRIEEGIKELGSQILKEHPVENTQLQNEKLYLYYLQNGRDMYVDQELDINRLSDYDVDHIVPQSFLKDDSIDNKVLTRSDKARGKSDNVPSEEVVKKMKNYWRQLLNAKLITQRKFDNLTKAERGGLSELDKAGFIKRQLVETRQITKHVAQILDSRMNTKYDENDKLIREVKVITLKSKLVSDFRKDFQFYKVREINNYHHAHDAYLNAVVGTALIKKYPKLESEFVYGDYKVYDVRKMIAKSEQEIGKATAKYFFYSNIMNFFKTEITLANGEIRKRPLIETNGETGEIVWDKGRDFATVRKVLSMPQVNIVKKTEVQTGGFSKESILPKRNSDKLIARKKDWDPKKYGGFDSPTVAYSVLVVAKVEKGKSKKLKSVKELLGITIMERSSFEKNPIDFLEAKGYKEVKKDLIIKLPKYSLFELENGRKRMLASAGELQKGNELALPSKYVNFLYLASHYEKLKGSPEDNEQKQLFVEQHKHYLDEIIEQISEFSKRVILADANLDKVLSAYNKHRDKPIREQAENIIHLFTLTNLGAPAAFKYFDTTIDRKRYTSTKEVLDATLIHQSITGLYETRIDLSQLGGDGGGGSEAAAKGSSGGTLNLEDEYRLYETSAEPEVSPGSTWLSDFPQAWAETGGMGLAVRQAPLIIPLKATSTPVSIKQYPMSQEAKLGIKPHIQRLLDQGILVPCQSPWNTPLLPVKKPGTNDYRPVQDLREVNKRVEDIHPTVPNPYNLLSGLPPSHRWYTVLDLKDAFFCLRLHPTSQPLFAFEWRDPGMGISGQLTWTRLPQGFKNSPTLFNEALHRDLADFRIQHPDLILLQYVDDILLAATSELDCQQGTRALLLTLGNLGYRASAKKAQLCQKQVKYLGYLLKEGQRWLTEARKETVMGQPTPKTPRQLREFLGKAGFCRLFIPGFAEMAAPLYPLTKPGTLFNWGPDQQKAYQEIKQALLTAPALGLPDLTKPFELFVDEKQGYAKGVLTQKLGPWRRPVAYLSKKLDPVAAGWPPCLRMVAAIAVLRKDAGKLTMGQPLVILAPHAVEALVKQPPDRWLSNARMTHYQAMLLDTDRVQFGPVVALNPATLLPLPEEGAPHDCLEILAETHGTRPDLTDQPIPDADHTWYTDGSSFLQEGQRKAGAAVTTETEVIWARALPAGTSAQRAELIALTQALKMAEGKRLNVYTDSRYAFATAHIHGEIYRRRGWLTSEGREIKNKSEILALLKALFLPKRLSIIHCLGHQKGDSAEARGNRLADQAAREAAIKTPPDTSTLLAGKRTADGSEFEKRTADGSEFESPKKKAKVE

SEQ ID NO: 1860 - protein, 2100 aa, synthetic construct
MPAAKRVKLDGGDKKYSIGLDIGTNSVGWAVITDEYKVPSKKFKVLGNTDRHSIKKNLIGALLFDSGETAEATRLKRTARRRYTRRKNRICYLQEIFSNEMAKVDDSFFHRLEESFLVEEDKKHERHPIFGNIVDEVAYHEKYPTIYHLRKKLVDSTDKADLRLIYLALAHMIKFRGHFLIEGDLNPDNSDVDKLFIQLVQTYNQLFEENPINASGVDAKAILSARLSKSRRLENLIAQLPGEKKNGLFGNLIALSLGLTPNFKSNFDLAEDAKLQLSKDTYDDDLDNLLAQIGDQYADLFLAAKNLSDAILLSDILRVNTEITKAPLSASMIKRYDEHHQDLTLLKALVRQQLPEKYKEIFFDQSKNGYAGYIDGGASQEEFYKFIKPILEKMDGTEELLVKLNREDLLRKQRTFDNGSIPHQIHLGELHAILRRQEDFYPFLKDNREKIEKILTFRIPYYVGPLARGNSRFAWMTRKSEETITPWNFEEVVDKGASAQSFIERMTNFDKNLPNEKVLPKHSLLYEYFTVYNELTKVKYVTEGMRKPAFLSGEQKKAIVDLLFKTNRKVTVKQLKEDYFKKIECFDSVEISGVEDRFNASLGTYHDLLKIIKDKDFLDNEENEDILEDIVLTLTLFEDREMIEERLKTYAHLFDDKVMKQLKRRRYTGWGRLSRKLINGIRDKQSGKTILDFLKSDGFANRNFMQLIHDDSLTFKEDIQKAQVSGQGDSLHEHIANLAGSPAIKKGILQTVKVVDELVKVMGRHKPENIVIEMARENQTTQKGQKNSRERMKRIEEGIKELGSQILKEHPVENTQLQNEKLYLYYLQNGRDMYVDQELDINRLSDYDVDHIVPQSFLKDDSIDNKVLTRSDKARGKSDNVPSEEVVKKMKNYWRQLLNAKLITQRKFDNLTKAERGGLSELDKAGFIKRQLVETRQITKHVAQILDSRMNTKYDENDKLIREVKVITLKSKLVSDFRKDFQFYKVREINNYHHAHDAYLNAVVGTALIKKYPKLESEFVYGDYKVYDVRKMIAKSEQEIGKATAKYFFYSNIMNFFKTEITLANGEIRKRPLIETNGETGEIVWDKGRDFATVRKVLSMPQVNIVKKTEVQTGGFSKESILPKRNSDKLIARKKDWDPKKYGGFDSPTVAYSVLVVAKVEKGKSKKLKSVKELLGITIMERSSFEKNPIDFLEAKGYKEVKKDLIIKLPKYSLFELENGRKRMLASAGELQKGNELALPSKYVNFLYLASHYEKLKGSPEDNEQKQLFVEQHKHYLDEIIEQISEFSKRVILADANLDKVLSAYNKHRDKPIREQAENIIHLFTLTNLGAPAAFKYFDTTIDRKRYTSTKEVLDATLIHQSITGLYETRIDLSQLGGDGGEAAAKGGGGSEAAAKGGTLNLEDEYRLYETSAEPEVSPGSTWLSDFPQAWAETGGMGLAVRQAPLIIPLKATSTPVSIKQYPMSQEAKLGIKPHIQRLLDQGILVPCQSPWNTPLLPVKKPGTNDYRPVQDLREVNKRVEDIHPTVPNPYNLLSGLPPSHRWYTVLDLKDAFFCLRLHPTSQPLFAFEWRDPGMGISGQLTWTRLPQGFKNSPTLFNEALHRDLADFRIQHPDLILLQYVDDILLAATSELDCQQGTRALLLTLGNLGYRASAKKAQLCQKQVKYLGYLLKEGQRWLTEARKETVMGQPTPKTPRQLREFLGKAGFCRLFIPGFAEMAAPLYPLTKPGTLFNWGPDQQKAYQEIKQALLTAPALGLPDLTKPFELFVDEKQGYAKGVLTQKLGPWRRPVAYLSKKLDPVAAGWPPCLRMVAAIAVLRKDAGKLTMGQPLVILAPHAVEALVKQPPDRWLSNARMTHYQAMLLDTDRVQFGPVVALNPATLLPLPEEGAPHDCLEILAETHGTRPDLTDQPIPDADHTWYTDGSSFLQEGQRKAGAAVTTETEVIWARALPAGTSAQRAELIALTQALKMAEGKRLNVYTDSRYAFATAHIHGEIYRRRGWLTSEGREIKNKSEILALLKALFLPKRLSIIHCLGHQKGDSAEARGNRLADQAAREAAIKTPPDTSTLLAGKRTADGSEFEKRTADGSEFESPKKKAKVE

SEQ ID NO: 1861 - protein, 2096 aa, synthetic construct
MPAAKRVKLDGGDKKYSIGLDIGTNSVGWAVITDEYKVPSKKFKVLGNTDRHSIKKNLIGALLFDSGETAEATRLKRTARRRYTRRKNRICYLQEIFSNEMAKVDDSFFHRLEESFLVEEDKKHERHPIFGNIVDEVAYHEKYPTIYHLRKKLVDSTDKADLRLIYLALAHMIKFRGHFLIEGDLNPDNSDVDKLFIQLVQTYNQLFEENPINASGVDAKAILSARLSKSRRLENLIAQLPGEKKNGLFGNLIALSLGLTPNFKSNFDLAEDAKLQLSKDTYDDDLDNLLAQIGDQYADLFLAAKNLSDAILLSDILRVNTEITKAPLSASMIKRYDEHHQDLTLLKALVRQQLPEKYKEIFFDQSKNGYAGYIDGGASQEEFYKFIKPILEKMDGTEELLVKLNREDLLRKQRTFDNGSIPHQIHLGELHAILRRQEDFYPFLKDNREKIEKILTFRIPYYVGPLARGNSRFAWMTRKSEETITPWNFEEVVDKGASAQSFIERMTNFDKNLPNEKVLPKHSLLYEYFTVYNELTKVKYVTEGMRKPAFLSGEQKKAIVDLLFKTNRKVTVKQLKEDYFKKIECFDSVEISGVEDRFNASLGTYHDLLKIIKDKDFLDNEENEDILEDIVLTLTLFEDREMIEERLKTYAHLFDDKVMKQLKRRRYTGWGRLSRKLINGIRDKQSGKTILDFLKSDGFANRNFMQLIHDDSLTFKEDIQKAQVSGQGDSLHEHIANLAGSPAIKKGILQTVKVVDELVKVMGRHKPENIVIEMARENQTTQKGQKNSRERMKRIEEGIKELGSQILKEHPVENTQLQNEKLYLYYLQNGRDMYVDQELDINRLSDYDVDHIVPQSFLKDDSIDNKVLTRSDKARGKSDNVPSEEVVKKMKNYWRQLLNAKLITQRKFDNLTKAERGGLSELDKAGFIKRQLVETRQITKHVAQILDSRMNTKYDENDKLIREVKVITLKSKLVSDFRKDFQFYKVREINNYHHAHDAYLNAVVGTALIKKYPKLESEFVYGDYKVYDVRKMIAKSEQEIGKATAKYFFYSNIMNFFKTEITLANGEIRKRPLIETNGETGEIVWDKGRDFATVRKVLSMPQVNIVKKTEVQTGGFSKESILPKRNSDKLIARKKDWDPKKYGGFDSPTVAYSVLVVAKVEKGKSKKLKSVKELLGITIMERSSFEKNPIDFLEAKGYKEVKKDLIIKLPKYSLFELENGRKRMLASAGELQKGNELALPSKYVNFLYLASHYEKLKGSPEDNEQKQLFVEQHKHYLDEIIEQISEFSKRVILADANLDKVLSAYNKHRDKPIREQAENIIHLFTLTNLGAPAAFKYFDTTIDRKRYTSTKEVLDATLIHQSITGLYETRIDLSQLGGDGGGSSEAAAKGGGGGTLNLEDEYRLYETSAEPEVSPGSTWLSDFPQAWAETGGMGLAVRQAPLIIPLKATSTPVSIKQYPMSQEAKLGIKPHIQRLLDQGILVPCQSPWNTPLLPVKKPGTNDYRPVQDLREVNKRVEDIHPTVPNPYNLLSGLPPSHRWYTVLDLKDAFFCLRLHPTSQPLFAFEWRDPGMGISGQLTWTRLPQGFKNSPTLFNEALHRDLADFRIQHPDLILLQYVDDILLAATSELDCQQGTRALLLTLGNLGYRASAKKAQLCQKQVKYLGYLLKEGQRWLTEARKETVMGQPTPKTPRQLREFLGKAGFCRLFIPGFAEMAAPLYPLTKPGTLFNWGPDQQKAYQEIKQALLTAPALGLPDLTKPFELFVDEKQGYAKGVLTQKLGPWRRPVAYLSKKLDPVAAGWPPCLRMVAAIAVLRKDAGKLTMGQPLVILAPHAVEALVKQPPDRWLSNARMTHYQAMLLDTDRVQFGPVVALNPATLLPLPEEGAPHDCLEILAETHGTRPDLTDQPIPDADHTWYTDGSSFLQEGQRKAGAAVTTETEVIWARALPAGTSAQRAELIALTQALKMAEGKRLNVYTDSRYAFATAHIHGEIYRRRGWLTSEGREIKNKSEILALLKALFLPKRLSIIHCLGHQKGDSAEARGNRLADQAAREAAIKTPPDTSTLLAGKRTADGSEFEKRTADGSEFESPKKKAKVE

SEQ ID NO: 1862 - protein, 2110 aa, synthetic construct
MPAAKRVKLDGGDKKYSIGLDIGTNSVGWAVITDEYKVPSKKFKVLGNTDRHSIKKNLIGALLFDSGETAEATRLKRTARRRYTRRKNRICYLQEIFSNEMAKVDDSFFHRLEESFLVEEDKKHERHPIFGNIVDEVAYHEKYPTIYHLRKKLVDSTDKADLRLIYLALAHMIKFRGHFLIEGDLNPDNSDVDKLFIQLVQTYNQLFEENPINASGVDAKAILSARLSKSRRLENLIAQLPGEKKNGLFGNLIALSLGLTPNFKSNFDLAEDAKLQLSKDTYDDDLDNLLAQIGDQYADLFLAAKNLSDAILLSDILRVNTEITKAPLSASMIKRYDEHHQDLTLLKALVRQQLPEKYKEIFFDQSKNGYAGYIDGGASQEEFYKFIKPILEKMDGTEELLVKLNREDLLRKQRTFDNGSIPHQIHLGELHAILRRQEDFYPFLKDNREKIEKILTFRIPYYVGPLARGNSRFAWMTRKSEETITPWNFEEVVDKGASAQSFIERMTNFDKNLPNEKVLPKHSLLYEYFTVYNELTKVKYVTEGMRKPAFLSGEQKKAIVDLLFKTNRKVTVKQLKEDYFKKIECFDSVEISGVEDRFNASLGTYHDLLKIIKDKDFLDNEENEDILEDIVLTLTLFEDREMIEERLKTYAHLFDDKVMKQLKRRRYTGWGRLSRKLINGIRDKQSGKTILDFLKSDGFANRNFMQLIHDDSLTFKEDIQKAQVSGQGDSLHEHIANLAGSPAIKKGILQTVKVVDELVKVMGRHKPENIVIEMARENQTTQKGQKNSRERMKRIEEGIKELGSQILKEHPVENTQLQNEKLYLYYLQNGRDMYVDQELDINRLSDYDVDHIVPQSFLKDDSIDNKVLTRSDKARGKSDNVPSEEVVKKMKNYWRQLLNAKLITQRKFDNLTKAERGGLSELDKAGFIKRQLVETRQITKHVAQILDSRMNTKYDENDKLIREVKVITLKSKLVSDFRKDFQFYKVREINNYHHAHDAYLNAVVGTALIKKYPKLESEFVYGDYKVYDVRKMIAKSEQEIGKATAKYFFYSNIMNFFKTEITLANGEIRKRPLIETNGETGEIVWDKGRDFATVRKVLSMPQVNIVKKTEVQTGGFSKESILPKRNSDKLIARKKDWDPKKYGGFDSPTVAYSVLVVAKVEKGKSKKLKSVKELLGITIMERSSFEKNPIDFLEAKGYKEVKKDLIIKLPKYSLFELENGRKRMLASAGELQKGNELALPSKYVNFLYLASHYEKLKGSPEDNEQKQLFVEQHKHYLDEIIEQISEFSKRVILADANLDKVLSAYNKHRDKPIREQAENIIHLFTLTNLGAPAAFKYFDTTIDRKRYTSTKEVLDATLIHQSITGLYETRIDLSQLGGDGGEAAAKEAAAKEAAAKEAAAKEAAAKGGTLNLEDEYRLYETSAEPEVSPGSTWLSDFPQAWAETGGMGLAVRQAPLIIPLKATSTPVSIKQYPMSQEAKLGIKPHIQRLLDQGILVPCQSPWNTPLLPVKKPGTNDYRPVQDLREVNKRVEDIHPTVPNPYNLLSGLPPSHRWYTVLDLKDAFFCLRLHPTSQPLFAFEWRDPGMGISGQLTWTRLPQGFKNSPTLFNEALHRDLADFRIQHPDLILLQYVDDILLAATSELDCQQGTRALLLTLGNLGYRASAKKAQLCQKQVKYLGYLLKEGQRWLTEARKETVMGQPTPKTPRQLREFLGKAGFCRLFIPGFAEMAAPLYPLTKPGTLFNWGPDQQKAYQEIKQALLTAPALGLPDLTKPFELFVDEKQGYAKGVLTQKLGPWRRPVAYLSKKLDPVAAGWPPCLRMVAAIAVLRKDAGKLTMGQPLVILAPHAVEALVKQPPDRWLSNARMTHYQAMLLDTDRVQFGPVVALNPATLLPLPEEGAPHDCLEILAETHGTRPDLTDQPIPDADHTWYTDGSSFLQEGQRKAGAAVTTETEVIWARALPAGTSAQRAELIALTQALKMAEGKRLNVYTDSRYAFATAHIHGEIYRRRGWLTSEGREIKNKSEILALLKALFLPKRLSIIHCLGHQKGDSAEARGNRLADQAAREAAIKTPPDTSTLLAGKRTADGSEFEKRTADGSEFESPKKKAKVE

SEQ ID NO: 1863 - protein, 2098 aa, synthetic construct
MPAAKRVKLDGGDKKYSIGLDIGTNSVGWAVITDEYKVPSKKFKVLGNTDRHSIKKNLIGALLFDSGETAEATRLKRTARRRYTRRKNRICYLQEIFSNEMAKVDDSFFHRLEESFLVEEDKKHERHPIFGNIVDEVAYHEKYPTIYHLRKKLVDSTDKADLRLIYLALAHMIKFRGHFLIEGDLNPDNSDVDKLFIQLVQTYNQLFEENPINASGVDAKAILSARLSKSRRLENLIAQLPGEKKNGLFGNLIALSLGLTPNFKSNFDLAEDAKLQLSKDTYDDDLDNLLAQIGDQYADLFLAAKNLSDAILLSDILRVNTEITKAPLSASMIKRYDEHHQDLTLLKALVRQQLPEKYKEIFFDQSKNGYAGYIDGGASQEEFYKFIKPILEKMDGTEELLVKLNREDLLRKQRTFDNGSIPHQIHLGELHAILRRQEDFYPFLKDNREKIEKILTFRIPYYVGPLARGNSRFAWMTRKSEETITPWNFEEVVDKGASAQSFIERMTNFDKNLPNEKVLPKHSLLYEYFTVYNELTKVKYVTEGMRKPAFLSGEQKKAIVDLLFKTNRKVTVKQLKEDYFKKIECFDSVEISGVEDRFNASLGTYHDLLKIIKDKDFLDNEENEDILEDIVLTLTLFEDREMIEERLKTYAHLFDDKVMKQLKRRRYTGWGRLSRKLINGIRDKQSGKTILDFLKSDGFANRNFMQLIHDDSLTFKEDIQKAQVSGQGDSLHEHIANLAGSPAIKKGILQTVKVVDELVKVMGRHKPENIVIEMARENQTTQKGQKNSRERMKRIEEGIKELGSQILKEHPVENTQLQNEKLYLYYLQNGRDMYVDQELDINRLSDYDVDHIVPQSFLKDDSIDNKVLTRSDKARGKSDNVPSEEVVKKMKNYWRQLLNAKLITQRKFDNLTKAERGGLSELDKAGFIKRQLVETRQITKHVAQILDSRMNTKYDENDKLIREVKVITLKSKLVSDFRKDFQFYKVREINNYHHAHDAYLNAVVGTALIKKYPKLESEFVYGDYKVYDVRKMIAKSEQEIGKATAKYFFYSNIMNFFKTEITLANGEIRKRPLIETNGETGEIVWDKGRDFATVRKVLSMPQVNIVKKTEVQTGGFSKESILPKRNSDKLIARKKDWDPKKYGGFDSPTVAYSVLVVAKVEKGKSKKLKSVKELLGITIMERSSFEKNPIDFLEAKGYKEVKKDLIIKLPKYSLFELENGRKRMLASAGELQKGNELALPSKYVNFLYLASHYEKLKGSPEDNEQKQLFVEQHKHYLDEIIEQISEFSKRVILADANLDKVLSAYNKHRDKPIREQAENIIHLFTLTNLGAPAAFKYFDTTIDRKRYTSTKEVLDATLIHQSITGLYETRIDLSQLGGDGGPAPAPAPAPAPAPGGTLNLEDEYRLYETSAEPEVSPGSTWLSDFPQAWAETGGMGLAVRQAPLIIPLKATSTPVSIKQYPMSQEAKLGIKPHIQRLLDQGILVPCQSPWNTPLLPVKKPGTNDYRPVQDLREVNKRVEDIHPTVPNPYNLLSGLPPSHRWYTVLDLKDAFFCLRLHPTSQPLFAFEWRDPGMGISGQLTWTRLPQGFKNSPTLFNEALHRDLADFRIQHPDLILLQYVDDILLAATSELDCQQGTRALLLTLGNLGYRASAKKAQLCQKQVKYLGYLLKEGQRWLTEARKETVMGQPTPKTPRQLREFLGKAGFCRLFIPGFAEMAAPLYPLTKPGTLFNWGPDQQKAYQEIKQALLTAPALGLPDLTKPFELFVDEKQGYAKGVLTQKLGPWRRPVAYLSKKLDPVAAGWPPCLRMVAAIAVLRKDAGKLTMGQPLVILAPHAVEALVKQPPDRWLSNARMTHYQAMLLDTDRVQFGPVVALNPATLLPLPEEGAPHDCLEILAETHGTRPDLTDQPIPDADHTWYTDGSSFLQEGQRKAGAAVTTETEVIWARALPAGTSAQRAELIALTQALKMAEGKRLNVYTDSRYAFATAHIHGEIYRRRGWLTSEGREIKNKSEILALLKALFLPKRLSIIHCLGHQKGDSAEARGNRLADQAAREAAIKTPPDTSTLLAGKRTADGSEFEKRTADGSEFESPKKKAKVE

SEQ ID NO: 1864 - protein, 2096 aa, synthetic construct
MPAAKRVKLDGGDKKYSIGLDIGTNSVGWAVITDEYKVPSKKFKVLGNTDRHSIKKNLIGALLFDSGETAEATRLKRTARRRYTRRKNRICYLQEIFSNEMAKVDDSFFHRLEESFLVEEDKKHERHPIFGNIVDEVAYHEKYPTIYHLRKKLVDSTDKADLRLIYLALAHMIKFRGHFLIEGDLNPDNSDVDKLFIQLVQTYNQLFEENPINASGVDAKAILSARLSKSRRLENLIAQLPGEKKNGLFGNLIALSLGLTPNFKSNFDLAEDAKLQLSKDTYDDDLDNLLAQIGDQYADLFLAAKNLSDAILLSDILRVNTEITKAPLSASMIKRYDEHHQDLTLLKALVRQQLPEKYKEIFFDQSKNGYAGYIDGGASQEEFYKFIKPILEKMDGTEELLVKLNREDLLRKQRTFDNGSIPHQIHLGELHAILRRQEDFYPFLKDNREKIEKILTFRIPYYVGPLARGNSRFAWMTRKSEETITPWNFEEVVDKGASAQSFIERMTNFDKNLPNEKVLPKHSLLYEYFTVYNELTKVKYVTEGMRKPAFLSGEQKKAIVDLLFKTNRKVTVKQLKEDYFKKIECFDSVEISGVEDRFNASLGTYHDLLKIIKDKDFLDNEENEDILEDIVLTLTLFEDREMIEERLKTYAHLFDDKVMKQLKRRRYTGWGRLSRKLINGIRDKQSGKTILDFLKSDGFANRNFMQLIHDDSLTFKEDIQKAQVSGQGDSLHEHIANLAGSPAIKKGILQTVKVVDELVKVMGRHKPENIVIEMARENQTTQKGQKNSRERMKRIEEGIKELGSQILKEHPVENTQLQNEKLYLYYLQNGRDMYVDQELDINRLSDYDVDHIVPQSFLKDDSIDNKVLTRSDKARGKSDNVPSEEVVKKMKNYWRQLLNAKLITQRKFDNLTKAERGGLSELDKAGFIKRQLVETRQITKHVAQILDSRMNTKYDENDKLIREVKVITLKSKLVSDFRKDFQFYKVREINNYHHAHDAYLNAVVGTALIKKYPKLESEFVYGDYKVYDVRKMIAKSEQEIGKATAKYFFYSNIMNFFKTEITLANGEIRKRPLIETNGETGEIVWDKGRDFATVRKVLSMPQVNIVKKTEVQTGGFSKESILPKRNSDKLIARKKDWDPKKYGGFDSPTVAYSVLVVAKVEKGKSKKLKSVKELLGITIMERSSFEKNPIDFLEAKGYKEVKKDLIIKLPKYSLFELENGRKRMLASAGELQKGNELALPSKYVNFLYLASHYEKLKGSPEDNEQKQLFVEQHKHYLDEIIEQISEFSKRVILADANLDKVLSAYNKHRDKPIREQAENIIHLFTLTNLGAPAAFKYFDTTIDRKRYTSTKEVLDATLIHQSITGLYETRIDLSQLGGDGGPAPEAAAKGGGGGTLNLEDEYRLYETSAEPEVSPGSTWLSDFPQAWAETGGMGLAVRQAPLIIPLKATSTPVSIKQYPMSQEAKLGIKPHIQRLLDQGILVPCQSPWNTPLLPVKKPGTNDYRPVQDLREVNKRVEDIHPTVPNPYNLLSGLPPSHRWYTVLDLKDAFFCLRLHPTSQPLFAFEWRDPGMGISGQLTWTRLPQGFKNSPTLFNEALHRDLADFRIQHPDLILLQYVDDILLAATSELDCQQGTRALLLTLGNLGYRASAKKAQLCQKQVKYLGYLLKEGQRWLTEARKETVMGQPTPKTPRQLREFLGKAGFCRLFIPGFAEMAAPLYPLTKPGTLFNWGPDQQKAYQEIKQALLTAPALGLPDLTKPFELFVDEKQGYAKGVLTQKLGPWRRPVAYLSKKLDPVAAGWPPCLRMVAAIAVLRKDAGKLTMGQPLVILAPHAVEALVKQPPDRWLSNARMTHYQAMLLDTDRVQFGPVVALNPATLLPLPEEGAPHDCLEILAETHGTRPDLTDQPIPDADHTWYTDGSSFLQEGQRKAGAAVTTETEVIWARALPAGTSAQRAELIALTQALKMAEGKRLNVYTDSRYAFATAHIHGEIYRRRGWLTSEGREIKNKSEILALLKALFLPKRLSIIHCLGHQKGDSAEARGNRLADQAAREAAIKTPPDTSTLLAGKRTADGSEFEKRTADGSEFESPKKKAKVE

SEQ ID NO: 1865 - protein, 2105 aa, synthetic construct
MPAAKRVKLDGGDKKYSIGLDIGTNSVGWAVITDEYKVPSKKFKVLGNTDRHSIKKNLIGALLFDSGETAEATRLKRTARRRYTRRKNRICYLQEIFSNEMAKVDDSFFHRLEESFLVEEDKKHERHPIFGNIVDEVAYHEKYPTIYHLRKKLVDSTDKADLRLIYLALAHMIKFRGHFLIEGDLNPDNSDVDKLFIQLVQTYNQLFEENPINASGVDAKAILSARLSKSRRLENLIAQLPGEKKNGLFGNLIALSLGLTPNFKSNFDLAEDAKLQLSKDTYDDDLDNLLAQIGDQYADLFLAAKNLSDAILLSDILRVNTEITKAPLSASMIKRYDEHHQDLTLLKALVRQQLPEKYKEIFFDQSKNGYAGYIDGGASQEEFYKFIKPILEKMDGTEELLVKLNREDLLRKQRTFDNGSIPHQIHLGELHAILRRQEDFYPFLKDNREKIEKILTFRIPYYVGPLARGNSRFAWMTRKSEETITPWNFEEVVDKGASAQSFIERMTNFDKNLPNEKVLPKHSLLYEYFTVYNELTKVKYVTEGMRKPAFLSGEQKKAIVDLLFKTNRKVTVKQLKEDYFKKIECFDSVEISGVEDRFNASLGTYHDLLKIIKDKDFLDNEENEDILEDIVLTLTLFEDREMIEERLKTYAHLFDDKVMKQLKRRRYTGWGRLSRKLINGIRDKQSGKTILDFLKSDGFANRNFMQLIHDDSLTFKEDIQKAQVSGQGDSLHEHIANLAGSPAIKKGILQTVKVVDELVKVMGRHKPENIVIEMARENQTTQKGQKNSRERMKRIEEGIKELGSQILKEHPVENTQLQNEKLYLYYLQNGRDMYVDQELDINRLSDYDVDHIVPQSFLKDDSIDNKVLTRSDKARGKSDNVPSEEVVKKMKNYWRQLLNAKLITQRKFDNLTKAERGGLSELDKAGFIKRQLVETRQITKHVAQILDSRMNTKYDENDKLIREVKVITLKSKLVSDFRKDFQFYKVREINNYHHAHDAYLNAVVGTALIKKYPKLESEFVYGDYKVYDVRKMIAKSEQEIGKATAKYFFYSNIMNFFKTEITLANGEIRKRPLIETNGETGEIVWDKGRDFATVRKVLSMPQVNIVKKTEVQTGGFSKESILPKRNSDKLIARKKDWDPKKYGGFDSPTVAYSVLVVAKVEKGKSKKLKSVKELLGITIMERSSFEKNPIDFLEAKGYKEVKKDLIIKLPKYSLFELENGRKRMLASAGELQKGNELALPSKYVNFLYLASHYEKLKGSPEDNEQKQLFVEQHKHYLDEIIEQISEFSKRVILADANLDKVLSAYNKHRDKPIREQAENIIHLFTLTNLGAPAAFKYFDTTIDRKRYTSTKEVLDATLIHQSITGLYETRIDLSQLGGDGGEAAAKEAAAKEAAAKEAAAKGGTLNLEDEYRLYETSAEPEVSPGSTWLSDFPQAWAETGGMGLAVRQAPLIIPLKATSTPVSIKQYPMSQEAKLGIKPHIQRLLDQGILVPCQSPWNTPLLPVKKPGTNDYRPVQDLREVNKRVEDIHPTVPNPYNLLSGLPPSHRWYTVLDLKDAFFCLRLHPTSQPLFAFEWRDPGMGISGQLTWTRLPQGFKNSPTLFNEALHRDLADFRIQHPDLILLQYVDDILLAATSELDCQQGTRALLLTLGNLGYRASAKKAQLCQKQVKYLGYLLKEGQRWLTEARKETVMGQPTPKTPRQLREFLGKAGFCRLFIPGFAEMAAPLYPLTKPGTLFNWGPDQQKAYQEIKQALLTAPALGLPDLTKPFELFVDEKQGYAKGVLTQKLGPWRRPVAYLSKKLDPVAAGWPPCLRMVAAIAVLRKDAGKLTMGQPLVILAPHAVEALVKQPPDRWLSNARMTHYQAMLLDTDRVQFGPVVALNPATLLPLPEEGAPHDCLEILAETHGTRPDLTDQPIPDADHTWYTDGSSFLQEGQRKAGAAVTTETEVIWARALPAGTSAQRAELIALTQALKMAEGKRLNVYTDSRYAFATAHIHGEIYRRRGWLTSEGREIKNKSEILALLKALFLPKRLSIIHCLGHQKGDSAEARGNRLADQAAREAAIKTPPDTSTLLAGKRTADGSEFEKRTADGSEFESPKKKAKVE

SEQ ID NO: 1866 - protein, 2096 aa, synthetic construct
MPAAKRVKLDGGDKKYSIGLDIGTNSVGWAVITDEYKVPSKKFKVLGNTDRHSIKKNLIGALLFDSGETAEATRLKRTARRRYTRRKNRICYLQEIFSNEMAKVDDSFFHRLEESFLVEEDKKHERHPIFGNIVDEVAYHEKYPTIYHLRKKLVDSTDKADLRLIYLALAHMIKFRGHFLIEGDLNPDNSDVDKLFIQLVQTYNQLFEENPINASGVDAKAILSARLSKSRRLENLIAQLPGEKKNGLFGNLIALSLGLTPNFKSNFDLAEDAKLQLSKDTYDDDLDNLLAQIGDQYADLFLAAKNLSDAILLSDILRVNTEITKAPLSASMIKRYDEHHQDLTLLKALVRQQLPEKYKEIFFDQSKNGYAGYIDGGASQEEFYKFIKPILEKMDGTEELLVKLNREDLLRKQRTFDNGSIPHQIHLGELHAILRRQEDFYPFLKDNREKIEKILTFRIPYYVGPLARGNSRFAWMTRKSEETITPWNFEEVVDKGASAQSFIERMTNFDKNLPNEKVLPKHSLLYEYFTVYNELTKVKYVTEGMRKPAFLSGEQKKAIVDLLFKTNRKVTVKQLKEDYFKKIECFDSVEISGVEDRFNASLGTYHDLLKIIKDKDFLDNEENEDILEDIVLTLTLFEDREMIEERLKTYAHLFDDKVMKQLKRRRYTGWGRLSRKLINGIRDKQSGKTILDFLKSDGFANRNFMQLIHDDSLTFKEDIQKAQVSGQGDSLHEHIANLAGSPAIKKGILQTVKVVDELVKVMGRHKPENIVIEMARENQTTQKGQKNSRERMKRIEEGIKELGSQILKEHPVENTQLQNEKLYLYYLQNGRDMYVDQELDINRLSDYDVDHIVPQSFLKDDSIDNKVLTRSDKARGKSDNVPSEEVVKKMKNYWRQLLNAKLITQRKFDNLTKAERGGLSELDKAGFIKRQLVETRQITKHVAQILDSRMNTKYDENDKLIREVKVITLKSKLVSDFRKDFQFYKVREINNYHHAHDAYLNAVVGTALIKKYPKLESEFVYGDYKVYDVRKMIAKSEQEIGKATAKYFFYSNIMNFFKTEITLANGEIRKRPLIETNGETGEIVWDKGRDFATVRKVLSMPQVNIVKKTEVQTGGFSKESILPKRNSDKLIARKKDWDPKKYGGFDSPTVAYSVLVVAKVEKGKSKKLKSVKELLGITIMERSSFEKNPIDFLEAKGYKEVKKDLIIKLPKYSLFELENGRKRMLASAGELQKGNELALPSKYVNFLYLASHYEKLKGSPEDNEQKQLFVEQHKHYLDEIIEQISEFSKRVILADANLDKVLSAYNKHRDKPIREQAENIIHLFTLTNLGAPAAFKYFDTTIDRKRYTSTKEVLDATLIHQSITGLYETRIDLSQLGGDGGPAPGGSEAAAKGGTLNLEDEYRLYETSAEPEVSPGSTWLSDFPQAWAETGGMGLAVRQAPLIIPLKATSTPVSIKQYPMSQEAKLGIKPHIQRLLDQGILVPCQSPWNTPLLPVKKPGTNDYRPVQDLREVNKRVEDIHPTVPNPYNLLSGLPPSHRWYTVLDLKDAFFCLRLHPTSQPLFAFEWRDPGMGISGQLTWTRLPQGFKNSPTLFNEALHRDLADFRIQHPDLILLQYVDDILLAATSELDCQQGTRALLLTLGNLGYRASAKKAQLCQKQVKYLGYLLKEGQRWLTEARKETVMGQPTPKTPRQLREFLGKAGFCRLFIPGFAEMAAPLYPLTKPGTLFNWGPDQQKAYQEIKQALLTAPALGLPDLTKPFELFVDEKQGYAKGVLTQKLGPWRRPVAYLSKKLDPVAAGWPPCLRMVAAIAVLRKDAGKLTMGQPLVILAPHAVEALVKQPPDRWLSNARMTHYQAMLLDTDRVQFGPVVALNPATLLPLPEEGAPHDCLEILAETHGTRPDLTDQPIPDADHTWYTDGSSFLQEGQRKAGAAVTTETEVIWARALPAGTSAQRAELIALTQALKMAEGKRLNVYTDSRYAFATAHIHGEIYRRRGWLTSEGREIKNKSEILALLKALFLPKRLSIIHCLGHQKGDSAEARGNRLADQAAREAAIKTPPDTSTLLAGKRTADGSEFEKRTADGSEFESPKKKAKVE

SEQ ID NO: 1867 - protein, 2096 aa, synthetic construct
MPAAKRVKLDGGDKKYSIGLDIGTNSVGWAVITDEYKVPSKKFKVLGNTDRHSIKKNLIGALLFDSGETAEATRLKRTARRRYTRRKNRICYLQEIFSNEMAKVDDSFFHRLEESFLVEEDKKHERHPIFGNIVDEVAYHEKYPTIYHLRKKLVDSTDKADLRLIYLALAHMIKFRGHFLIEGDLNPDNSDVDKLFIQLVQTYNQLFEENPINASGVDAKAILSARLSKSRRLENLIAQLPGEKKNGLFGNLIALSLGLTPNFKSNFDLAEDAKLQLSKDTYDDDLDNLLAQIGDQYADLFLAAKNLSDAILLSDILRVNTEITKAPLSASMIKRYDEHHQDLTLLKALVRQQLPEKYKEIFFDQSKNGYAGYIDGGASQEEFYKFIKPILEKMDGTEELLVKLNREDLLRKQRTFDNGSIPHQIHLGELHAILRRQEDFYPFLKDNREKIEKILTFRIPYYVGPLARGNSRFAWMTRKSEETITPWNFEEVVDKGASAQSFIERMTNFDKNLPNEKVLPKHSLLYEYFTVYNELTKVKYVTEGMRKPAFLSGEQKKAIVDLLFKTNRKVTVKQLKEDYFKKIECFDSVEISGVEDRFNASLGTYHDLLKIIKDKDFLDNEENEDILEDIVLTLTLFEDREMIEERLKTYAHLFDDKVMKQLKRRRYTGWGRLSRKLINGIRDKQSGKTILDFLKSDGFANRNFMQLIHDDSLTFKEDIQKAQVSGQGDSLHEHIANLAGSPAIKKGILQTVKVVDELVKVMGRHKPENIVIEMARENQTTQKGQKNSRERMKRIEEGIKELGSQILKEHPVENTQLQNEKLYLYYLQNGRDMYVDQELDINRLSDYDVDHIVPQSFLKDDSIDNKVLTRSDKARGKSDNVPSEEVVKKMKNYWRQLLNAKLITQRKFDNLTKAERGGLSELDKAGFIKRQLVETRQITKHVAQILDSRMNTKYDENDKLIREVKVITLKSKLVSDFRKDFQFYKVREINNYHHAHDAYLNAVVGTALIKKYPKLESEFVYGDYKVYDVRKMIAKSEQEIGKATAKYFFYSNIMNFFKTEITLANGEIRKRPLIETNGETGEIVWDKGRDFATVRKVLSMPQVNIVKKTEVQTGGFSKESILPKRNSDKLIARKKDWDPKKYGGFDSPTVAYSVLVVAKVEKGKSKKLKSVKELLGITIMERSSFEKNPIDFLEAKGYKEVKKDLIIKLPKYSLFELENGRKRMLASAGELQKGNELALPSKYVNFLYLASHYEKLKGSPEDNEQKQLFVEQHKHYLDEIIEQISEFSKRVILADANLDKVLSAYNKHRDKPIREQAENIIHLFTLTNLGAPAAFKYFDTTIDRKRYTSTKEVLDATLIHQSITGLYETRIDLSQLGGDGGEAAAKGGGPAPGGTLNLEDEYRLYETSAEPEVSPGSTWLSDFPQAWAETGGMGLAVRQAPLIIPLKATSTPVSIKQYPMSQEAKLGIKPHIQRLLDQGILVPCQSPWNTPLLPVKKPGTNDYRPVQDLREVNKRVEDIHPTVPNPYNLLSGLPPSHRWYTVLDLKDAFFCLRLHPTSQPLFAFEWRDPGMGISGQLTWTRLPQGFKNSPTLFNEALHRDLADFRIQHPDLILLQYVDDILLAATSELDCQQGTRALLLTLGNLGYRASAKKAQLCQKQVKYLGYLLKEGQRWLTEARKETVMGQPTPKTPRQLREFLGKAGFCRLFIPGFAEMAAPLYPLTKPGTLFNWGPDQQKAYQEIKQALLTAPALGLPDLTKPFELFVDEKQGYAKGVLTQKLGPWRRPVAYLSKKLDPVAAGWPPCLRMVAAIAVLRKDAGKLTMGQPLVILAPHAVEALVKQPPDRWLSNARMTHYQAMLLDTDRVQFGPVVALNPATLLPLPEEGAPHDCLEILAETHGTRPDLTDQPIPDADHTWYTDGSSFLQEGQRKAGAAVTTETEVIWARALPAGTSAQRAELIALTQALKMAEGKRLNVYTDSRYAFATAHIHGEIYRRRGWLTSEGREIKNKSEILALLKALFLPKRLSIIHCLGHQKGDSAEARGNRLADQAAREAAIKTPPDTSTLLAGKRTADGSEFEKRTADGSEFESPKKKAKVE

SEQ ID NO: 1868 - protein, 2090 aa, synthetic construct
MPAAKRVKLDGGDKKYSIGLDIGTNSVGWAVITDEYKVPSKKFKVLGNTDRHSIKKNLIGALLFDSGETAEATRLKRTARRRYTRRKNRICYLQEIFSNEMAKVDDSFFHRLEESFLVEEDKKHERHPIFGNIVDEVAYHEKYPTIYHLRKKLVDSTDKADLRLIYLALAHMIKFRGHFLIEGDLNPDNSDVDKLFIQLVQTYNQLFEENPINASGVDAKAILSARLSKSRRLENLIAQLPGEKKNGLFGNLIALSLGLTPNFKSNFDLAEDAKLQLSKDTYDDDLDNLLAQIGDQYADLFLAAKNLSDAILLSDILRVNTEITKAPLSASMIKRYDEHHQDLTLLKALVRQQLPEKYKEIFFDQSKNGYAGYIDGGASQEEFYKFIKPILEKMDGTEELLVKLNREDLLRKQRTFDNGSIPHQIHLGELHAILRRQEDFYPFLKDNREKIEKILTFRIPYYVGPLARGNSRFAWMTRKSEETITPWNFEEVVDKGASAQSFIERMTNFDKNLPNEKVLPKHSLLYEYFTVYNELTKVKYVTEGMRKPAFLSGEQKKAIVDLLFKTNRKVTVKQLKEDYFKKIECFDSVEISGVEDRFNASLGTYHDLLKIIKDKDFLDNEENEDILEDIVLTLTLFEDREMIEERLKTYAHLFDDKVMKQLKRRRYTGWGRLSRKLINGIRDKQSGKTILDFLKSDGFANRNFMQLIHDDSLTFKEDIQKAQVSGQGDSLHEHIANLAGSPAIKKGILQTVKVVDELVKVMGRHKPENIVIEMARENQTTQKGQKNSRERMKRIEEGIKELGSQILKEHPVENTQLQNEKLYLYYLQNGRDMYVDQELDINRLSDYDVDHIVPQSFLKDDSIDNKVLTRSDKARGKSDNVPSEEVVKKMKNYWRQLLNAKLITQRKFDNLTKAERGGLSELDKAGFIKRQLVETRQITKHVAQILDSRMNTKYDENDKLIREVKVITLKSKLVSDFRKDFQFYKVREINNYHHAHDAYLNAVVGTALIKKYPKLESEFVYGDYKVYDVRKMIAKSEQEIGKATAKYFFYSNIMNFFKTEITLANGEIRKRPLIETNGETGEIVWDKGRDFATVRKVLSMPQVNIVKKTEVQTGGFSKESILPKRNSDKLIARKKDWDPKKYGGFDSPTVAYSVLVVAKVEKGKSKKLKSVKELLGITIMERSSFEKNPIDFLEAKGYKEVKKDLIIKLPKYSLFELENGRKRMLASAGELQKGNELALPSKYVNFLYLASHYEKLKGSPEDNEQKQLFVEQHKHYLDEIIEQISEFSKRVILADANLDKVLSAYNKHRDKPIREQAENIIHLFTLTNLGAPAAFKYFDTTIDRKRYTSTKEVLDATLIHQSITGLYETRIDLSQLGGDGGEAAAKGGTLNLEDEYRLYETSAEPEVSPGSTWLSDFPQAWAETGGMGLAVRQAPLIIPLKATSTPVSIKQYPMSQEAKLGIKPHIQRLLDQGILVPCQSPWNTPLLPVKKPGTNDYRPVQDLREVNKRVEDIHPTVPNPYNLLSGLPPSHRWYTVLDLKDAFFCLRLHPTSQPLFAFEWRDPGMGISGQLTWTRLPQGFKNSPTLFNEALHRDLADFRIQHPDLILLQYVDDILLAATSELDCQQGTRALLLTLGNLGYRASAKKAQLCQKQVKYLGYLLKEGQRWLTEARKETVMGQPTPKTPRQLREFLGKAGFCRLFIPGFAEMAAPLYPLTKPGTLFNWGPDQQKAYQEIKQALLTAPALGLPDLTKPFELFVDEKQGYAKGVLTQKLGPWRRPVAYLSKKLDPVAAGWPPCLRMVAAIAVLRKDAGKLTMGQPLVILAPHAVEALVKQPPDRWLSNARMTHYQAMLLDTDRVQFGPVVALNPATLLPLPEEGAPHDCLEILAETHGTRPDLTDQPIPDADHTWYTDGSSFLQEGQRKAGAAVTTETEVIWARALPAGTSAQRAELIALTQALKMAEGKRLNVYTDSRYAFATAHIHGEIYRRRGWLTSEGREIKNKSEILALLKALFLPKRLSIIHCLGHQKGDSAEARGNRLADQAAREAAIKTPPDTSTLLAGKRTADGSEFEKRTADGSEFESPKKKAKVE

SEQ ID NO: 1869 - protein, 2096 aa, synthetic construct
MPAAKRVKLDGGDKKYSIGLDIGTNSVGWAVITDEYKVPSKKFKVLGNTDRHSIKKNLIGALLFDSGETAEATRLKRTARRRYTRRKNRICYLQEIFSNEMAKVDDSFFHRLEESFLVEEDKKHERHPIFGNIVDEVAYHEKYPTIYHLRKKLVDSTDKADLRLIYLALAHMIKFRGHFLIEGDLNPDNSDVDKLFIQLVQTYNQLFEENPINASGVDAKAILSARLSKSRRLENLIAQLPGEKKNGLFGNLIALSLGLTPNFKSNFDLAEDAKLQLSKDTYDDDLDNLLAQIGDQYADLFLAAKNLSDAILLSDILRVNTEITKAPLSASMIKRYDEHHQDLTLLKALVRQQLPEKYKEIFFDQSKNGYAGYIDGGASQEEFYKFIKPILEKMDGTEELLVKLNREDLLRKQRTFDNGSIPHQIHLGELHAILRRQEDFYPFLKDNREKIEKILTFRIPYYVGPLARGNSRFAWMTRKSEETITPWNFEEVVDKGASAQSFIERMTNFDKNLPNEKVLPKHSLLYEYFTVYNELTKVKYVTEGMRKPAFLSGEQKKAIVDLLFKTNRKVTVKQLKEDYFKKIECFDSVEISGVEDRFNASLGTYHDLLKIIKDKDFLDNEENEDILEDIVLTLTLFEDREMIEERLKTYAHLFDDKVMKQLKRRRYTGWGRLSRKLINGIRDKQSGKTILDFLKSDGFANRNFMQLIHDDSLTFKEDIQKAQVSGQGDSLHEHIANLAGSPAIKKGILQTVKVVDELVKVMGRHKPENIVIEMARENQTTQKGQKNSRERMKRIEEGIKELGSQILKEHPVENTQLQNEKLYLYYLQNGRDMYVDQELDINRLSDYDVDHIVPQSFLKDDSIDNKVLTRSDKARGKSDNVPSEEVVKKMKNYWRQLLNAKLITQRKFDNLTKAERGGLSELDKAGFIKRQLVETRQITKHVAQILDSRMNTKYDENDKLIREVKVITLKSKLVSDFRKDFQFYKVREINNYHHAHDAYLNAVVGTALIKKYPKLESEFVYGDYKVYDVRKMIAKSEQEIGKATAKYFFYSNIMNFFKTEITLANGEIRKRPLIETNGETGEIVWDKGRDFATVRKVLSMPQVNIVKKTEVQTGGFSKESILPKRNSDKLIARKKDWDPKKYGGFDSPTVAYSVLVVAKVEKGKSKKLKSVKELLGITIMERSSFEKNPIDFLEAKGYKEVKKDLIIKLPKYSLFELENGRKRMLASAGELQKGNELALPSKYVNFLYLASHYEKLKGSPEDNEQKQLFVEQHKHYLDEIIEQISEFSKRVILADANLDKVLSAYNKHRDKPIREQAENIIHLFTLTNLGAPAAFKYFDTTIDRKRYTSTKEVLDATLIHQSITGLYETRIDLSQLGGDGGEAAAKGGGGSSGGTLNLEDEYRLYETSAEPEVSPGSTWLSDFPQAWAETGGMGLAVRQAPLIIPLKATSTPVSIKQYPMSQEAKLGIKPHIQRLLDQGILVPCQSPWNTPLLPVKKPGTNDYRPVQDLREVNKRVEDIHPTVPNPYNLLSGLPPSHRWYTVLDLKDAFFCLRLHPTSQPLFAFEWRDPGMGISGQLTWTRLPQGFKNSPTLFNEALHRDLADFRIQHPDLILLQYVDDILLAATSELDCQQGTRALLLTLGNLGYRASAKKAQLCQKQVKYLGYLLKEGQRWLTEARKETVMGQPTPKTPRQLREFLGKAGFCRLFIPGFAEMAAPLYPLTKPGTLFNWGPDQQKAYQEIKQALLTAPALGLPDLTKPFELFVDEKQGYAKGVLTQKLGPWRRPVAYLSKKLDPVAAGWPPCLRMVAAIAVLRKDAGKLTMGQPLVILAPHAVEALVKQPPDRWLSNARMTHYQAMLLDTDRVQFGPVVALNPATLLPLPEEGAPHDCLEILAETHGTRPDLTDQPIPDADHTWYTDGSSFLQEGQRKAGAAVTTETEVIWARALPAGTSAQRAELIALTQALKMAEGKRLNVYTDSRYAFATAHIHGEIYRRRGWLTSEGREIKNKSEILALLKALFLPKRLSIIHCLGHQKGDSAEARGNRLADQAAREAAIKTPPDTSTLLAGKRTADGSEFEKRTADGSEFESPKKKAKVE

SEQ ID NO: 1870 - protein, 2097 aa, synthetic construct
MPAAKRVKLDGGDKKYSIGLDIGTNSVGWAVITDEYKVPSKKFKVLGNTDRHSIKKNLIGALLFDSGETAEATRLKRTARRRYTRRKNRICYLQEIFSNEMAKVDDSFFHRLEESFLVEEDKKHERHPIFGNIVDEVAYHEKYPTIYHLRKKLVDSTDKADLRLIYLALAHMIKFRGHFLIEGDLNPDNSDVDKLFIQLVQTYNQLFEENPINASGVDAKAILSARLSKSRRLENLIAQLPGEKKNGLFGNLIALSLGLTPNFKSNFDLAEDAKLQLSKDTYDDDLDNLLAQIGDQYADLFLAAKNLSDAILLSDILRVNTEITKAPLSASMIKRYDEHHQDLTLLKALVRQQLPEKYKEIFFDQSKNGYAGYIDGGASQEEFYKFIKPILEKMDGTEELLVKLNREDLLRKQRTFDNGSIPHQIHLGELHAILRRQEDFYPFLKDNREKIEKILTFRIPYYVGPLARGNSRFAWMTRKSEETITPWNFEEVVDKGASAQSFIERMTNFDKNLPNEKVLPKHSLLYEYFTVYNELTKVKYVTEGMRKPAFLSGEQKKAIVDLLFKTNRKVTVKQLKEDYFKKIECFDSVEISGVEDRFNASLGTYHDLLKIIKDKDFLDNEENEDILEDIVLTLTLFEDREMIEERLKTYAHLFDDKVMKQLKRRRYTGWGRLSRKLINGIRDKQSGKTILDFLKSDGFANRNFMQLIHDDSLTFKEDIQKAQVSGQGDSLHEHIANLAGSPAIKKGILQTVKVVDELVKVMGRHKPENIVIEMARENQTTQKGQKNSRERMKRIEEGIKELGSQILKEHPVENTQLQNEKLYLYYLQNGRDMYVDQELDINRLSDYDVDHIVPQSFLKDDSIDNKVLTRSDKARGKSDNVPSEEVVKKMKNYWRQLLNAKLITQRKFDNLTKAERGGLSELDKAGFIKRQLVETRQITKHVAQILDSRMNTKYDENDKLIREVKVITLKSKLVSDFRKDFQFYKVREINNYHHAHDAYLNAVVGTALIKKYPKLESEFVYGDYKVYDVRKMIAKSEQEIGKATAKYFFYSNIMNFFKTEITLANGEIRKRPLIETNGETGEIVWDKGRDFATVRKVLSMPQVNIVKKTEVQTGGFSKESILPKRNSDKLIARKKDWDPKKYGGFDSPTVAYSVLVVAKVEKGKSKKLKSVKELLGITIMERSSFEKNPIDFLEAKGYKEVKKDLIIKLPKYSLFELENGRKRMLASAGELQKGNELALPSKYVNFLYLASHYEKLKGSPEDNEQKQLFVEQHKHYLDEIIEQISEFSKRVILADANLDKVLSAYNKHRDKPIREQAENIIHLFTLTNLGAPAAFKYFDTTIDRKRYTSTKEVLDATLIHQSITGLYETRIDLSQLGGDGGGSAGSAAGSGEFGGTLNLEDEYRLYETSAEPEVSPGSTWLSDFPQAWAETGGMGLAVRQAPLIIPLKATSTPVSIKQYPMSQEAKLGIKPHIQRLLDQGILVPCQSPWNTPLLPVKKPGTNDYRPVQDLREVNKRVEDIHPTVPNPYNLLSGLPPSHRWYTVLDLKDAFFCLRLHPTSQPLFAFEWRDPGMGISGQLTWTRLPQGFKNSPTLFNEALHRDLADFRIQHPDLILLQYVDDILLAATSELDCQQGTRALLLTLGNLGYRASAKKAQLCQKQVKYLGYLLKEGQRWLTEARKETVMGQPTPKTPRQLREFLGKAGFCRLFIPGFAEMAAPLYPLTKPGTLFNWGPDQQKAYQEIKQALLTAPALGLPDLTKPFELFVDEKQGYAKGVLTQKLGPWRRPVAYLSKKLDPVAAGWPPCLRMVAAIAVLRKDAGKLTMGQPLVILAPHAVEALVKQPPDRWLSNARMTHYQAMLLDTDRVQFGPVVALNPATLLPLPEEGAPHDCLEILAETHGTRPDLTDQPIPDADHTWYTDGSSFLQEGQRKAGAAVTTETEVIWARALPAGTSAQRAELIALTQALKMAEGKRLNVYTDSRYAFATAHIHGEIYRRRGWLTSEGREIKNKSEILALLKALFLPKRLSIIHCLGHQKGDSAEARGNRLADQAAREAAIKTPPDTSTLLAGKRTADGSEFEKRTADGSEFESPKKKAKVE

SEQ ID NO: 1871 - protein, 2096 aa, synthetic construct
MPAAKRVKLDGGDKKYSIGLDIGTNSVGWAVITDEYKVPSKKFKVLGNTDRHSIKKNLIGALLFDSGETAEATRLKRTARRRYTRRKNRICYLQEIFSNEMAKVDDSFFHRLEESFLVEEDKKHERHPIFGNIVDEVAYHEKYPTIYHLRKKLVDSTDKADLRLIYLALAHMIKFRGHFLIEGDLNPDNSDVDKLFIQLVQTYNQLFEENPINASGVDAKAILSARLSKSRRLENLIAQLPGEKKNGLFGNLIALSLGLTPNFKSNFDLAEDAKLQLSKDTYDDDLDNLLAQIGDQYADLFLAAKNLSDAILLSDILRVNTEITKAPLSASMIKRYDEHHQDLTLLKALVRQQLPEKYKEIFFDQSKNGYAGYIDGGASQEEFYKFIKPILEKMDGTEELLVKLNREDLLRKQRTFDNGSIPHQIHLGELHAILRRQEDFYPFLKDNREKIEKILTFRIPYYVGPLARGNSRFAWMTRKSEETITPWNFEEVVDKGASAQSFIERMTNFDKNLPNEKVLPKHSLLYEYFTVYNELTKVKYVTEGMRKPAFLSGEQKKAIVDLLFKTNRKVTVKQLKEDYFKKIECFDSVEISGVEDRFNASLGTYHDLLKIIKDKDFLDNEENEDILEDIVLTLTLFEDREMIEERLKTYAHLFDDKVMKQLKRRRYTGWGRLSRKLINGIRDKQSGKTILDFLKSDGFANRNFMQLIHDDSLTFKEDIQKAQVSGQGDSLHEHIANLAGSPAIKKGILQTVKVVDELVKVMGRHKPENIVIEMARENQTTQKGQKNSRERMKRIEEGIKELGSQILKEHPVENTQLQNEKLYLYYLQNGRDMYVDQELDINRLSDYDVDHIVPQSFLKDDSIDNKVLTRSDKARGKSDNVPSEEVVKKMKNYWRQLLNAKLITQRKFDNLTKAERGGLSELDKAGFIKRQLVETRQITKHVAQILDSRMNTKYDENDKLIREVKVITLKSKLVSDFRKDFQFYKVREINNYHHAHDAYLNAVVGTALIKKYPKLESEFVYGDYKVYDVRKMIAKSEQEIGKATAKYFFYSNIMNFFKTEITLANGEIRKRPLIETNGETGEIVWDKGRDFATVRKVLSMPQVNIVKKTEVQTGGFSKESILPKRNSDKLIARKKDWDPKKYGGFDSPTVAYSVLVVAKVEKGKSKKLKSVKELLGITIMERSSFEKNPIDFLEAKGYKEVKKDLIIKLPKYSLFELENGRKRMLASAGELQKGNELALPSKYVNFLYLASHYEKLKGSPEDNEQKQLFVEQHKHYLDEIIEQISEFSKRVILADANLDKVLSAYNKHRDKPIREQAENIIHLFTLTNLGAPAAFKYFDTTIDRKRYTSTKEVLDATLIHQSITGLYETRIDLSQLGGDGGEAAAKPAPGGSGGTLNLEDEYRLYETSAEPEVSPGSTWLSDFPQAWAETGGMGLAVRQAPLIIPLKATSTPVSIKQYPMSQEAKLGIKPHIQRLLDQGILVPCQSPWNTPLLPVKKPGTNDYRPVQDLREVNKRVEDIHPTVPNPYNLLSGLPPSHRWYTVLDLKDAFFCLRLHPTSQPLFAFEWRDPGMGISGQLTWTRLPQGFKNSPTLFNEALHRDLADFRIQHPDLILLQYVDDILLAATSELDCQQGTRALLLTLGNLGYRASAKKAQLCQKQVKYLGYLLKEGQRWLTEARKETVMGQPTPKTPRQLREFLGKAGFCRLFIPGFAEMAAPLYPLTKPGTLFNWGPDQQKAYQEIKQALLTAPALGLPDLTKPFELFVDEKQGYAKGVLTQKLGPWRRPVAYLSKKLDPVAAGWPPCLRMVAAIAVLRKDAGKLTMGQPLVILAPHAVEALVKQPPDRWLSNARMTHYQAMLLDTDRVQFGPVVALNPATLLPLPEEGAPHDCLEILAETHGTRPDLTDQPIPDADHTWYTDGSSFLQEGQRKAGAAVTTETEVIWARALPAGTSAQRAELIALTQALKMAEGKRLNVYTDSRYAFATAHIHGEIYRRRGWLTSEGREIKNKSEILALLKALFLPKRLSIIHCLGHQKGDSAEARGNRLADQAAREAAIKTPPDTSTLLAGKRTADGSEFEKRTADGSEFESPKKKAKVE

SEQ ID NO: 1872 - protein, 2096 aa, synthetic construct
MPAAKRVKLDGGDKKYSIGLDIGTNSVGWAVITDEYKVPSKKFKVLGNTDRHSIKKNLIGALLFDSGETAEATRLKRTARRRYTRRKNRICYLQEIFSNEMAKVDDSFFHRLEESFLVEEDKKHERHPIFGNIVDEVAYHEKYPTIYHLRKKLVDSTDKADLRLIYLALAHMIKFRGHFLIEGDLNPDNSDVDKLFIQLVQTYNQLFEENPINASGVDAKAILSARLSKSRRLENLIAQLPGEKKNGLFGNLIALSLGLTPNFKSNFDLAEDAKLQLSKDTYDDDLDNLLAQIGDQYADLFLAAKNLSDAILLSDILRVNTEITKAPLSASMIKRYDEHHQDLTLLKALVRQQLPEKYKEIFFDQSKNGYAGYIDGGASQEEFYKFIKPILEKMDGTEELLVKLNREDLLRKQRTFDNGSIPHQIHLGELHAILRRQEDFYPFLKDNREKIEKILTFRIPYYVGPLARGNSRFAWMTRKSEETITPWNFEEVVDKGASAQSFIERMTNFDKNLPNEKVLPKHSLLYEYFTVYNELTKVKYVTEGMRKPAFLSGEQKKAIVDLLFKTNRKVTVKQLKEDYFKKIECFDSVEISGVEDRFNASLGTYHDLLKIIKDKDFLDNEENEDILEDIVLTLTLFEDREMIEERLKTYAHLFDDKVMKQLKRRRYTGWGRLSRKLINGIRDKQSGKTILDFLKSDGFANRNFMQLIHDDSLTFKEDIQKAQVSGQGDSLHEHIANLAGSPAIKKGILQTVKVVDELVKVMGRHKPENIVIEMARENQTTQKGQKNSRERMKRIEEGIKELGSQILKEHPVENTQLQNEKLYLYYLQNGRDMYVDQELDINRLSDYDVDHIVPQSFLKDDSIDNKVLTRSDKARGKSDNVPSEEVVKKMKNYWRQLLNAKLITQRKFDNLTKAERGGLSELDKAGFIKRQLVETRQITKHVAQILDSRMNTKYDENDKLIREVKVITLKSKLVSDFRKDFQFYKVREINNYHHAHDAYLNAVVGTALIKKYPKLESEFVYGDYKVYDVRKMIAKSEQEIGKATAKYFFYSNIMNFFKTEITLANGEIRKRPLIETNGETGEIVWDKGRDFATVRKVLSMPQVNIVKKTEVQTGGFSKESILPKRNSDKLIARKKDWDPKKYGGFDSPTVAYSVLVVAKVEKGKSKKLKSVKELLGITIMERSSFEKNPIDFLEAKGYKEVKKDLIIKLPKYSLFELENGRKRMLASAGELQKGNELALPSKYVNFLYLASHYEKLKGSPEDNEQKQLFVEQHKHYLDEIIEQISEFSKRVILADANLDKVLSAYNKHRDKPIREQAENIIHLFTLTNLGAPAAFKYFDTTIDRKRYTSTKEVLDATLIHQSITGLYETRIDLSQLGGDGGEAAAKGSSPAPGGTLNLEDEYRLYETSAEPEVSPGSTWLSDFPQAWAETGGMGLAVRQAPLIIPLKATSTPVSIKQYPMSQEAKLGIKPHIQRLLDQGILVPCQSPWNTPLLPVKKPGTNDYRPVQDLREVNKRVEDIHPTVPNPYNLLSGLPPSHRWYTVLDLKDAFFCLRLHPTSQPLFAFEWRDPGMGISGQLTWTRLPQGFKNSPTLFNEALHRDLADFRIQHPDLILLQYVDDILLAATSELDCQQGTRALLLTLGNLGYRASAKKAQLCQKQVKYLGYLLKEGQRWLTEARKETVMGQPTPKTPRQLREFLGKAGFCRLFIPGFAEMAAPLYPLTKPGTLFNWGPDQQKAYQEIKQALLTAPALGLPDLTKPFELFVDEKQGYAKGVLTQKLGPWRRPVAYLSKKLDPVAAGWPPCLRMVAAIAVLRKDAGKLTMGQPLVILAPHAVEALVKQPPDRWLSNARMTHYQAMLLDTDRVQFGPVVALNPATLLPLPEEGAPHDCLEILAETHGTRPDLTDQPIPDADHTWYTDGSSFLQEGQRKAGAAVTTETEVIWARALPAGTSAQRAELIALTQALKMAEGKRLNVYTDSRYAFATAHIHGEIYRRRGWLTSEGREIKNKSEILALLKALFLPKRLSIIHCLGHQKGDSAEARGNRLADQAAREAAIKTPPDTSTLLAGKRTADGSEFEKRTADGSEFESPKKKAKVE

SEQ ID NO: 1873 - protein, 2091 aa, synthetic construct
MPAAKRVKLDGGDKKYSIGLDIGTNSVGWAVITDEYKVPSKKFKVLGNTDRHSIKKNLIGALLFDSGETAEATRLKRTARRRYTRRKNRICYLQEIFSNEMAKVDDSFFHRLEESFLVEEDKKHERHPIFGNIVDEVAYHEKYPTIYHLRKKLVDSTDKADLRLIYLALAHMIKFRGHFLIEGDLNPDNSDVDKLFIQLVQTYNQLFEENPINASGVDAKAILSARLSKSRRLENLIAQLPGEKKNGLFGNLIALSLGLTPNFKSNFDLAEDAKLQLSKDTYDDDLDNLLAQIGDQYADLFLAAKNLSDAILLSDILRVNTEITKAPLSASMIKRYDEHHQDLTLLKALVRQQLPEKYKEIFFDQSKNGYAGYIDGGASQEEFYKFIKPILEKMDGTEELLVKLNREDLLRKQRTFDNGSIPHQIHLGELHAILRRQEDFYPFLKDNREKIEKILTFRIPYYVGPLARGNSRFAWMTRKSEETITPWNFEEVVDKGASAQSFIERMTNFDKNLPNEKVLPKHSLLYEYFTVYNELTKVKYVTEGMRKPAFLSGEQKKAIVDLLFKTNRKVTVKQLKEDYFKKIECFDSVEISGVEDRFNASLGTYHDLLKIIKDKDFLDNEENEDILEDIVLTLTLFEDREMIEERLKTYAHLFDDKVMKQLKRRRYTGWGRLSRKLINGIRDKQSGKTILDFLKSDGFANRNFMQLIHDDSLTFKEDIQKAQVSGQGDSLHEHIANLAGSPAIKKGILQTVKVVDELVKVMGRHKPENIVIEMARENQTTQKGQKNSRERMKRIEEGIKELGSQILKEHPVENTQLQNEKLYLYYLQNGRDMYVDQELDINRLSDYDVDHIVPQSFLKDDSIDNKVLTRSDKARGKSDNVPSEEVVKKMKNYWRQLLNAKLITQRKFDNLTKAERGGLSELDKAGFIKRQLVETRQITKHVAQILDSRMNTKYDENDKLIREVKVITLKSKLVSDFRKDFQFYKVREINNYHHAHDAYLNAVVGTALIKKYPKLESEFVYGDYKVYDVRKMIAKSEQEIGKATAKYFFYSNIMNFFKTEITLANGEIRKRPLIETNGETGEIVWDKGRDFATVRKVLSMPQVNIVKKTEVQTGGFSKESILPKRNSDKLIARKKDWDPKKYGGFDSPTVAYSVLVVAKVEKGKSKKLKSVKELLGITIMERSSFEKNPIDFLEAKGYKEVKKDLIIKLPKYSLFELENGRKRMLASAGELQKGNELALPSKYVNFLYLASHYEKLKGSPEDNEQKQLFVEQHKHYLDEIIEQISEFSKRVILADANLDKVLSAYNKHRDKPIREQAENIIHLFTLTNLGAPAAFKYFDTTIDRKRYTSTKEVLDATLIHQSITGLYETRIDLSQLGGDGGGGGGGGGGTLNLEDEYRLYETSAEPEVSPGSTWLSDFPQAWAETGGMGLAVRQAPLIIPLKATSTPVSIKQYPMSQEAKLGIKPHIQRLLDQGILVPCQSPWNTPLLPVKKPGTNDYRPVQDLREVNKRVEDIHPTVPNPYNLLSGLPPSHRWYTVLDLKDAFFCLRLHPTSQPLFAFEWRDPGMGISGQLTWTRLPQGFKNSPTLFNEALHRDLADFRIQHPDLILLQYVDDILLAATSELDCQQGTRALLLTLGNLGYRASAKKAQLCQKQVKYLGYLLKEGQRWLTEARKETVMGQPTPKTPRQLREFLGKAGFCRLFIPGFAEMAAPLYPLTKPGTLFNWGPDQQKAYQEIKQALLTAPALGLPDLTKPFELFVDEKQGYAKGVLTQKLGPWRRPVAYLSKKLDPVAAGWPPCLRMVAAIAVLRKDAGKLTMGQPLVILAPHAVEALVKQPPDRWLSNARMTHYQAMLLDTDRVQFGPVVALNPATLLPLPEEGAPHDCLEILAETHGTRPDLTDQPIPDADHTWYTDGSSFLQEGQRKAGAAVTTETEVIWARALPAGTSAQRAELIALTQALKMAEGKRLNVYTDSRYAFATAHIHGEIYRRRGWLTSEGREIKNKSEILALLKALFLPKRLSIIHCLGHQKGDSAEARGNRLADQAAREAAIKTPPDTSTLLAGKRTADGSEFEKRTADGSEFESPKKKAKVE

SEQ ID NO: 1874 - protein, 2094 aa, synthetic construct
MPAAKRVKLDGGDKKYSIGLDIGTNSVGWAVITDEYKVPSKKFKVLGNTDRHSIKKNLIGALLFDSGETAEATRLKRTARRRYTRRKNRICYLQEIFSNEMAKVDDSFFHRLEESFLVEEDKKHERHPIFGNIVDEVAYHEKYPTIYHLRKKLVDSTDKADLRLIYLALAHMIKFRGHFLIEGDLNPDNSDVDKLFIQLVQTYNQLFEENPINASGVDAKAILSARLSKSRRLENLIAQLPGEKKNGLFGNLIALSLGLTPNFKSNFDLAEDAKLQLSKDTYDDDLDNLLAQIGDQYADLFLAAKNLSDAILLSDILRVNTEITKAPLSASMIKRYDEHHQDLTLLKALVRQQLPEKYKEIFFDQSKNGYAGYIDGGASQEEFYKFIKPILEKMDGTEELLVKLNREDLLRKQRTFDNGSIPHQIHLGELHAILRRQEDFYPFLKDNREKIEKILTFRIPYYVGPLARGNSRFAWMTRKSEETITPWNFEEVVDKGASAQSFIERMTNFDKNLPNEKVLPKHSLLYEYFTVYNELTKVKYVTEGMRKPAFLSGEQKKAIVDLLFKTNRKVTVKQLKEDYFKKIECFDSVEISGVEDRFNASLGTYHDLLKIIKDKDFLDNEENEDILEDIVLTLTLFEDREMIEERLKTYAHLFDDKVMKQLKRRRYTGWGRLSRKLINGIRDKQSGKTILDFLKSDGFANRNFMQLIHDDSLTFKEDIQKAQVSGQGDSLHEHIANLAGSPAIKKGILQTVKVVDELVKVMGRHKPENIVIEMARENQTTQKGQKNSRERMKRIEEGIKELGSQILKEHPVENTQLQNEKLYLYYLQNGRDMYVDQELDINRLSDYDVDHIVPQSFLKDDSIDNKVLTRSDKARGKSDNVPSEEVVKKMKNYWRQLLNAKLITQRKFDNLTKAERGGLSELDKAGFIKRQLVETRQITKHVAQILDSRMNTKYDENDKLIREVKVITLKSKLVSDFRKDFQFYKVREINNYHHAHDAYLNAVVGTALIKKYPKLESEFVYGDYKVYDVRKMIAKSEQEIGKATAKYFFYSNIMNFFKTEITLANGEIRKRPLIETNGETGEIVWDKGRDFATVRKVLSMPQVNIVKKTEVQTGGFSKESILPKRNSDKLIARKKDWDPKKYGGFDSPTVAYSVLVVAKVEKGKSKKLKSVKELLGITIMERSSFEKNPIDFLEAKGYKEVKKDLIIKLPKYSLFELENGRKRMLASAGELQKGNELALPSKYVNFLYLASHYEKLKGSPEDNEQKQLFVEQHKHYLDEIIEQISEFSKRVILADANLDKVLSAYNKHRDKPIREQAENIIHLFTLTNLGAPAAFKYFDTTIDRKRYTSTKEVLDATLIHQSITGLYETRIDLSQLGGDGGGSSPAPGGGGGTLNLEDEYRLYETSAEPEVSPGSTWLSDFPQAWAETGGMGLAVRQAPLIIPLKATSTPVSIKQYPMSQEAKLGIKPHIQRLLDQGILVPCQSPWNTPLLPVKKPGTNDYRPVQDLREVNKRVEDIHPTVPNPYNLLSGLPPSHRWYTVLDLKDAFFCLRLHPTSQPLFAFEWRDPGMGISGQLTWTRLPQGFKNSPTLFNEALHRDLADFRIQHPDLILLQYVDDILLAATSELDCQQGTRALLLTLGNLGYRASAKKAQLCQKQVKYLGYLLKEGQRWLTEARKETVMGQPTPKTPRQLREFLGKAGFCRLFIPGFAEMAAPLYPLTKPGTLFNWGPDQQKAYQEIKQALLTAPALGLPDLTKPFELFVDEKQGYAKGVLTQKLGPWRRPVAYLSKKLDPVAAGWPPCLRMVAAIAVLRKDAGKLTMGQPLVILAPHAVEALVKQPPDRWLSNARMTHYQAMLLDTDRVQFGPVVALNPATLLPLPEEGAPHDCLEILAETHGTRPDLTDQPIPDADHTWYTDGSSFLQEGQRKAGAAVTTETEVIWARALPAGTSAQRAELIALTQALKMAEGKRLNVYTDSRYAFATAHIHGEIYRRRGWLTSEGREIKNKSEILALLKALFLPKRLSIIHCLGHQKGDSAEARGNRLADQAAREAAIKTPPDTSTLLAGKRTADGSEFEKRTADGSEFESPKKKAKVE

SEQ ID NO: 1875 - protein, 2096 aa, synthetic construct
MPAAKRVKLDGGDKKYSIGLDIGTNSVGWAVITDEYKVPSKKFKVLGNTDRHSIKKNLIGALLFDSGETAEATRLKRTARRRYTRRKNRICYLQEIFSNEMAKVDDSFFHRLEESFLVEEDKKHERHPIFGNIVDEVAYHEKYPTIYHLRKKLVDSTDKADLRLIYLALAHMIKFRGHFLIEGDLNPDNSDVDKLFIQLVQTYNQLFEENPINASGVDAKAILSARLSKSRRLENLIAQLPGEKKNGLFGNLIALSLGLTPNFKSNFDLAEDAKLQLSKDTYDDDLDNLLAQIGDQYADLFLAAKNLSDAILLSDILRVNTEITKAPLSASMIKRYDEHHQDLTLLKALVRQQLPEKYKEIFFDQSKNGYAGYIDGGASQEEFYKFIKPILEKMDGTEELLVKLNREDLLRKQRTFDNGSIPHQIHLGELHAILRRQEDFYPFLKDNREKIEKILTFRIPYYVGPLARGNSRFAWMTRKSEETITPWNFEEVVDKGASAQSFIERMTNFDKNLPNEKVLPKHSLLYEYFTVYNELTKVKYVTEGMRKPAFLSGEQKKAIVDLLFKTNRKVTVKQLKEDYFKKIECFDSVEISGVEDRFNASLGTYHDLLKIIKDKDFLDNEENEDILEDIVLTLTLFEDREMIEERLKTYAHLFDDKVMKQLKRRRYTGWGRLSRKLINGIRDKQSGKTILDFLKSDGFANRNFMQLIHDDSLTFKEDIQKAQVSGQGDSLHEHIANLAGSPAIKKGILQTVKVVDELVKVMGRHKPENIVIEMARENQTTQKGQKNSRERMKRIEEGIKELGSQILKEHPVENTQLQNEKLYLYYLQNGRDMYVDQELDINRLSDYDVDHIVPQSFLKDDSIDNKVLTRSDKARGKSDNVPSEEVVKKMKNYWRQLLNAKLITQRKFDNLTKAERGGLSELDKAGFIKRQLVETRQITKHVAQILDSRMNTKYDENDKLIREVKVITLKSKLVSDFRKDFQFYKVREINNYHHAHDAYLNAVVGTALIKKYPKLESEFVYGDYKVYDVRKMIAKSEQEIGKATAKYFFYSNIMNFFKTEITLANGEIRKRPLIETNGETGEIVWDKGRDFATVRKVLSMPQVNIVKKTEVQTGGFSKESILPKRNSDKLIARKKDWDPKKYGGFDSPTVAYSVLVVAKVEKGKSKKLKSVKELLGITIMERSSFEKNPIDFLEAKGYKEVKKDLIIKLPKYSLFELENGRKRMLASAGELQKGNELALPSKYVNFLYLASHYEKLKGSPEDNEQKQLFVEQHKHYLDEIIEQISEFSKRVILADANLDKVLSAYNKHRDKPIREQAENIIHLFTLTNLGAPAAFKYFDTTIDRKRYTSTKEVLDATLIHQSITGLYETRIDLSQLGGDGGGSSGGGEAAAKGGTLNLEDEYRLYETSAEPEVSPGSTWLSDFPQAWAETGGMGLAVRQAPLIIPLKATSTPVSIKQYPMSQEAKLGIKPHIQRLLDQGILVPCQSPWNTPLLPVKKPGTNDYRPVQDLREVNKRVEDIHPTVPNPYNLLSGLPPSHRWYTVLDLKDAFFCLRLHPTSQPLFAFEWRDPGMGISGQLTWTRLPQGFKNSPTLFNEALHRDLADFRIQHPDLILLQYVDDILLAATSELDCQQGTRALLLTLGNLGYRASAKKAQLCQKQVKYLGYLLKEGQRWLTEARKETVMGQPTPKTPRQLREFLGKAGFCRLFIPGFAEMAAPLYPLTKPGTLFNWGPDQQKAYQEIKQALLTAPALGLPDLTKPFELFVDEKQGYAKGVLTQKLGPWRRPVAYLSKKLDPVAAGWPPCLRMVAAIAVLRKDAGKLTMGQPLVILAPHAVEALVKQPPDRWLSNARMTHYQAMLLDTDRVQFGPVVALNPATLLPLPEEGAPHDCLEILAETHGTRPDLTDQPIPDADHTWYTDGSSFLQEGQRKAGAAVTTETEVIWARALPAGTSAQRAELIALTQALKMAEGKRLNVYTDSRYAFATAHIHGEIYRRRGWLTSEGREIKNKSEILALLKALFLPKRLSIIHCLGHQKGDSAEARGNRLADQAAREAAIKTPPDTSTLLAGKRTADGSEFEKRTADGSEFESPKKKAKVE

SEQ ID NO: 1876 - protein, 2105 aa, synthetic construct
MPAAKRVKLDGGDKKYSIGLDIGTNSVGWAVITDEYKVPSKKFKVLGNTDRHSIKKNLIGALLFDSGETAEATRLKRTARRRYTRRKNRICYLQEIFSNEMAKVDDSFFHRLEESFLVEEDKKHERHPIFGNIVDEVAYHEKYPTIYHLRKKLVDSTDKADLRLIYLALAHMIKFRGHFLIEGDLNPDNSDVDKLFIQLVQTYNQLFEENPINASGVDAKAILSARLSKSRRLENLIAQLPGEKKNGLFGNLIALSLGLTPNFKSNFDLAEDAKLQLSKDTYDDDLDNLLAQIGDQYADLFLAAKNLSDAILLSDILRVNTEITKAPLSASMIKRYDEHHQDLTLLKALVRQQLPEKYKEIFFDQSKNGYAGYIDGGASQEEFYKFIKPILEKMDGTEELLVKLNREDLLRKQRTFDNGSIPHQIHLGELHAILRRQEDFYPFLKDNREKIEKILTFRIPYYVGPLARGNSRFAWMTRKSEETITPWNFEEVVDKGASAQSFIERMTNFDKNLPNEKVLPKHSLLYEYFTVYNELTKVKYVTEGMRKPAFLSGEQKKAIVDLLFKTNRKVTVKQLKEDYFKKIECFDSVEISGVEDRFNASLGTYHDLLKIIKDKDFLDNEENEDILEDIVLTLTLFEDREMIEERLKTYAHLFDDKVMKQLKRRRYTGWGRLSRKLINGIRDKQSGKTILDFLKSDGFANRNFMQLIHDDSLTFKEDIQKAQVSGQGDSLHEHIANLAGSPAIKKGILQTVKVVDELVKVMGRHKPENIVIEMARENQTTQKGQKNSRERMKRIEEGIKELGSQILKEHPVENTQLQNEKLYLYYLQNGRDMYVDQELDINRLSDYDVDHIVPQSFLKDDSIDNKVLTRSDKARGKSDNVPSEEVVKKMKNYWRQLLNAKLITQRKFDNLTKAERGGLSELDKAGFIKRQLVETRQITKHVAQILDSRMNTKYDENDKLIREVKVITLKSKLVSDFRKDFQFYKVREINNYHHAHDAYLNAVVGTALIKKYPKLESEFVYGDYKVYDVRKMIAKSEQEIGKATAKYFFYSNIMNFFKTEITLANGEIRKRPLIETNGETGEIVWDKGRDFATVRKVLSMPQVNIVKKTEVQTGGFSKESILPKRNSDKLIARKKDWDPKKYGGFDSPTVAYSVLVVAKVEKGKSKKLKSVKELLGITIMERSSFEKNPIDFLEAKGYKEVKKDLIIKLPKYSLFELENGRKRMLASAGELQKGNELALPSKYVNFLYLASHYEKLKGSPEDNEQKQLFVEQHKHYLDEIIEQISEFSKRVILADANLDKVLSAYNKHRDKPIREQAENIIHLFTLTNLGAPAAFKYFDTTIDRKRYTSTKEVLDATLIHQSITGLYETRIDLSQLGGDGGGGGGSGGGGSGGGGSGGGGSGGTLNLEDEYRLYETSAEPEVSPGSTWLSDFPQAWAETGGMGLAVRQAPLIIPLKATSTPVSIKQYPMSQEAKLGIKPHIQRLLDQGILVPCQSPWNTPLLPVKKPGTNDYRPVQDLREVNKRVEDIHPTVPNPYNLLSGLPPSHRWYTVLDLKDAFFCLRLHPTSQPLFAFEWRDPGMGISGQLTWTRLPQGFKNSPTLFNEALHRDLADFRIQHPDLILLQYVDDILLAATSELDCQQGTRALLLTLGNLGYRASAKKAQLCQKQVKYLGYLLKEGQRWLTEARKETVMGQPTPKTPRQLREFLGKAGFCRLFIPGFAEMAAPLYPLTKPGTLFNWGPDQQKAYQEIKQALLTAPALGLPDLTKPFELFVDEKQGYAKGVLTQKLGPWRRPVAYLSKKLDPVAAGWPPCLRMVAAIAVLRKDAGKLTMGQPLVILAPHAVEALVKQPPDRWLSNARMTHYQAMLLDTDRVQFGPVVALNPATLLPLPEEGAPHDCLEILAETHGTRPDLTDQPIPDADHTWYTDGSSFLQEGQRKAGAAVTTETEVIWARALPAGTSAQRAELIALTQALKMAEGKRLNVYTDSRYAFATAHIHGEIYRRRGWLTSEGREIKNKSEILALLKALFLPKRLSIIHCLGHQKGDSAEARGNRLADQAAREAAIKTPPDTSTLLAGKRTADGSEFEKRTADGSEFESPKKKAKVE

SEQ ID NO: 1877 - protein, 2097 aa, synthetic construct
MPAAKRVKLDGGDKKYSIGLDIGTNSVGWAVITDEYKVPSKKFKVLGNTDRHSIKKNLIGALLFDSGETAEATRLKRTARRRYTRRKNRICYLQEIFSNEMAKVDDSFFHRLEESFLVEEDKKHERHPIFGNIVDEVAYHEKYPTIYHLRKKLVDSTDKADLRLIYLALAHMIKFRGHFLIEGDLNPDNSDVDKLFIQLVQTYNQLFEENPINASGVDAKAILSARLSKSRRLENLIAQLPGEKKNGLFGNLIALSLGLTPNFKSNFDLAEDAKLQLSKDTYDDDLDNLLAQIGDQYADLFLAAKNLSDAILLSDILRVNTEITKAPLSASMIKRYDEHHQDLTLLKALVRQQLPEKYKEIFFDQSKNGYAGYIDGGASQEEFYKFIKPILEKMDGTEELLVKLNREDLLRKQRTFDNGSIPHQIHLGELHAILRRQEDFYPFLKDNREKIEKILTFRIPYYVGPLARGNSRFAWMTRKSEETITPWNFEEVVDKGASAQSFIERMTNFDKNLPNEKVLPKHSLLYEYFTVYNELTKVKYVTEGMRKPAFLSGEQKKAIVDLLFKTNRKVTVKQLKEDYFKKIECFDSVEISGVEDRFNASLGTYHDLLKIIKDKDFLDNEENEDILEDIVLTLTLFEDREMIEERLKTYAHLFDDKVMKQLKRRRYTGWGRLSRKLINGIRDKQSGKTILDFLKSDGFANRNFMQLIHDDSLTFKEDIQKAQVSGQGDSLHEHIANLAGSPAIKKGILQTVKVVDELVKVMGRHKPENIVIEMARENQTTQKGQKNSRERMKRIEEGIKELGSQILKEHPVENTQLQNEKLYLYYLQNGRDMYVDQELDINRLSDYDVDHIVPQSFLKDDSIDNKVLTRSDKARGKSDNVPSEEVVKKMKNYWRQLLNAKLITQRKFDNLTKAERGGLSELDKAGFIKRQLVETRQITKHVAQILDSRMNTKYDENDKLIREVKVITLKSKLVSDFRKDFQFYKVREINNYHHAHDAYLNAVVGTALIKKYPKLESEFVYGDYKVYDVRKMIAKSEQEIGKATAKYFFYSNIMNFFKTEITLANGEIRKRPLIETNGETGEIVWDKGRDFATVRKVLSMPQVNIVKKTEVQTGGFSKESILPKRNSDKLIARKKDWDPKKYGGFDSPTVAYSVLVVAKVEKGKSKKLKSVKELLGITIMERSSFEKNPIDFLEAKGYKEVKKDLIIKLPKYSLFELENGRKRMLASAGELQKGNELALPSKYVNFLYLASHYEKLKGSPEDNEQKQLFVEQHKHYLDEIIEQISEFSKRVILADANLDKVLSAYNKHRDKPIREQAENIIHLFTLTNLGAPAAFKYFDTTIDRKRYTSTKEVLDATLIHQSITGLYETRIDLSQLGGDGGGSSGSSGSSGSSGGTLNLEDEYRLYETSAEPEVSPGSTWLSDFPQAWAETGGMGLAVRQAPLIIPLKATSTPVSIKQYPMSQEAKLGIKPHIQRLLDQGILVPCQSPWNTPLLPVKKPGTNDYRPVQDLREVNKRVEDIHPTVPNPYNLLSGLPPSHRWYTVLDLKDAFFCLRLHPTSQPLFAFEWRDPGMGISGQLTWTRLPQGFKNSPTLFNEALHRDLADFRIQHPDLILLQYVDDILLAATSELDCQQGTRALLLTLGNLGYRASAKKAQLCQKQVKYLGYLLKEGQRWLTEARKETVMGQPTPKTPRQLREFLGKAGFCRLFIPGFAEMAAPLYPLTKPGTLFNWGPDQQKAYQEIKQALLTAPALGLPDLTKPFELFVDEKQGYAKGVLTQKLGPWRRPVAYLSKKLDPVAAGWPPCLRMVAAIAVLRKDAGKLTMGQPLVILAPHAVEALVKQPPDRWLSNARMTHYQAMLLDTDRVQFGPVVALNPATLLPLPEEGAPHDCLEILAETHGTRPDLTDQPIPDADHTWYTDGSSFLQEGQRKAGAAVTTETEVIWARALPAGTSAQRAELIALTQALKMAEGKRLNVYTDSRYAFATAHIHGEIYRRRGWLTSEGREIKNKSEILALLKALFLPKRLSIIHCLGHQKGDSAEARGNRLADQAAREAAIKTPPDTSTLLAGKRTADGSEFEKRTADGSEFESPKKKAKVE

SEQ ID NO: 1878 - protein, 2096 aa, synthetic construct
MPAAKRVKLDGGDKKYSIGLDIGTNSVGWAVITDEYKVPSKKFKVLGNTDRHSIKKNLIGALLFDSGETAEATRLKRTARRRYTRRKNRICYLQEIFSNEMAKVDDSFFHRLEESFLVEEDKKHERHPIFGNIVDEVAYHEKYPTIYHLRKKLVDSTDKADLRLIYLALAHMIKFRGHFLIEGDLNPDNSDVDKLFIQLVQTYNQLFEENPINASGVDAKAILSARLSKSRRLENLIAQLPGEKKNGLFGNLIALSLGLTPNFKSNFDLAEDAKLQLSKDTYDDDLDNLLAQIGDQYADLFLAAKNLSDAILLSDILRVNTEITKAPLSASMIKRYDEHHQDLTLLKALVRQQLPEKYKEIFFDQSKNGYAGYIDGGASQEEFYKFIKPILEKMDGTEELLVKLNREDLLRKQRTFDNGSIPHQIHLGELHAILRRQEDFYPFLKDNREKIEKILTFRIPYYVGPLARGNSRFAWMTRKSEETITPWNFEEVVDKGASAQSFIERMTNFDKNLPNEKVLPKHSLLYEYFTVYNELTKVKYVTEGMRKPAFLSGEQKKAIVDLLFKTNRKVTVKQLKEDYFKKIECFDSVEISGVEDRFNASLGTYHDLLKIIKDKDFLDNEENEDILEDIVLTLTLFEDREMIEERLKTYAHLFDDKVMKQLKRRRYTGWGRLSRKLINGIRDKQSGKTILDFLKSDGFANRNFMQLIHDDSLTFKEDIQKAQVSGQGDSLHEHIANLAGSPAIKKGILQTVKVVDELVKVMGRHKPENIVIEMARENQTTQKGQKNSRERMKRIEEGIKELGSQILKEHPVENTQLQNEKLYLYYLQNGRDMYVDQELDINRLSDYDVDHIVPQSFLKDDSIDNKVLTRSDKARGKSDNVPSEEVVKKMKNYWRQLLNAKLITQRKFDNLTKAERGGLSELDKAGFIKRQLVETRQITKHVAQILDSRMNTKYDENDKLIREVKVITLKSKLVSDFRKDFQFYKVREINNYHHAHDAYLNAVVGTALIKKYPKLESEFVYGDYKVYDVRKMIAKSEQEIGKATAKYFFYSNIMNFFKTEITLANGEIRKRPLIETNGETGEIVWDKGRDFATVRKVLSMPQVNIVKKTEVQTGGFSKESILPKRNSDKLIARKKDWDPKKYGGFDSPTVAYSVLVVAKVEKGKSKKLKSVKELLGITIMERSSFEKNPIDFLEAKGYKEVKKDLIIKLPKYSLFELENGRKRMLASAGELQKGNELALPSKYVNFLYLASHYEKLKGSPEDNEQKQLFVEQHKHYLDEIIEQISEFSKRVILADANLDKVLSAYNKHRDKPIREQAENIIHLFTLTNLGAPAAFKYFDTTIDRKRYTSTKEVLDATLIHQSITGLYETRIDLSQLGGDGGGGGEAAAKGSSGGTLNLEDEYRLYETSAEPEVSPGSTWLSDFPQAWAETGGMGLAVRQAPLIIPLKATSTPVSIKQYPMSQEAKLGIKPHIQRLLDQGILVPCQSPWNTPLLPVKKPGTNDYRPVQDLREVNKRVEDIHPTVPNPYNLLSGLPPSHRWYTVLDLKDAFFCLRLHPTSQPLFAFEWRDPGMGISGQLTWTRLPQGFKNSPTLFNEALHRDLADFRIQHPDLILLQYVDDILLAATSELDCQQGTRALLLTLGNLGYRASAKKAQLCQKQVKYLGYLLKEGQRWLTEARKETVMGQPTPKTPRQLREFLGKAGFCRLFIPGFAEMAAPLYPLTKPGTLFNWGPDQQKAYQEIKQALLTAPALGLPDLTKPFELFVDEKQGYAKGVLTQKLGPWRRPVAYLSKKLDPVAAGWPPCLRMVAAIAVLRKDAGKLTMGQPLVILAPHAVEALVKQPPDRWLSNARMTHYQAMLLDTDRVQFGPVVALNPATLLPLPEEGAPHDCLEILAETHGTRPDLTDQPIPDADHTWYTDGSSFLQEGQRKAGAAVTTETEVIWARALPAGTSAQRAELIALTQALKMAEGKRLNVYTDSRYAFATAHIHGEIYRRRGWLTSEGREIKNKSEILALLKALFLPKRLSIIHCLGHQKGDSAEARGNRLADQAAREAAIKTPPDTSTLLAGKRTADGSEFEKRTADGSEFESPKKKAKVE

SEQ ID NO: 1879 - protein, 2100 aa, synthetic construct
MPAAKRVKLDGGDKKYSIGLDIGTNSVGWAVITDEYKVPSKKFKVLGNTDRHSIKKNLIGALLFDSGETAEATRLKRTARRRYTRRKNRICYLQEIFSNEMAKVDDSFFHRLEESFLVEEDKKHERHPIFGNIVDEVAYHEKYPTIYHLRKKLVDSTDKADLRLIYLALAHMIKFRGHFLIEGDLNPDNSDVDKLFIQLVQTYNQLFEENPINASGVDAKAILSARLSKSRRLENLIAQLPGEKKNGLFGNLIALSLGLTPNFKSNFDLAEDAKLQLSKDTYDDDLDNLLAQIGDQYADLFLAAKNLSDAILLSDILRVNTEITKAPLSASMIKRYDEHHQDLTLLKALVRQQLPEKYKEIFFDQSKNGYAGYIDGGASQEEFYKFIKPILEKMDGTEELLVKLNREDLLRKQRTFDNGSIPHQIHLGELHAILRRQEDFYPFLKDNREKIEKILTFRIPYYVGPLARGNSRFAWMTRKSEETITPWNFEEVVDKGASAQSFIERMTNFDKNLPNEKVLPKHSLLYEYFTVYNELTKVKYVTEGMRKPAFLSGEQKKAIVDLLFKTNRKVTVKQLKEDYFKKIECFDSVEISGVEDRFNASLGTYHDLLKIIKDKDFLDNEENEDILEDIVLTLTLFEDREMIEERLKTYAHLFDDKVMKQLKRRRYTGWGRLSRKLINGIRDKQSGKTILDFLKSDGFANRNFMQLIHDDSLTFKEDIQKAQVSGQGDSLHEHIANLAGSPAIKKGILQTVKVVDELVKVMGRHKPENIVIEMARENQTTQKGQKNSRERMKRIEEGIKELGSQILKEHPVENTQLQNEKLYLYYLQNGRDMYVDQELDINRLSDYDVDHIVPQSFLKDDSIDNKVLTRSDKARGKSDNVPSEEVVKKMKNYWRQLLNAKLITQRKFDNLTKAERGGLSELDKAGFIKRQLVETRQITKHVAQILDSRMNTKYDENDKLIREVKVITLKSKLVSDFRKDFQFYKVREINNYHHAHDAYLNAVVGTALIKKYPKLESEFVYGDYKVYDVRKMIAKSEQEIGKATAKYFFYSNIMNFFKTEITLANGEIRKRPLIETNGETGEIVWDKGRDFATVRKVLSMPQVNIVKKTEVQTGGFSKESILPKRNSDKLIARKKDWDPKKYGGFDSPTVAYSVLVVAKVEKGKSKKLKSVKELLGITIMERSSFEKNPIDFLEAKGYKEVKKDLIIKLPKYSLFELENGRKRMLASAGELQKGNELALPSKYVNFLYLASHYEKLKGSPEDNEQKQLFVEQHKHYLDEIIEQISEFSKRVILADANLDKVLSAYNKHRDKPIREQAENIIHLFTLTNLGAPAAFKYFDTTIDRKRYTSTKEVLDATLIHQSITGLYETRIDLSQLGGDGGEAAAKEAAAKEAAAKGGTLNLEDEYRLYETSAEPEVSPGSTWLSDFPQAWAETGGMGLAVRQAPLIIPLKATSTPVSIKQYPMSQEAKLGIKPHIQRLLDQGILVPCQSPWNTPLLPVKKPGTNDYRPVQDLREVNKRVEDIHPTVPNPYNLLSGLPPSHRWYTVLDLKDAFFCLRLHPTSQPLFAFEWRDPGMGISGQLTWTRLPQGFKNSPTLFNEALHRDLADFRIQHPDLILLQYVDDILLAATSELDCQQGTRALLLTLGNLGYRASAKKAQLCQKQVKYLGYLLKEGQRWLTEARKETVMGQPTPKTPRQLREFLGKAGFCRLFIPGFAEMAAPLYPLTKPGTLFNWGPDQQKAYQEIKQALLTAPALGLPDLTKPFELFVDEKQGYAKGVLTQKLGPWRRPVAYLSKKLDPVAAGWPPCLRMVAAIAVLRKDAGKLTMGQPLVILAPHAVEALVKQPPDRWLSNARMTHYQAMLLDTDRVQFGPVVALNPATLLPLPEEGAPHDCLEILAETHGTRPDLTDQPIPDADHTWYTDGSSFLQEGQRKAGAAVTTETEVIWARALPAGTSAQRAELIALTQALKMAEGKRLNVYTDSRYAFATAHIHGEIYRRRGWLTSEGREIKNKSEILALLKALFLPKRLSIIHCLGHQKGDSAEARGNRLADQAAREAAIKTPPDTSTLLAGKRTADGSEFEKRTADGSEFESPKKKAKVE

SEQ ID NO: 1880 - protein, 2103 aa, synthetic construct
MPAAKRVKLDGGDKKYSIGLDIGTNSVGWAVITDEYKVPSKKFKVLGNTDRHSIKKNLIGALLFDSGETAEATRLKRTARRRYTRRKNRICYLQEIFSNEMAKVDDSFFHRLEESFLVEEDKKHERHPIFGNIVDEVAYHEKYPTIYHLRKKLVDSTDKADLRLIYLALAHMIKFRGHFLIEGDLNPDNSDVDKLFIQLVQTYNQLFEENPINASGVDAKAILSARLSKSRRLENLIAQLPGEKKNGLFGNLIALSLGLTPNFKSNFDLAEDAKLQLSKDTYDDDLDNLLAQIGDQYADLFLAAKNLSDAILLSDILRVNTEITKAPLSASMIKRYDEHHQDLTLLKALVRQQLPEKYKEIFFDQSKNGYAGYIDGGASQEEFYKFIKPILEKMDGTEELLVKLNREDLLRKQRTFDNGSIPHQIHLGELHAILRRQEDFYPFLKDNREKIEKILTFRIPYYVGPLARGNSRFAWMTRKSEETITPWNFEEVVDKGASAQSFIERMTNFDKNLPNEKVLPKHSLLYEYFTVYNELTKVKYVTEGMRKPAFLSGEQKKAIVDLLFKTNRKVTVKQLKEDYFKKIECFDSVEISGVEDRFNASLGTYHDLLKIIKDKDFLDNEENEDILEDIVLTLTLFEDREMIEERLKTYAHLFDDKVMKQLKRRRYTGWGRLSRKLINGIRDKQSGKTILDFLKSDGFANRNFMQLIHDDSLTFKEDIQKAQVSGQGDSLHEHIANLAGSPAIKKGILQTVKVVDELVKVMGRHKPENIVIEMARENQTTQKGQKNSRERMKRIEEGIKELGSQILKEHPVENTQLQNEKLYLYYLQNGRDMYVDQELDINRLSDYDVDHIVPQSFLKDDSIDNKVLTRSDKARGKSDNVPSEEVVKKMKNYWRQLLNAKLITQRKFDNLTKAERGGLSELDKAGFIKRQLVETRQITKHVAQILDSRMNTKYDENDKLIREVKVITLKSKLVSDFRKDFQFYKVREINNYHHAHDAYLNAVVGTALIKKYPKLESEFVYGDYKVYDVRKMIAKSEQEIGKATAKYFFYSNIMNFFKTEITLANGEIRKRPLIETNGETGEIVWDKGRDFATVRKVLSMPQVNIVKKTEVQTGGFSKESILPKRNSDKLIARKKDWDPKKYGGFDSPTVAYSVLVVAKVEKGKSKKLKSVKELLGITIMERSSFEKNPIDFLEAKGYKEVKKDLIIKLPKYSLFELENGRKRMLASAGELQKGNELALPSKYVNFLYLASHYEKLKGSPEDNEQKQLFVEQHKHYLDEIIEQISEFSKRVILADANLDKVLSAYNKHRDKPIREQAENIIHLFTLTNLGAPAAFKYFDTTIDRKRYTSTKEVLDATLIHQSITGLYETRIDLSQLGGDGGGGSGGSGGSGGSGGSGGSGGTLNLEDEYRLYETSAEPEVSPGSTWLSDFPQAWAETGGMGLAVRQAPLIIPLKATSTPVSIKQYPMSQEAKLGIKPHIQRLLDQGILVPCQSPWNTPLLPVKKPGTNDYRPVQDLREVNKRVEDIHPTVPNPYNLLSGLPPSHRWYTVLDLKDAFFCLRLHPTSQPLFAFEWRDPGMGISGQLTWTRLPQGFKNSPTLFNEALHRDLADFRIQHPDLILLQYVDDILLAATSELDCQQGTRALLLTLGNLGYRASAKKAQLCQKQVKYLGYLLKEGQRWLTEARKETVMGQPTPKTPRQLREFLGKAGFCRLFIPGFAEMAAPLYPLTKPGTLFNWGPDQQKAYQEIKQALLTAPALGLPDLTKPFELFVDEKQGYAKGVLTQKLGPWRRPVAYLSKKLDPVAAGWPPCLRMVAAIAVLRKDAGKLTMGQPLVILAPHAVEALVKQPPDRWLSNARMTHYQAMLLDTDRVQFGPVVALNPATLLPLPEEGAPHDCLEILAETHGTRPDLTDQPIPDADHTWYTDGSSFLQEGQRKAGAAVTTETEVIWARALPAGTSAQRAELIALTQALKMAEGKRLNVYTDSRYAFATAHIHGEIYRRRGWLTSEGREIKNKSEILALLKALFLPKRLSIIHCLGHQKGDSAEARGNRLADQAAREAAIKTPPDTSTLLAGKRTADGSEFEKRTADGSEFESPKKKAKVE

SEQ ID NO: 1881 - protein, 2094 aa, synthetic construct
MPAAKRVKLDGGDKKYSIGLDIGTNSVGWAVITDEYKVPSKKFKVLGNTDRHSIKKNLIGALLFDSGETAEATRLKRTARRRYTRRKNRICYLQEIFSNEMAKVDDSFFHRLEESFLVEEDKKHERHPIFGNIVDEVAYHEKYPTIYHLRKKLVDSTDKADLRLIYLALAHMIKFRGHFLIEGDLNPDNSDVDKLFIQLVQTYNQLFEENPINASGVDAKAILSARLSKSRRLENLIAQLPGEKKNGLFGNLIALSLGLTPNFKSNFDLAEDAKLQLSKDTYDDDLDNLLAQIGDQYADLFLAAKNLSDAILLSDILRVNTEITKAPLSASMIKRYDEHHQDLTLLKALVRQQLPEKYKEIFFDQSKNGYAGYIDGGASQEEFYKFIKPILEKMDGTEELLVKLNREDLLRKQRTFDNGSIPHQIHLGELHAILRRQEDFYPFLKDNREKIEKILTFRIPYYVGPLARGNSRFAWMTRKSEETITPWNFEEVVDKGASAQSFIERMTNFDKNLPNEKVLPKHSLLYEYFTVYNELTKVKYVTEGMRKPAFLSGEQKKAIVDLLFKTNRKVTVKQLKEDYFKKIECFDSVEISGVEDRFNASLGTYHDLLKIIKDKDFLDNEENEDILEDIVLTLTLFEDREMIEERLKTYAHLFDDKVMKQLKRRRYTGWGRLSRKLINGIRDKQSGKTILDFLKSDGFANRNFMQLIHDDSLTFKEDIQKAQVSGQGDSLHEHIANLAGSPAIKKGILQTVKVVDELVKVMGRHKPENIVIEMARENQTTQKGQKNSRERMKRIEEGIKELGSQILKEHPVENTQLQNEKLYLYYLQNGRDMYVDQELDINRLSDYDVDHIVPQSFLKDDSIDNKVLTRSDKARGKSDNVPSEEVVKKMKNYWRQLLNAKLITQRKFDNLTKAERGGLSELDKAGFIKRQLVETRQITKHVAQILDSRMNTKYDENDKLIREVKVITLKSKLVSDFRKDFQFYKVREINNYHHAHDAYLNAVVGTALIKKYPKLESEFVYGDYKVYDVRKMIAKSEQEIGKATAKYFFYSNIMNFFKTEITLANGEIRKRPLIETNGETGEIVWDKGRDFATVRKVLSMPQVNIVKKTEVQTGGFSKESILPKRNSDKLIARKKDWDPKKYGGFDSPTVAYSVLVVAKVEKGKSKKLKSVKELLGITIMERSSFEKNPIDFLEAKGYKEVKKDLIIKLPKYSLFELENGRKRMLASAGELQKGNELALPSKYVNFLYLASHYEKLKGSPEDNEQKQLFVEQHKHYLDEIIEQISEFSKRVILADANLDKVLSAYNKHRDKPIREQAENIIHLFTLTNLGAPAAFKYFDTTIDRKRYTSTKEVLDATLIHQSITGLYETRIDLSQLGGDGGPAPAPAPAPGGTLNLEDEYRLYETSAEPEVSPGSTWLSDFPQAWAETGGMGLAVRQAPLIIPLKATSTPVSIKQYPMSQEAKLGIKPHIQRLLDQGILVPCQSPWNTPLLPVKKPGTNDYRPVQDLREVNKRVEDIHPTVPNPYNLLSGLPPSHRWYTVLDLKDAFFCLRLHPTSQPLFAFEWRDPGMGISGQLTWTRLPQGFKNSPTLFNEALHRDLADFRIQHPDLILLQYVDDILLAATSELDCQQGTRALLLTLGNLGYRASAKKAQLCQKQVKYLGYLLKEGQRWLTEARKETVMGQPTPKTPRQLREFLGKAGFCRLFIPGFAEMAAPLYPLTKPGTLFNWGPDQQKAYQEIKQALLTAPALGLPDLTKPFELFVDEKQGYAKGVLTQKLGPWRRPVAYLSKKLDPVAAGWPPCLRMVAAIAVLRKDAGKLTMGQPLVILAPHAVEALVKQPPDRWLSNARMTHYQAMLLDTDRVQFGPVVALNPATLLPLPEEGAPHDCLEILAETHGTRPDLTDQPIPDADHTWYTDGSSFLQEGQRKAGAAVTTETEVIWARALPAGTSAQRAELIALTQALKMAEGKRLNVYTDSRYAFATAHIHGEIYRRRGWLTSEGREIKNKSEILALLKALFLPKRLSIIHCLGHQKGDSAEARGNRLADQAAREAAIKTPPDTSTLLAGKRTADGSEFEKRTADGSEFESPKKKAKVE

SEQ ID NO: 1882 - protein, 2093 aa, synthetic construct
MPAAKRVKLDGGDKKYSIGLDIGTNSVGWAVITDEYKVPSKKFKVLGNTDRHSIKKNLIGALLFDSGETAEATRLKRTARRRYTRRKNRICYLQEIFSNEMAKVDDSFFHRLEESFLVEEDKKHERHPIFGNIVDEVAYHEKYPTIYHLRKKLVDSTDKADLRLIYLALAHMIKFRGHFLIEGDLNPDNSDVDKLFIQLVQTYNQLFEENPINASGVDAKAILSARLSKSRRLENLIAQLPGEKKNGLFGNLIALSLGLTPNFKSNFDLAEDAKLQLSKDTYDDDLDNLLAQIGDQYADLFLAAKNLSDAILLSDILRVNTEITKAPLSASMIKRYDEHHQDLTLLKALVRQQLPEKYKEIFFDQSKNGYAGYIDGGASQEEFYKFIKPILEKMDGTEELLVKLNREDLLRKQRTFDNGSIPHQIHLGELHAILRRQEDFYPFLKDNREKIEKILTFRIPYYVGPLARGNSRFAWMTRKSEETITPWNFEEVVDKGASAQSFIERMTNFDKNLPNEKVLPKHSLLYEYFTVYNELTKVKYVTEGMRKPAFLSGEQKKAIVDLLFKTNRKVTVKQLKEDYFKKIECFDSVEISGVEDRFNASLGTYHDLLKIIKDKDFLDNEENEDILEDIVLTLTLFEDREMIEERLKTYAHLFDDKVMKQLKRRRYTGWGRLSRKLINGIRDKQSGKTILDFLKSDGFANRNFMQLIHDDSLTFKEDIQKAQVSGQGDSLHEHIANLAGSPAIKKGILQTVKVVDELVKVMGRHKPENIVIEMARENQTTQKGQKNSRERMKRIEEGIKELGSQILKEHPVENTQLQNEKLYLYYLQNGRDMYVDQELDINRLSDYDVDHIVPQSFLKDDSIDNKVLTRSDKARGKSDNVPSEEVVKKMKNYWRQLLNAKLITQRKFDNLTKAERGGLSELDKAGFIKRQLVETRQITKHVAQILDSRMNTKYDENDKLIREVKVITLKSKLVSDFRKDFQFYKVREINNYHHAHDAYLNAVVGTALIKKYPKLESEFVYGDYKVYDVRKMIAKSEQEIGKATAKYFFYSNIMNFFKTEITLANGEIRKRPLIETNGETGEIVWDKGRDFATVRKVLSMPQVNIVKKTEVQTGGFSKESILPKRNSDKLIARKKDWDPKKYGGFDSPTVAYSVLVVAKVEKGKSKKLKSVKELLGITIMERSSFEKNPIDFLEAKGYKEVKKDLIIKLPKYSLFELENGRKRMLASAGELQKGNELALPSKYVNFLYLASHYEKLKGSPEDNEQKQLFVEQHKHYLDEIIEQISEFSKRVILADANLDKVLSAYNKHRDKPIREQAENIIHLFTLTNLGAPAAFKYFDTTIDRKRYTSTKEVLDATLIHQSITGLYETRIDLSQLGGDGGEAAAKGGSGGTLNLEDEYRLYETSAEPEVSPGSTWLSDFPQAWAETGGMGLAVRQAPLIIPLKATSTPVSIKQYPMSQEAKLGIKPHIQRLLDQGILVPCQSPWNTPLLPVKKPGTNDYRPVQDLREVNKRVEDIHPTVPNPYNLLSGLPPSHRWYTVLDLKDAFFCLRLHPTSQPLFAFEWRDPGMGISGQLTWTRLPQGFKNSPTLFNEALHRDLADFRIQHPDLILLQYVDDILLAATSELDCQQGTRALLLTLGNLGYRASAKKAQLCQKQVKYLGYLLKEGQRWLTEARKETVMGQPTPKTPRQLREFLGKAGFCRLFIPGFAEMAAPLYPLTKPGTLFNWGPDQQKAYQEIKQALLTAPALGLPDLTKPFELFVDEKQGYAKGVLTQKLGPWRRPVAYLSKKLDPVAAGWPPCLRMVAAIAVLRKDAGKLTMGQPLVILAPHAVEALVKQPPDRWLSNARMTHYQAMLLDTDRVQFGPVVALNPATLLPLPEEGAPHDCLEILAETHGTRPDLTDQPIPDADHTWYTDGSSFLQEGQRKAGAAVTTETEVIWARALPAGTSAQRAELIALTQALKMAEGKRLNVYTDSRYAFATAHIHGEIYRRRGWLTSEGREIKNKSEILALLKALFLPKRLSIIHCLGHQKGDSAEARGNRLADQAAREAAIKTPPDTSTLLAGKRTADGSEFEKRTADGSEFESPKKKAKVE

SEQ ID NO: 1883 - protein, 2094 aa, synthetic construct
MPAAKRVKLDGGDKKYSIGLDIGTNSVGWAVITDEYKVPSKKFKVLGNTDRHSIKKNLIGALLFDSGETAEATRLKRTARRRYTRRKNRICYLQEIFSNEMAKVDDSFFHRLEESFLVEEDKKHERHPIFGNIVDEVAYHEKYPTIYHLRKKLVDSTDKADLRLIYLALAHMIKFRGHFLIEGDLNPDNSDVDKLFIQLVQTYNQLFEENPINASGVDAKAILSARLSKSRRLENLIAQLPGEKKNGLFGNLIALSLGLTPNFKSNFDLAEDAKLQLSKDTYDDDLDNLLAQIGDQYADLFLAAKNLSDAILLSDILRVNTEITKAPLSASMIKRYDEHHQDLTLLKALVRQQLPEKYKEIFFDQSKNGYAGYIDGGASQEEFYKFIKPILEKMDGTEELLVKLNREDLLRKQRTFDNGSIPHQIHLGELHAILRRQEDFYPFLKDNREKIEKILTFRIPYYVGPLARGNSRFAWMTRKSEETITPWNFEEVVDKGASAQSFIERMTNFDKNLPNEKVLPKHSLLYEYFTVYNELTKVKYVTEGMRKPAFLSGEQKKAIVDLLFKTNRKVTVKQLKEDYFKKIECFDSVEISGVEDRFNASLGTYHDLLKIIKDKDFLDNEENEDILEDIVLTLTLFEDREMIEERLKTYAHLFDDKVMKQLKRRRYTGWGRLSRKLINGIRDKQSGKTILDFLKSDGFANRNFMQLIHDDSLTFKEDIQKAQVSGQGDSLHEHIANLAGSPAIKKGILQTVKVVDELVKVMGRHKPENIVIEMARENQTTQKGQKNSRERMKRIEEGIKELGSQILKEHPVENTQLQNEKLYLYYLQNGRDMYVDQELDINRLSDYDVDHIVPQSFLKDDSIDNKVLTRSDKARGKSDNVPSEEVVKKMKNYWRQLLNAKLITQRKFDNLTKAERGGLSELDKAGFIKRQLVETRQITKHVAQILDSRMNTKYDENDKLIREVKVITLKSKLVSDFRKDFQFYKVREINNYHHAHDAYLNAVVGTALIKKYPKLESEFVYGDYKVYDVRKMIAKSEQEIGKATAKYFFYSNIMNFFKTEITLANGEIRKRPLIETNGETGEIVWDKGRDFATVRKVLSMPQVNIVKKTEVQTGGFSKESILPKRNSDKLIARKKDWDPKKYGGFDSPTVAYSVLVVAKVEKGKSKKLKSVKELLGITIMERSSFEKNPIDFLEAKGYKEVKKDLIIKLPKYSLFELENGRKRMLASAGELQKGNELALPSKYVNFLYLASHYEKLKGSPEDNEQKQLFVEQHKHYLDEIIEQISEFSKRVILADANLDKVLSAYNKHRDKPIREQAENIIHLFTLTNLGAPAAFKYFDTTIDRKRYTSTKEVLDATLIHQSITGLYETRIDLSQLGGDGGPAPGSSGGSGGTLNLEDEYRLYETSAEPEVSPGSTWLSDFPQAWAETGGMGLAVRQAPLIIPLKATSTPVSIKQYPMSQEAKLGIKPHIQRLLDQGILVPCQSPWNTPLLPVKKPGTNDYRPVQDLREVNKRVEDIHPTVPNPYNLLSGLPPSHRWYTVLDLKDAFFCLRLHPTSQPLFAFEWRDPGMGISGQLTWTRLPQGFKNSPTLFNEALHRDLADFRIQHPDLILLQYVDDILLAATSELDCQQGTRALLLTLGNLGYRASAKKAQLCQKQVKYLGYLLKEGQRWLTEARKETVMGQPTPKTPRQLREFLGKAGFCRLFIPGFAEMAAPLYPLTKPGTLFNWGPDQQKAYQEIKQALLTAPALGLPDLTKPFELFVDEKQGYAKGVLTQKLGPWRRPVAYLSKKLDPVAAGWPPCLRMVAAIAVLRKDAGKLTMGQPLVILAPHAVEALVKQPPDRWLSNARMTHYQAMLLDTDRVQFGPVVALNPATLLPLPEEGAPHDCLEILAETHGTRPDLTDQPIPDADHTWYTDGSSFLQEGQRKAGAAVTTETEVIWARALPAGTSAQRAELIALTQALKMAEGKRLNVYTDSRYAFATAHIHGEIYRRRGWLTSEGREIKNKSEILALLKALFLPKRLSIIHCLGHQKGDSAEARGNRLADQAAREAAIKTPPDTSTLLAGKRTADGSEFEKRTADGSEFESPKKKAKVE

SEQ ID NO: 1884 - protein, 2094 aa, synthetic construct
MPAAKRVKLDGGDKKYSIGLDIGTNSVGWAVITDEYKVPSKKFKVLGNTDRHSIKKNLIGALLFDSGETAEATRLKRTARRRYTRRKNRICYLQEIFSNEMAKVDDSFFHRLEESFLVEEDKKHERHPIFGNIVDEVAYHEKYPTIYHLRKKLVDSTDKADLRLIYLALAHMIKFRGHFLIEGDLNPDNSDVDKLFIQLVQTYNQLFEENPINASGVDAKAILSARLSKSRRLENLIAQLPGEKKNGLFGNLIALSLGLTPNFKSNFDLAEDAKLQLSKDTYDDDLDNLLAQIGDQYADLFLAAKNLSDAILLSDILRVNTEITKAPLSASMIKRYDEHHQDLTLLKALVRQQLPEKYKEIFFDQSKNGYAGYIDGGASQEEFYKFIKPILEKMDGTEELLVKLNREDLLRKQRTFDNGSIPHQIHLGELHAILRRQEDFYPFLKDNREKIEKILTFRIPYYVGPLARGNSRFAWMTRKSEETITPWNFEEVVDKGASAQSFIERMTNFDKNLPNEKVLPKHSLLYEYFTVYNELTKVKYVTEGMRKPAFLSGEQKKAIVDLLFKTNRKVTVKQLKEDYFKKIECFDSVEISGVEDRFNASLGTYHDLLKIIKDKDFLDNEENEDILEDIVLTLTLFEDREMIEERLKTYAHLFDDKVMKQLKRRRYTGWGRLSRKLINGIRDKQSGKTILDFLKSDGFANRNFMQLIHDDSLTFKEDIQKAQVSGQGDSLHEHIANLAGSPAIKKGILQTVKVVDELVKVMGRHKPENIVIEMARENQTTQKGQKNSRERMKRIEEGIKELGSQILKEHPVENTQLQNEKLYLYYLQNGRDMYVDQELDINRLSDYDVDHIVPQSFLKDDSIDNKVLTRSDKARGKSDNVPSEEVVKKMKNYWRQLLNAKLITQRKFDNLTKAERGGLSELDKAGFIKRQLVETRQITKHVAQILDSRMNTKYDENDKLIREVKVITLKSKLVSDFRKDFQFYKVREINNYHHAHDAYLNAVVGTALIKKYPKLESEFVYGDYKVYDVRKMIAKSEQEIGKATAKYFFYSNIMNFFKTEITLANGEIRKRPLIETNGETGEIVWDKGRDFATVRKVLSMPQVNIVKKTEVQTGGFSKESILPKRNSDKLIARKKDWDPKKYGGFDSPTVAYSVLVVAKVEKGKSKKLKSVKELLGITIMERSSFEKNPIDFLEAKGYKEVKKDLIIKLPKYSLFELENGRKRMLASAGELQKGNELALPSKYVNFLYLASHYEKLKGSPEDNEQKQLFVEQHKHYLDEIIEQISEFSKRVILADANLDKVLSAYNKHRDKPIREQAENIIHLFTLTNLGAPAAFKYFDTTIDRKRYTSTKEVLDATLIHQSITGLYETRIDLSQLGGDGGGGGGSSGGSGGTLNLEDEYRLYETSAEPEVSPGSTWLSDFPQAWAETGGMGLAVRQAPLIIPLKATSTPVSIKQYPMSQEAKLGIKPHIQRLLDQGILVPCQSPWNTPLLPVKKPGTNDYRPVQDLREVNKRVEDIHPTVPNPYNLLSGLPPSHRWYTVLDLKDAFFCLRLHPTSQPLFAFEWRDPGMGISGQLTWTRLPQGFKNSPTLFNEALHRDLADFRIQHPDLILLQYVDDILLAATSELDCQQGTRALLLTLGNLGYRASAKKAQLCQKQVKYLGYLLKEGQRWLTEARKETVMGQPTPKTPRQLREFLGKAGFCRLFIPGFAEMAAPLYPLTKPGTLFNWGPDQQKAYQEIKQALLTAPALGLPDLTKPFELFVDEKQGYAKGVLTQKLGPWRRPVAYLSKKLDPVAAGWPPCLRMVAAIAVLRKDAGKLTMGQPLVILAPHAVEALVKQPPDRWLSNARMTHYQAMLLDTDRVQFGPVVALNPATLLPLPEEGAPHDCLEILAETHGTRPDLTDQPIPDADHTWYTDGSSFLQEGQRKAGAAVTTETEVIWARALPAGTSAQRAELIALTQALKMAEGKRLNVYTDSRYAFATAHIHGEIYRRRGWLTSEGREIKNKSEILALLKALFLPKRLSIIHCLGHQKGDSAEARGNRLADQAAREAAIKTPPDTSTLLAGKRTADGSEFEKRTADGSEFESPKKKAKVE

SEQ ID NO: 1885 - protein, 2090 aa, synthetic construct
MPAAKRVKLDGGDKKYSIGLDIGTNSVGWAVITDEYKVPSKKFKVLGNTDRHSIKKNLIGALLFDSGETAEATRLKRTARRRYTRRKNRICYLQEIFSNEMAKVDDSFFHRLEESFLVEEDKKHERHPIFGNIVDEVAYHEKYPTIYHLRKKLVDSTDKADLRLIYLALAHMIKFRGHFLIEGDLNPDNSDVDKLFIQLVQTYNQLFEENPINASGVDAKAILSARLSKSRRLENLIAQLPGEKKNGLFGNLIALSLGLTPNFKSNFDLAEDAKLQLSKDTYDDDLDNLLAQIGDQYADLFLAAKNLSDAILLSDILRVNTEITKAPLSASMIKRYDEHHQDLTLLKALVRQQLPEKYKEIFFDQSKNGYAGYIDGGASQEEFYKFIKPILEKMDGTEELLVKLNREDLLRKQRTFDNGSIPHQIHLGELHAILRRQEDFYPFLKDNREKIEKILTFRIPYYVGPLARGNSRFAWMTRKSEETITPWNFEEVVDKGASAQSFIERMTNFDKNLPNEKVLPKHSLLYEYFTVYNELTKVKYVTEGMRKPAFLSGEQKKAIVDLLFKTNRKVTVKQLKEDYFKKIECFDSVEISGVEDRFNASLGTYHDLLKIIKDKDFLDNEENEDILEDIVLTLTLFEDREMIEERLKTYAHLFDDKVMKQLKRRRYTGWGRLSRKLINGIRDKQSGKTILDFLKSDGFANRNFMQLIHDDSLTFKEDIQKAQVSGQGDSLHEHIANLAGSPAIKKGILQTVKVVDELVKVMGRHKPENIVIEMARENQTTQKGQKNSRERMKRIEEGIKELGSQILKEHPVENTQLQNEKLYLYYLQNGRDMYVDQELDINRLSDYDVDHIVPQSFLKDDSIDNKVLTRSDKARGKSDNVPSEEVVKKMKNYWRQLLNAKLITQRKFDNLTKAERGGLSELDKAGFIKRQLVETRQITKHVAQILDSRMNTKYDENDKLIREVKVITLKSKLVSDFRKDFQFYKVREINNYHHAHDAYLNAVVGTALIKKYPKLESEFVYGDYKVYDVRKMIAKSEQEIGKATAKYFFYSNIMNFFKTEITLANGEIRKRPLIETNGETGEIVWDKGRDFATVRKVLSMPQVNIVKKTEVQTGGFSKESILPKRNSDKLIARKKDWDPKKYGGFDSPTVAYSVLVVAKVEKGKSKKLKSVKELLGITIMERSSFEKNPIDFLEAKGYKEVKKDLIIKLPKYSLFELENGRKRMLASAGELQKGNELALPSKYVNFLYLASHYEKLKGSPEDNEQKQLFVEQHKHYLDEIIEQISEFSKRVILADANLDKVLSAYNKHRDKPIREQAENIIHLFTLTNLGAPAAFKYFDTTIDRKRYTSTKEVLDATLIHQSITGLYETRIDLSQLGGDGGGGGGSGGTLNLEDEYRLYETSAEPEVSPGSTWLSDFPQAWAETGGMGLAVRQAPLIIPLKATSTPVSIKQYPMSQEAKLGIKPHIQRLLDQGILVPCQSPWNTPLLPVKKPGTNDYRPVQDLREVNKRVEDIHPTVPNPYNLLSGLPPSHRWYTVLDLKDAFFCLRLHPTSQPLFAFEWRDPGMGISGQLTWTRLPQGFKNSPTLFNEALHRDLADFRIQHPDLILLQYVDDILLAATSELDCQQGTRALLLTLGNLGYRASAKKAQLCQKQVKYLGYLLKEGQRWLTEARKETVMGQPTPKTPRQLREFLGKAGFCRLFIPGFAEMAAPLYPLTKPGTLFNWGPDQQKAYQEIKQALLTAPALGLPDLTKPFELFVDEKQGYAKGVLTQKLGPWRRPVAYLSKKLDPVAAGWPPCLRMVAAIAVLRKDAGKLTMGQPLVILAPHAVEALVKQPPDRWLSNARMTHYQAMLLDTDRVQFGPVVALNPATLLPLPEEGAPHDCLEILAETHGTRPDLTDQPIPDADHTWYTDGSSFLQEGQRKAGAAVTTETEVIWARALPAGTSAQRAELIALTQALKMAEGKRLNVYTDSRYAFATAHIHGEIYRRRGWLTSEGREIKNKSEILALLKALFLPKRLSIIHCLGHQKGDSAEARGNRLADQAAREAAIKTPPDTSTLLAGKRTADGSEFEKRTADGSEFESPKKKAKVE

SEQ ID NO: 1886 - protein, 2096 aa, synthetic construct
MPAAKRVKLDGGDKKYSIGLDIGTNSVGWAVITDEYKVPSKKFKVLGNTDRHSIKKNLIGALLFDSGETAEATRLKRTARRRYTRRKNRICYLQEIFSNEMAKVDDSFFHRLEESFLVEEDKKHERHPIFGNIVDEVAYHEKYPTIYHLRKKLVDSTDKADLRLIYLALAHMIKFRGHFLIEGDLNPDNSDVDKLFIQLVQTYNQLFEENPINASGVDAKAILSARLSKSRRLENLIAQLPGEKKNGLFGNLIALSLGLTPNFKSNFDLAEDAKLQLSKDTYDDDLDNLLAQIGDQYADLFLAAKNLSDAILLSDILRVNTEITKAPLSASMIKRYDEHHQDLTLLKALVRQQLPEKYKEIFFDQSKNGYAGYIDGGASQEEFYKFIKPILEKMDGTEELLVKLNREDLLRKQRTFDNGSIPHQIHLGELHAILRRQEDFYPFLKDNREKIEKILTFRIPYYVGPLARGNSRFAWMTRKSEETITPWNFEEVVDKGASAQSFIERMTNFDKNLPNEKVLPKHSLLYEYFTVYNELTKVKYVTEGMRKPAFLSGEQKKAIVDLLFKTNRKVTVKQLKEDYFKKIECFDSVEISGVEDRFNASLGTYHDLLKIIKDKDFLDNEENEDILEDIVLTLTLFEDREMIEERLKTYAHLFDDKVMKQLKRRRYTGWGRLSRKLINGIRDKQSGKTILDFLKSDGFANRNFMQLIHDDSLTFKEDIQKAQVSGQGDSLHEHIANLAGSPAIKKGILQTVKVVDELVKVMGRHKPENIVIEMARENQTTQKGQKNSRERMKRIEEGIKELGSQILKEHPVENTQLQNEKLYLYYLQNGRDMYVDQELDINRLSDYDVDHIVPQSFLKDDSIDNKVLTRSDKARGKSDNVPSEEVVKKMKNYWRQLLNAKLITQRKFDNLTKAERGGLSELDKAGFIKRQLVETRQITKHVAQILDSRMNTKYDENDKLIREVKVITLKSKLVSDFRKDFQFYKVREINNYHHAHDAYLNAVVGTALIKKYPKLESEFVYGDYKVYDVRKMIAKSEQEIGKATAKYFFYSNIMNFFKTEITLANGEIRKRPLIETNGETGEIVWDKGRDFATVRKVLSMPQVNIVKKTEVQTGGFSKESILPKRNSDKLIARKKDWDPKKYGGFDSPTVAYSVLVVAKVEKGKSKKLKSVKELLGITIMERSSFEKNPIDFLEAKGYKEVKKDLIIKLPKYSLFELENGRKRMLASAGELQKGNELALPSKYVNFLYLASHYEKLKGSPEDNEQKQLFVEQHKHYLDEIIEQISEFSKRVILADANLDKVLSAYNKHRDKPIREQAENIIHLFTLTNLGAPAAFKYFDTTIDRKRYTSTKEVLDATLIHQSITGLYETRIDLSQLGGDGGGGGEAAAKPAPGGTLNLEDEYRLYETSAEPEVSPGSTWLSDFPQAWAETGGMGLAVRQAPLIIPLKATSTPVSIKQYPMSQEAKLGIKPHIQRLLDQGILVPCQSPWNTPLLPVKKPGTNDYRPVQDLREVNKRVEDIHPTVPNPYNLLSGLPPSHRWYTVLDLKDAFFCLRLHPTSQPLFAFEWRDPGMGISGQLTWTRLPQGFKNSPTLFNEALHRDLADFRIQHPDLILLQYVDDILLAATSELDCQQGTRALLLTLGNLGYRASAKKAQLCQKQVKYLGYLLKEGQRWLTEARKETVMGQPTPKTPRQLREFLGKAGFCRLFIPGFAEMAAPLYPLTKPGTLFNWGPDQQKAYQEIKQALLTAPALGLPDLTKPFELFVDEKQGYAKGVLTQKLGPWRRPVAYLSKKLDPVAAGWPPCLRMVAAIAVLRKDAGKLTMGQPLVILAPHAVEALVKQPPDRWLSNARMTHYQAMLLDTDRVQFGPVVALNPATLLPLPEEGAPHDCLEILAETHGTRPDLTDQPIPDADHTWYTDGSSFLQEGQRKAGAAVTTETEVIWARALPAGTSAQRAELIALTQALKMAEGKRLNVYTDSRYAFATAHIHGEIYRRRGWLTSEGREIKNKSEILALLKALFLPKRLSIIHCLGHQKGDSAEARGNRLADQAAREAAIKTPPDTSTLLAGKRTADGSEFEKRTADGSEFESPKKKAKVE

SEQ ID NO: 1887 - protein, 2091 aa, synthetic construct
MPAAKRVKLDGGDKKYSIGLDIGTNSVGWAVITDEYKVPSKKFKVLGNTDRHSIKKNLIGALLFDSGETAEATRLKRTARRRYTRRKNRICYLQEIFSNEMAKVDDSFFHRLEESFLVEEDKKHERHPIFGNIVDEVAYHEKYPTIYHLRKKLVDSTDKADLRLIYLALAHMIKFRGHFLIEGDLNPDNSDVDKLFIQLVQTYNQLFEENPINASGVDAKAILSARLSKSRRLENLIAQLPGEKKNGLFGNLIALSLGLTPNFKSNFDLAEDAKLQLSKDTYDDDLDNLLAQIGDQYADLFLAAKNLSDAILLSDILRVNTEITKAPLSASMIKRYDEHHQDLTLLKALVRQQLPEKYKEIFFDQSKNGYAGYIDGGASQEEFYKFIKPILEKMDGTEELLVKLNREDLLRKQRTFDNGSIPHQIHLGELHAILRRQEDFYPFLKDNREKIEKILTFRIPYYVGPLARGNSRFAWMTRKSEETITPWNFEEVVDKGASAQSFIERMTNFDKNLPNEKVLPKHSLLYEYFTVYNELTKVKYVTEGMRKPAFLSGEQKKAIVDLLFKTNRKVTVKQLKEDYFKKIECFDSVEISGVEDRFNASLGTYHDLLKIIKDKDFLDNEENEDILEDIVLTLTLFEDREMIEERLKTYAHLFDDKVMKQLKRRRYTGWGRLSRKLINGIRDKQSGKTILDFLKSDGFANRNFMQLIHDDSLTFKEDIQKAQVSGQGDSLHEHIANLAGSPAIKKGILQTVKVVDELVKVMGRHKPENIVIEMARENQTTQKGQKNSRERMKRIEEGIKELGSQILKEHPVENTQLQNEKLYLYYLQNGRDMYVDQELDINRLSDYDVDHIVPQSFLKDDSIDNKVLTRSDKARGKSDNVPSEEVVKKMKNYWRQLLNAKLITQRKFDNLTKAERGGLSELDKAGFIKRQLVETRQITKHVAQILDSRMNTKYDENDKLIREVKVITLKSKLVSDFRKDFQFYKVREINNYHHAHDAYLNAVVGTALIKKYPKLESEFVYGDYKVYDVRKMIAKSEQEIGKATAKYFFYSNIMNFFKTEITLANGEIRKRPLIETNGETGEIVWDKGRDFATVRKVLSMPQVNIVKKTEVQTGGFSKESILPKRNSDKLIARKKDWDPKKYGGFDSPTVAYSVLVVAKVEKGKSKKLKSVKELLGITIMERSSFEKNPIDFLEAKGYKEVKKDLIIKLPKYSLFELENGRKRMLASAGELQKGNELALPSKYVNFLYLASHYEKLKGSPEDNEQKQLFVEQHKHYLDEIIEQISEFSKRVILADANLDKVLSAYNKHRDKPIREQAENIIHLFTLTNLGAPAAFKYFDTTIDRKRYTSTKEVLDATLIHQSITGLYETRIDLSQLGGDGGGSSPAPGGTLNLEDEYRLYETSAEPEVSPGSTWLSDFPQAWAETGGMGLAVRQAPLIIPLKATSTPVSIKQYPMSQEAKLGIKPHIQRLLDQGILVPCQSPWNTPLLPVKKPGTNDYRPVQDLREVNKRVEDIHPTVPNPYNLLSGLPPSHRWYTVLDLKDAFFCLRLHPTSQPLFAFEWRDPGMGISGQLTWTRLPQGFKNSPTLFNEALHRDLADFRIQHPDLILLQYVDDILLAATSELDCQQGTRALLLTLGNLGYRASAKKAQLCQKQVKYLGYLLKEGQRWLTEARKETVMGQPTPKTPRQLREFLGKAGFCRLFIPGFAEMAAPLYPLTKPGTLFNWGPDQQKAYQEIKQALLTAPALGLPDLTKPFELFVDEKQGYAKGVLTQKLGPWRRPVAYLSKKLDPVAAGWPPCLRMVAAIAVLRKDAGKLTMGQPLVILAPHAVEALVKQPPDRWLSNARMTHYQAMLLDTDRVQFGPVVALNPATLLPLPEEGAPHDCLEILAETHGTRPDLTDQPIPDADHTWYTDGSSFLQEGQRKAGAAVTTETEVIWARALPAGTSAQRAELIALTQALKMAEGKRLNVYTDSRYAFATAHIHGEIYRRRGWLTSEGREIKNKSEILALLKALFLPKRLSIIHCLGHQKGDSAEARGNRLADQAAREAAIKTPPDTSTLLAGKRTADGSEFEKRTADGSEFESPKKKAKVE

SEQ ID NO: 1888 - protein, 2093 aa, synthetic construct
MPAAKRVKLDGGDKKYSIGLDIGTNSVGWAVITDEYKVPSKKFKVLGNTDRHSIKKNLIGALLFDSGETAEATRLKRTARRRYTRRKNRICYLQEIFSNEMAKVDDSFFHRLEESFLVEEDKKHERHPIFGNIVDEVAYHEKYPTIYHLRKKLVDSTDKADLRLIYLALAHMIKFRGHFLIEGDLNPDNSDVDKLFIQLVQTYNQLFEENPINASGVDAKAILSARLSKSRRLENLIAQLPGEKKNGLFGNLIALSLGLTPNFKSNFDLAEDAKLQLSKDTYDDDLDNLLAQIGDQYADLFLAAKNLSDAILLSDILRVNTEITKAPLSASMIKRYDEHHQDLTLLKALVRQQLPEKYKEIFFDQSKNGYAGYIDGGASQEEFYKFIKPILEKMDGTEELLVKLNREDLLRKQRTFDNGSIPHQIHLGELHAILRRQEDFYPFLKDNREKIEKILTFRIPYYVGPLARGNSRFAWMTRKSEETITPWNFEEVVDKGASAQSFIERMTNFDKNLPNEKVLPKHSLLYEYFTVYNELTKVKYVTEGMRKPAFLSGEQKKAIVDLLFKTNRKVTVKQLKEDYFKKIECFDSVEISGVEDRFNASLGTYHDLLKIIKDKDFLDNEENEDILEDIVLTLTLFEDREMIEERLKTYAHLFDDKVMKQLKRRRYTGWGRLSRKLINGIRDKQSGKTILDFLKSDGFANRNFMQLIHDDSLTFKEDIQKAQVSGQGDSLHEHIANLAGSPAIKKGILQTVKVVDELVKVMGRHKPENIVIEMARENQTTQKGQKNSRERMKRIEEGIKELGSQILKEHPVENTQLQNEKLYLYYLQNGRDMYVDQELDINRLSDYDVDHIVPQSFLKDDSIDNKVLTRSDKARGKSDNVPSEEVVKKMKNYWRQLLNAKLITQRKFDNLTKAERGGLSELDKAGFIKRQLVETRQITKHVAQILDSRMNTKYDENDKLIREVKVITLKSKLVSDFRKDFQFYKVREINNYHHAHDAYLNAVVGTALIKKYPKLESEFVYGDYKVYDVRKMIAKSEQEIGKATAKYFFYSNIMNFFKTEITLANGEIRKRPLIETNGETGEIVWDKGRDFATVRKVLSMPQVNIVKKTEVQTGGFSKESILPKRNSDKLIARKKDWDPKKYGGFDSPTVAYSVLVVAKVEKGKSKKLKSVKELLGITIMERSSFEKNPIDFLEAKGYKEVKKDLIIKLPKYSLFELENGRKRMLASAGELQKGNELALPSKYVNFLYLASHYEKLKGSPEDNEQKQLFVEQHKHYLDEIIEQISEFSKRVILADANLDKVLSAYNKHRDKPIREQAENIIHLFTLTNLGAPAAFKYFDTTIDRKRYTSTKEVLDATLIHQSITGLYETRIDLSQLGGDGGEAAAKGGGGGTLNLEDEYRLYETSAEPEVSPGSTWLSDFPQAWAETGGMGLAVRQAPLIIPLKATSTPVSIKQYPMSQEAKLGIKPHIQRLLDQGILVPCQSPWNTPLLPVKKPGTNDYRPVQDLREVNKRVEDIHPTVPNPYNLLSGLPPSHRWYTVLDLKDAFFCLRLHPTSQPLFAFEWRDPGMGISGQLTWTRLPQGFKNSPTLFNEALHRDLADFRIQHPDLILLQYVDDILLAATSELDCQQGTRALLLTLGNLGYRASAKKAQLCQKQVKYLGYLLKEGQRWLTEARKETVMGQPTPKTPRQLREFLGKAGFCRLFIPGFAEMAAPLYPLTKPGTLFNWGPDQQKAYQEIKQALLTAPALGLPDLTKPFELFVDEKQGYAKGVLTQKLGPWRRPVAYLSKKLDPVAAGWPPCLRMVAAIAVLRKDAGKLTMGQPLVILAPHAVEALVKQPPDRWLSNARMTHYQAMLLDTDRVQFGPVVALNPATLLPLPEEGAPHDCLEILAETHGTRPDLTDQPIPDADHTWYTDGSSFLQEGQRKAGAAVTTETEVIWARALPAGTSAQRAELIALTQALKMAEGKRLNVYTDSRYAFATAHIHGEIYRRRGWLTSEGREIKNKSEILALLKALFLPKRLSIIHCLGHQKGDSAEARGNRLADQAAREAAIKTPPDTSTLLAGKRTADGSEFEKRTADGSEFESPKKKAKVE

SEQ ID NO: 1889 - protein, 2096 aa, synthetic construct
MPAAKRVKLDGGDKKYSIGLDIGTNSVGWAVITDEYKVPSKKFKVLGNTDRHSIKKNLIGALLFDSGETAEATRLKRTARRRYTRRKNRICYLQEIFSNEMAKVDDSFFHRLEESFLVEEDKKHERHPIFGNIVDEVAYHEKYPTIYHLRKKLVDSTDKADLRLIYLALAHMIKFRGHFLIEGDLNPDNSDVDKLFIQLVQTYNQLFEENPINASGVDAKAILSARLSKSRRLENLIAQLPGEKKNGLFGNLIALSLGLTPNFKSNFDLAEDAKLQLSKDTYDDDLDNLLAQIGDQYADLFLAAKNLSDAILLSDILRVNTEITKAPLSASMIKRYDEHHQDLTLLKALVRQQLPEKYKEIFFDQSKNGYAGYIDGGASQEEFYKFIKPILEKMDGTEELLVKLNREDLLRKQRTFDNGSIPHQIHLGELHAILRRQEDFYPFLKDNREKIEKILTFRIPYYVGPLARGNSRFAWMTRKSEETITPWNFEEVVDKGASAQSFIERMTNFDKNLPNEKVLPKHSLLYEYFTVYNELTKVKYVTEGMRKPAFLSGEQKKAIVDLLFKTNRKVTVKQLKEDYFKKIECFDSVEISGVEDRFNASLGTYHDLLKIIKDKDFLDNEENEDILEDIVLTLTLFEDREMIEERLKTYAHLFDDKVMKQLKRRRYTGWGRLSRKLINGIRDKQSGKTILDFLKSDGFANRNFMQLIHDDSLTFKEDIQKAQVSGQGDSLHEHIANLAGSPAIKKGILQTVKVVDELVKVMGRHKPENIVIEMARENQTTQKGQKNSRERMKRIEEGIKELGSQILKEHPVENTQLQNEKLYLYYLQNGRDMYVDQELDINRLSDYDVDHIVPQSFLKDDSIDNKVLTRSDKARGKSDNVPSEEVVKKMKNYWRQLLNAKLITQRKFDNLTKAERGGLSELDKAGFIKRQLVETRQITKHVAQILDSRMNTKYDENDKLIREVKVITLKSKLVSDFRKDFQFYKVREINNYHHAHDAYLNAVVGTALIKKYPKLESEFVYGDYKVYDVRKMIAKSEQEIGKATAKYFFYSNIMNFFKTEITLANGEIRKRPLIETNGETGEIVWDKGRDFATVRKVLSMPQVNIVKKTEVQTGGFSKESILPKRNSDKLIARKKDWDPKKYGGFDSPTVAYSVLVVAKVEKGKSKKLKSVKELLGITIMERSSFEKNPIDFLEAKGYKEVKKDLIIKLPKYSLFELENGRKRMLASAGELQKGNELALPSKYVNFLYLASHYEKLKGSPEDNEQKQLFVEQHKHYLDEIIEQISEFSKRVILADANLDKVLSAYNKHRDKPIREQAENIIHLFTLTNLGAPAAFKYFDTTIDRKRYTSTKEVLDATLIHQSITGLYETRIDLSQLGGDGGGGSGSSEAAAKGGTLNLEDEYRLYETSAEPEVSPGSTWLSDFPQAWAETGGMGLAVRQAPLIIPLKATSTPVSIKQYPMSQEAKLGIKPHIQRLLDQGILVPCQSPWNTPLLPVKKPGTNDYRPVQDLREVNKRVEDIHPTVPNPYNLLSGLPPSHRWYTVLDLKDAFFCLRLHPTSQPLFAFEWRDPGMGISGQLTWTRLPQGFKNSPTLFNEALHRDLADFRIQHPDLILLQYVDDILLAATSELDCQQGTRALLLTLGNLGYRASAKKAQLCQKQVKYLGYLLKEGQRWLTEARKETVMGQPTPKTPRQLREFLGKAGFCRLFIPGFAEMAAPLYPLTKPGTLFNWGPDQQKAYQEIKQALLTAPALGLPDLTKPFELFVDEKQGYAKGVLTQKLGPWRRPVAYLSKKLDPVAAGWPPCLRMVAAIAVLRKDAGKLTMGQPLVILAPHAVEALVKQPPDRWLSNARMTHYQAMLLDTDRVQFGPVVALNPATLLPLPEEGAPHDCLEILAETHGTRPDLTDQPIPDADHTWYTDGSSFLQEGQRKAGAAVTTETEVIWARALPAGTSAQRAELIALTQALKMAEGKRLNVYTDSRYAFATAHIHGEIYRRRGWLTSEGREIKNKSEILALLKALFLPKRLSIIHCLGHQKGDSAEARGNRLADQAAREAAIKTPPDTSTLLAGKRTADGSEFEKRTADGSEFESPKKKAKVE

SEQ ID NO: 1890 - protein, 2096 aa, synthetic construct
MPAAKRVKLDGGDKKYSIGLDIGTNSVGWAVITDEYKVPSKKFKVLGNTDRHSIKKNLIGALLFDSGETAEATRLKRTARRRYTRRKNRICYLQEIFSNEMAKVDDSFFHRLEESFLVEEDKKHERHPIFGNIVDEVAYHEKYPTIYHLRKKLVDSTDKADLRLIYLALAHMIKFRGHFLIEGDLNPDNSDVDKLFIQLVQTYNQLFEENPINASGVDAKAILSARLSKSRRLENLIAQLPGEKKNGLFGNLIALSLGLTPNFKSNFDLAEDAKLQLSKDTYDDDLDNLLAQIGDQYADLFLAAKNLSDAILLSDILRVNTEITKAPLSASMIKRYDEHHQDLTLLKALVRQQLPEKYKEIFFDQSKNGYAGYIDGGASQEEFYKFIKPILEKMDGTEELLVKLNREDLLRKQRTFDNGSIPHQIHLGELHAILRRQEDFYPFLKDNREKIEKILTFRIPYYVGPLARGNSRFAWMTRKSEETITPWNFEEVVDKGASAQSFIERMTNFDKNLPNEKVLPKHSLLYEYFTVYNELTKVKYVTEGMRKPAFLSGEQKKAIVDLLFKTNRKVTVKQLKEDYFKKIECFDSVEISGVEDRFNASLGTYHDLLKIIKDKDFLDNEENEDILEDIVLTLTLFEDREMIEERLKTYAHLFDDKVMKQLKRRRYTGWGRLSRKLINGIRDKQSGKTILDFLKSDGFANRNFMQLIHDDSLTFKEDIQKAQVSGQGDSLHEHIANLAGSPAIKKGILQTVKVVDELVKVMGRHKPENIVIEMARENQTTQKGQKNSRERMKRIEEGIKELGSQILKEHPVENTQLQNEKLYLYYLQNGRDMYVDQELDINRLSDYDVDHIVPQSFLKDDSIDNKVLTRSDKARGKSDNVPSEEVVKKMKNYWRQLLNAKLITQRKFDNLTKAERGGLSELDKAGFIKRQLVETRQITKHVAQILDSRMNTKYDENDKLIREVKVITLKSKLVSDFRKDFQFYKVREINNYHHAHDAYLNAVVGTALIKKYPKLESEFVYGDYKVYDVRKMIAKSEQEIGKATAKYFFYSNIMNFFKTEITLANGEIRKRPLIETNGETGEIVWDKGRDFATVRKVLSMPQVNIVKKTEVQTGGFSKESILPKRNSDKLIARKKDWDPKKYGGFDSPTVAYSVLVVAKVEKGKSKKLKSVKELLGITIMERSSFEKNPIDFLEAKGYKEVKKDLIIKLPKYSLFELENGRKRMLASAGELQKGNELALPSKYVNFLYLASHYEKLKGSPEDNEQKQLFVEQHKHYLDEIIEQISEFSKRVILADANLDKVLSAYNKHRDKPIREQAENIIHLFTLTNLGAPAAFKYFDTTIDRKRYTSTKEVLDATLIHQSITGLYETRIDLSQLGGDGGGSSPAPEAAAKGGTLNLEDEYRLYETSAEPEVSPGSTWLSDFPQAWAETGGMGLAVRQAPLIIPLKATSTPVSIKQYPMSQEAKLGIKPHIQRLLDQGILVPCQSPWNTPLLPVKKPGTNDYRPVQDLREVNKRVEDIHPTVPNPYNLLSGLPPSHRWYTVLDLKDAFFCLRLHPTSQPLFAFEWRDPGMGISGQLTWTRLPQGFKNSPTLFNEALHRDLADFRIQHPDLILLQYVDDILLAATSELDCQQGTRALLLTLGNLGYRASAKKAQLCQKQVKYLGYLLKEGQRWLTEARKETVMGQPTPKTPRQLREFLGKAGFCRLFIPGFAEMAAPLYPLTKPGTLFNWGPDQQKAYQEIKQALLTAPALGLPDLTKPFELFVDEKQGYAKGVLTQKLGPWRRPVAYLSKKLDPVAAGWPPCLRMVAAIAVLRKDAGKLTMGQPLVILAPHAVEALVKQPPDRWLSNARMTHYQAMLLDTDRVQFGPVVALNPATLLPLPEEGAPHDCLEILAETHGTRPDLTDQPIPDADHTWYTDGSSFLQEGQRKAGAAVTTETEVIWARALPAGTSAQRAELIALTQALKMAEGKRLNVYTDSRYAFATAHIHGEIYRRRGWLTSEGREIKNKSEILALLKALFLPKRLSIIHCLGHQKGDSAEARGNRLADQAAREAAIKTPPDTSTLLAGKRTADGSEFEKRTADGSEFESPKKKAKVE

SEQ ID NO: 1891 - protein, 2093 aa, synthetic construct
MPAAKRVKLDGGDKKYSIGLDIGTNSVGWAVITDEYKVPSKKFKVLGNTDRHSIKKNLIGALLFDSGETAEATRLKRTARRRYTRRKNRICYLQEIFSNEMAKVDDSFFHRLEESFLVEEDKKHERHPIFGNIVDEVAYHEKYPTIYHLRKKLVDSTDKADLRLIYLALAHMIKFRGHFLIEGDLNPDNSDVDKLFIQLVQTYNQLFEENPINASGVDAKAILSARLSKSRRLENLIAQLPGEKKNGLFGNLIALSLGLTPNFKSNFDLAEDAKLQLSKDTYDDDLDNLLAQIGDQYADLFLAAKNLSDAILLSDILRVNTEITKAPLSASMIKRYDEHHQDLTLLKALVRQQLPEKYKEIFFDQSKNGYAGYIDGGASQEEFYKFIKPILEKMDGTEELLVKLNREDLLRKQRTFDNGSIPHQIHLGELHAILRRQEDFYPFLKDNREKIEKILTFRIPYYVGPLARGNSRFAWMTRKSEETITPWNFEEVVDKGASAQSFIERMTNFDKNLPNEKVLPKHSLLYEYFTVYNELTKVKYVTEGMRKPAFLSGEQKKAIVDLLFKTNRKVTVKQLKEDYFKKIECFDSVEISGVEDRFNASLGTYHDLLKIIKDKDFLDNEENEDILEDIVLTLTLFEDREMIEERLKTYAHLFDDKVMKQLKRRRYTGWGRLSRKLINGIRDKQSGKTILDFLKSDGFANRNFMQLIHDDSLTFKEDIQKAQVSGQGDSLHEHIANLAGSPAIKKGILQTVKVVDELVKVMGRHKPENIVIEMARENQTTQKGQKNSRERMKRIEEGIKELGSQILKEHPVENTQLQNEKLYLYYLQNGRDMYVDQELDINRLSDYDVDHIVPQSFLKDDSIDNKVLTRSDKARGKSDNVPSEEVVKKMKNYWRQLLNAKLITQRKFDNLTKAERGGLSELDKAGFIKRQLVETRQITKHVAQILDSRMNTKYDENDKLIREVKVITLKSKLVSDFRKDFQFYKVREINNYHHAHDAYLNAVVGTALIKKYPKLESEFVYGDYKVYDVRKMIAKSEQEIGKATAKYFFYSNIMNFFKTEITLANGEIRKRPLIETNGETGEIVWDKGRDFATVRKVLSMPQVNIVKKTEVQTGGFSKESILPKRNSDKLIARKKDWDPKKYGGFDSPTVAYSVLVVAKVEKGKSKKLKSVKELLGITIMERSSFEKNPIDFLEAKGYKEVKKDLIIKLPKYSLFELENGRKRMLASAGELQKGNELALPSKYVNFLYLASHYEKLKGSPEDNEQKQLFVEQHKHYLDEIIEQISEFSKRVILADANLDKVLSAYNKHRDKPIREQAENIIHLFTLTNLGAPAAFKYFDTTIDRKRYTSTKEVLDATLIHQSITGLYETRIDLSQLGGDGGGSSEAAAKGGTLNLEDEYRLYETSAEPEVSPGSTWLSDFPQAWAETGGMGLAVRQAPLIIPLKATSTPVSIKQYPMSQEAKLGIKPHIQRLLDQGILVPCQSPWNTPLLPVKKPGTNDYRPVQDLREVNKRVEDIHPTVPNPYNLLSGLPPSHRWYTVLDLKDAFFCLRLHPTSQPLFAFEWRDPGMGISGQLTWTRLPQGFKNSPTLFNEALHRDLADFRIQHPDLILLQYVDDILLAATSELDCQQGTRALLLTLGNLGYRASAKKAQLCQKQVKYLGYLLKEGQRWLTEARKETVMGQPTPKTPRQLREFLGKAGFCRLFIPGFAEMAAPLYPLTKPGTLFNWGPDQQKAYQEIKQALLTAPALGLPDLTKPFELFVDEKQGYAKGVLTQKLGPWRRPVAYLSKKLDPVAAGWPPCLRMVAAIAVLRKDAGKLTMGQPLVILAPHAVEALVKQPPDRWLSNARMTHYQAMLLDTDRVQFGPVVALNPATLLPLPEEGAPHDCLEILAETHGTRPDLTDQPIPDADHTWYTDGSSFLQEGQRKAGAAVTTETEVIWARALPAGTSAQRAELIALTQALKMAEGKRLNVYTDSRYAFATAHIHGEIYRRRGWLTSEGREIKNKSEILALLKALFLPKRLSIIHCLGHQKGDSAEARGNRLADQAAREAAIKTPPDTSTLLAGKRTADGSEFEKRTADGSEFESPKKKAKVE

SEQ ID NO: 1892 - protein, 2094 aa, synthetic construct
MPAAKRVKLDGGDKKYSIGLDIGTNSVGWAVITDEYKVPSKKFKVLGNTDRHSIKKNLIGALLFDSGETAEATRLKRTARRRYTRRKNRICYLQEIFSNEMAKVDDSFFHRLEESFLVEEDKKHERHPIFGNIVDEVAYHEKYPTIYHLRKKLVDSTDKADLRLIYLALAHMIKFRGHFLIEGDLNPDNSDVDKLFIQLVQTYNQLFEENPINASGVDAKAILSARLSKSRRLENLIAQLPGEKKNGLFGNLIALSLGLTPNFKSNFDLAEDAKLQLSKDTYDDDLDNLLAQIGDQYADLFLAAKNLSDAILLSDILRVNTEITKAPLSASMIKRYDEHHQDLTLLKALVRQQLPEKYKEIFFDQSKNGYAGYIDGGASQEEFYKFIKPILEKMDGTEELLVKLNREDLLRKQRTFDNGSIPHQIHLGELHAILRRQEDFYPFLKDNREKIEKILTFRIPYYVGPLARGNSRFAWMTRKSEETITPWNFEEVVDKGASAQSFIERMTNFDKNLPNEKVLPKHSLLYEYFTVYNELTKVKYVTEGMRKPAFLSGEQKKAIVDLLFKTNRKVTVKQLKEDYFKKIECFDSVEISGVEDRFNASLGTYHDLLKIIKDKDFLDNEENEDILEDIVLTLTLFEDREMIEERLKTYAHLFDDKVMKQLKRRRYTGWGRLSRKLINGIRDKQSGKTILDFLKSDGFANRNFMQLIHDDSLTFKEDIQKAQVSGQGDSLHEHIANLAGSPAIKKGILQTVKVVDELVKVMGRHKPENIVIEMARENQTTQKGQKNSRERMKRIEEGIKELGSQILKEHPVENTQLQNEKLYLYYLQNGRDMYVDQELDINRLSDYDVDHIVPQSFLKDDSIDNKVLTRSDKARGKSDNVPSEEVVKKMKNYWRQLLNAKLITQRKFDNLTKAERGGLSELDKAGFIKRQLVETRQITKHVAQILDSRMNTKYDENDKLIREVKVITLKSKLVSDFRKDFQFYKVREINNYHHAHDAYLNAVVGTALIKKYPKLESEFVYGDYKVYDVRKMIAKSEQEIGKATAKYFFYSNIMNFFKTEITLANGEIRKRPLIETNGETGEIVWDKGRDFATVRKVLSMPQVNIVKKTEVQTGGFSKESILPKRNSDKLIARKKDWDPKKYGGFDSPTVAYSVLVVAKVEKGKSKKLKSVKELLGITIMERSSFEKNPIDFLEAKGYKEVKKDLIIKLPKYSLFELENGRKRMLASAGELQKGNELALPSKYVNFLYLASHYEKLKGSPEDNEQKQLFVEQHKHYLDEIIEQISEFSKRVILADANLDKVLSAYNKHRDKPIREQAENIIHLFTLTNLGAPAAFKYFDTTIDRKRYTSTKEVLDATLIHQSITGLYETRIDLSQLGGDGGGGGPAPGGSGGTLNLEDEYRLYETSAEPEVSPGSTWLSDFPQAWAETGGMGLAVRQAPLIIPLKATSTPVSIKQYPMSQEAKLGIKPHIQRLLDQGILVPCQSPWNTPLLPVKKPGTNDYRPVQDLREVNKRVEDIHPTVPNPYNLLSGLPPSHRWYTVLDLKDAFFCLRLHPTSQPLFAFEWRDPGMGISGQLTWTRLPQGFKNSPTLFNEALHRDLADFRIQHPDLILLQYVDDILLAATSELDCQQGTRALLLTLGNLGYRASAKKAQLCQKQVKYLGYLLKEGQRWLTEARKETVMGQPTPKTPRQLREFLGKAGFCRLFIPGFAEMAAPLYPLTKPGTLFNWGPDQQKAYQEIKQALLTAPALGLPDLTKPFELFVDEKQGYAKGVLTQKLGPWRRPVAYLSKKLDPVAAGWPPCLRMVAAIAVLRKDAGKLTMGQPLVILAPHAVEALVKQPPDRWLSNARMTHYQAMLLDTDRVQFGPVVALNPATLLPLPEEGAPHDCLEILAETHGTRPDLTDQPIPDADHTWYTDGSSFLQEGQRKAGAAVTTETEVIWARALPAGTSAQRAELIALTQALKMAEGKRLNVYTDSRYAFATAHIHGEIYRRRGWLTSEGREIKNKSEILALLKALFLPKRLSIIHCLGHQKGDSAEARGNRLADQAAREAAIKTPPDTSTLLAGKRTADGSEFEKRTADGSEFESPKKKAKVE

SEQ ID NO: 1893 - protein, 2094 aa, synthetic construct
MPAAKRVKLDGGDKKYSIGLDIGTNSVGWAVITDEYKVPSKKFKVLGNTDRHSIKKNLIGALLFDSGETAEATRLKRTARRRYTRRKNRICYLQEIFSNEMAKVDDSFFHRLEESFLVEEDKKHERHPIFGNIVDEVAYHEKYPTIYHLRKKLVDSTDKADLRLIYLALAHMIKFRGHFLIEGDLNPDNSDVDKLFIQLVQTYNQLFEENPINASGVDAKAILSARLSKSRRLENLIAQLPGEKKNGLFGNLIALSLGLTPNFKSNFDLAEDAKLQLSKDTYDDDLDNLLAQIGDQYADLFLAAKNLSDAILLSDILRVNTEITKAPLSASMIKRYDEHHQDLTLLKALVRQQLPEKYKEIFFDQSKNGYAGYIDGGASQEEFYKFIKPILEKMDGTEELLVKLNREDLLRKQRTFDNGSIPHQIHLGELHAILRRQEDFYPFLKDNREKIEKILTFRIPYYVGPLARGNSRFAWMTRKSEETITPWNFEEVVDKGASAQSFIERMTNFDKNLPNEKVLPKHSLLYEYFTVYNELTKVKYVTEGMRKPAFLSGEQKKAIVDLLFKTNRKVTVKQLKEDYFKKIECFDSVEISGVEDRFNASLGTYHDLLKIIKDKDFLDNEENEDILEDIVLTLTLFEDREMIEERLKTYAHLFDDKVMKQLKRRRYTGWGRLSRKLINGIRDKQSGKTILDFLKSDGFANRNFMQLIHDDSLTFKEDIQKAQVSGQGDSLHEHIANLAGSPAIKKGILQTVKVVDELVKVMGRHKPENIVIEMARENQTTQKGQKNSRERMKRIEEGIKELGSQILKEHPVENTQLQNEKLYLYYLQNGRDMYVDQELDINRLSDYDVDHIVPQSFLKDDSIDNKVLTRSDKARGKSDNVPSEEVVKKMKNYWRQLLNAKLITQRKFDNLTKAERGGLSELDKAGFIKRQLVETRQITKHVAQILDSRMNTKYDENDKLIREVKVITLKSKLVSDFRKDFQFYKVREINNYHHAHDAYLNAVVGTALIKKYPKLESEFVYGDYKVYDVRKMIAKSEQEIGKATAKYFFYSNIMNFFKTEITLANGEIRKRPLIETNGETGEIVWDKGRDFATVRKVLSMPQVNIVKKTEVQTGGFSKESILPKRNSDKLIARKKDWDPKKYGGFDSPTVAYSVLVVAKVEKGKSKKLKSVKELLGITIMERSSFEKNPIDFLEAKGYKEVKKDLIIKLPKYSLFELENGRKRMLASAGELQKGNELALPSKYVNFLYLASHYEKLKGSPEDNEQKQLFVEQHKHYLDEIIEQISEFSKRVILADANLDKVLSAYNKHRDKPIREQAENIIHLFTLTNLGAPAAFKYFDTTIDRKRYTSTKEVLDATLIHQSITGLYETRIDLSQLGGDGGPAPGGGGSSGGTLNLEDEYRLYETSAEPEVSPGSTWLSDFPQAWAETGGMGLAVRQAPLIIPLKATSTPVSIKQYPMSQEAKLGIKPHIQRLLDQGILVPCQSPWNTPLLPVKKPGTNDYRPVQDLREVNKRVEDIHPTVPNPYNLLSGLPPSHRWYTVLDLKDAFFCLRLHPTSQPLFAFEWRDPGMGISGQLTWTRLPQGFKNSPTLFNEALHRDLADFRIQHPDLILLQYVDDILLAATSELDCQQGTRALLLTLGNLGYRASAKKAQLCQKQVKYLGYLLKEGQRWLTEARKETVMGQPTPKTPRQLREFLGKAGFCRLFIPGFAEMAAPLYPLTKPGTLFNWGPDQQKAYQEIKQALLTAPALGLPDLTKPFELFVDEKQGYAKGVLTQKLGPWRRPVAYLSKKLDPVAAGWPPCLRMVAAIAVLRKDAGKLTMGQPLVILAPHAVEALVKQPPDRWLSNARMTHYQAMLLDTDRVQFGPVVALNPATLLPLPEEGAPHDCLEILAETHGTRPDLTDQPIPDADHTWYTDGSSFLQEGQRKAGAAVTTETEVIWARALPAGTSAQRAELIALTQALKMAEGKRLNVYTDSRYAFATAHIHGEIYRRRGWLTSEGREIKNKSEILALLKALFLPKRLSIIHCLGHQKGDSAEARGNRLADQAAREAAIKTPPDTSTLLAGKRTADGSEFEKRTADGSEFESPKKKAKVE

SEQ ID NO: 1894 - protein, 2094 aa, synthetic construct
MPAAKRVKLDGGDKKYSIGLDIGTNSVGWAVITDEYKVPSKKFKVLGNTDRHSIKKNLIGALLFDSGETAEATRLKRTARRRYTRRKNRICYLQEIFSNEMAKVDDSFFHRLEESFLVEEDKKHERHPIFGNIVDEVAYHEKYPTIYHLRKKLVDSTDKADLRLIYLALAHMIKFRGHFLIEGDLNPDNSDVDKLFIQLVQTYNQLFEENPINASGVDAKAILSARLSKSRRLENLIAQLPGEKKNGLFGNLIALSLGLTPNFKSNFDLAEDAKLQLSKDTYDDDLDNLLAQIGDQYADLFLAAKNLSDAILLSDILRVNTEITKAPLSASMIKRYDEHHQDLTLLKALVRQQLPEKYKEIFFDQSKNGYAGYIDGGASQEEFYKFIKPILEKMDGTEELLVKLNREDLLRKQRTFDNGSIPHQIHLGELHAILRRQEDFYPFLKDNREKIEKILTFRIPYYVGPLARGNSRFAWMTRKSEETITPWNFEEVVDKGASAQSFIERMTNFDKNLPNEKVLPKHSLLYEYFTVYNELTKVKYVTEGMRKPAFLSGEQKKAIVDLLFKTNRKVTVKQLKEDYFKKIECFDSVEISGVEDRFNASLGTYHDLLKIIKDKDFLDNEENEDILEDIVLTLTLFEDREMIEERLKTYAHLFDDKVMKQLKRRRYTGWGRLSRKLINGIRDKQSGKTILDFLKSDGFANRNFMQLIHDDSLTFKEDIQKAQVSGQGDSLHEHIANLAGSPAIKKGILQTVKVVDELVKVMGRHKPENIVIEMARENQTTQKGQKNSRERMKRIEEGIKELGSQILKEHPVENTQLQNEKLYLYYLQNGRDMYVDQELDINRLSDYDVDHIVPQSFLKDDSIDNKVLTRSDKARGKSDNVPSEEVVKKMKNYWRQLLNAKLITQRKFDNLTKAERGGLSELDKAGFIKRQLVETRQITKHVAQILDSRMNTKYDENDKLIREVKVITLKSKLVSDFRKDFQFYKVREINNYHHAHDAYLNAVVGTALIKKYPKLESEFVYGDYKVYDVRKMIAKSEQEIGKATAKYFFYSNIMNFFKTEITLANGEIRKRPLIETNGETGEIVWDKGRDFATVRKVLSMPQVNIVKKTEVQTGGFSKESILPKRNSDKLIARKKDWDPKKYGGFDSPTVAYSVLVVAKVEKGKSKKLKSVKELLGITIMERSSFEKNPIDFLEAKGYKEVKKDLIIKLPKYSLFELENGRKRMLASAGELQKGNELALPSKYVNFLYLASHYEKLKGSPEDNEQKQLFVEQHKHYLDEIIEQISEFSKRVILADANLDKVLSAYNKHRDKPIREQAENIIHLFTLTNLGAPAAFKYFDTTIDRKRYTSTKEVLDATLIHQSITGLYETRIDLSQLGGDGGGGGGGSGSSGGTLNLEDEYRLYETSAEPEVSPGSTWLSDFPQAWAETGGMGLAVRQAPLIIPLKATSTPVSIKQYPMSQEAKLGIKPHIQRLLDQGILVPCQSPWNTPLLPVKKPGTNDYRPVQDLREVNKRVEDIHPTVPNPYNLLSGLPPSHRWYTVLDLKDAFFCLRLHPTSQPLFAFEWRDPGMGISGQLTWTRLPQGFKNSPTLFNEALHRDLADFRIQHPDLILLQYVDDILLAATSELDCQQGTRALLLTLGNLGYRASAKKAQLCQKQVKYLGYLLKEGQRWLTEARKETVMGQPTPKTPRQLREFLGKAGFCRLFIPGFAEMAAPLYPLTKPGTLFNWGPDQQKAYQEIKQALLTAPALGLPDLTKPFELFVDEKQGYAKGVLTQKLGPWRRPVAYLSKKLDPVAAGWPPCLRMVAAIAVLRKDAGKLTMGQPLVILAPHAVEALVKQPPDRWLSNARMTHYQAMLLDTDRVQFGPVVALNPATLLPLPEEGAPHDCLEILAETHGTRPDLTDQPIPDADHTWYTDGSSFLQEGQRKAGAAVTTETEVIWARALPAGTSAQRAELIALTQALKMAEGKRLNVYTDSRYAFATAHIHGEIYRRRGWLTSEGREIKNKSEILALLKALFLPKRLSIIHCLGHQKGDSAEARGNRLADQAAREAAIKTPPDTSTLLAGKRTADGSEFEKRTADGSEFESPKKKAKVE

SEQ ID NO: 1895 - protein, 2091 aa, synthetic construct
MPAAKRVKLDGGDKKYSIGLDIGTNSVGWAVITDEYKVPSKKFKVLGNTDRHSIKKNLIGALLFDSGETAEATRLKRTARRRYTRRKNRICYLQEIFSNEMAKVDDSFFHRLEESFLVEEDKKHERHPIFGNIVDEVAYHEKYPTIYHLRKKLVDSTDKADLRLIYLALAHMIKFRGHFLIEGDLNPDNSDVDKLFIQLVQTYNQLFEENPINASGVDAKAILSARLSKSRRLENLIAQLPGEKKNGLFGNLIALSLGLTPNFKSNFDLAEDAKLQLSKDTYDDDLDNLLAQIGDQYADLFLAAKNLSDAILLSDILRVNTEITKAPLSASMIKRYDEHHQDLTLLKALVRQQLPEKYKEIFFDQSKNGYAGYIDGGASQEEFYKFIKPILEKMDGTEELLVKLNREDLLRKQRTFDNGSIPHQIHLGELHAILRRQEDFYPFLKDNREKIEKILTFRIPYYVGPLARGNSRFAWMTRKSEETITPWNFEEVVDKGASAQSFIERMTNFDKNLPNEKVLPKHSLLYEYFTVYNELTKVKYVTEGMRKPAFLSGEQKKAIVDLLFKTNRKVTVKQLKEDYFKKIECFDSVEISGVEDRFNASLGTYHDLLKIIKDKDFLDNEENEDILEDIVLTLTLFEDREMIEERLKTYAHLFDDKVMKQLKRRRYTGWGRLSRKLINGIRDKQSGKTILDFLKSDGFANRNFMQLIHDDSLTFKEDIQKAQVSGQGDSLHEHIANLAGSPAIKKGILQTVKVVDELVKVMGRHKPENIVIEMARENQTTQKGQKNSRERMKRIEEGIKELGSQILKEHPVENTQLQNEKLYLYYLQNGRDMYVDQELDINRLSDYDVDHIVPQSFLKDDSIDNKVLTRSDKARGKSDNVPSEEVVKKMKNYWRQLLNAKLITQRKFDNLTKAERGGLSELDKAGFIKRQLVETRQITKHVAQILDSRMNTKYDENDKLIREVKVITLKSKLVSDFRKDFQFYKVREINNYHHAHDAYLNAVVGTALIKKYPKLESEFVYGDYKVYDVRKMIAKSEQEIGKATAKYFFYSNIMNFFKTEITLANGEIRKRPLIETNGETGEIVWDKGRDFATVRKVLSMPQVNIVKKTEVQTGGFSKESILPKRNSDKLIARKKDWDPKKYGGFDSPTVAYSVLVVAKVEKGKSKKLKSVKELLGITIMERSSFEKNPIDFLEAKGYKEVKKDLIIKLPKYSLFELENGRKRMLASAGELQKGNELALPSKYVNFLYLASHYEKLKGSPEDNEQKQLFVEQHKHYLDEIIEQISEFSKRVILADANLDKVLSAYNKHRDKPIREQAENIIHLFTLTNLGAPAAFKYFDTTIDRKRYTSTKEVLDATLIHQSITGLYETRIDLSQLGGDGGPAPGGGGGTLNLEDEYRLYETSAEPEVSPGSTWLSDFPQAWAETGGMGLAVRQAPLIIPLKATSTPVSIKQYPMSQEAKLGIKPHIQRLLDQGILVPCQSPWNTPLLPVKKPGTNDYRPVQDLREVNKRVEDIHPTVPNPYNLLSGLPPSHRWYTVLDLKDAFFCLRLHPTSQPLFAFEWRDPGMGISGQLTWTRLPQGFKNSPTLFNEALHRDLADFRIQHPDLILLQYVDDILLAATSELDCQQGTRALLLTLGNLGYRASAKKAQLCQKQVKYLGYLLKEGQRWLTEARKETVMGQPTPKTPRQLREFLGKAGFCRLFIPGFAEMAAPLYPLTKPGTLFNWGPDQQKAYQEIKQALLTAPALGLPDLTKPFELFVDEKQGYAKGVLTQKLGPWRRPVAYLSKKLDPVAAGWPPCLRMVAAIAVLRKDAGKLTMGQPLVILAPHAVEALVKQPPDRWLSNARMTHYQAMLLDTDRVQFGPVVALNPATLLPLPEEGAPHDCLEILAETHGTRPDLTDQPIPDADHTWYTDGSSFLQEGQRKAGAAVTTETEVIWARALPAGTSAQRAELIALTQALKMAEGKRLNVYTDSRYAFATAHIHGEIYRRRGWLTSEGREIKNKSEILALLKALFLPKRLSIIHCLGHQKGDSAEARGNRLADQAAREAAIKTPPDTSTLLAGKRTADGSEFEKRTADGSEFESPKKKAKVE

SEQ ID NO: 1896 - protein, 2115 aa, synthetic construct
MPAAKRVKLDGGDKKYSIGLDIGTNSVGWAVITDEYKVPSKKFKVLGNTDRHSIKKNLIGALLFDSGETAEATRLKRTARRRYTRRKNRICYLQEIFSNEMAKVDDSFFHRLEESFLVEEDKKHERHPIFGNIVDEVAYHEKYPTIYHLRKKLVDSTDKADLRLIYLALAHMIKFRGHFLIEGDLNPDNSDVDKLFIQLVQTYNQLFEENPINASGVDAKAILSARLSKSRRLENLIAQLPGEKKNGLFGNLIALSLGLTPNFKSNFDLAEDAKLQLSKDTYDDDLDNLLAQIGDQYADLFLAAKNLSDAILLSDILRVNTEITKAPLSASMIKRYDEHHQDLTLLKALVRQQLPEKYKEIFFDQSKNGYAGYIDGGASQEEFYKFIKPILEKMDGTEELLVKLNREDLLRKQRTFDNGSIPHQIHLGELHAILRRQEDFYPFLKDNREKIEKILTFRIPYYVGPLARGNSRFAWMTRKSEETITPWNFEEVVDKGASAQSFIERMTNFDKNLPNEKVLPKHSLLYEYFTVYNELTKVKYVTEGMRKPAFLSGEQKKAIVDLLFKTNRKVTVKQLKEDYFKKIECFDSVEISGVEDRFNASLGTYHDLLKIIKDKDFLDNEENEDILEDIVLTLTLFEDREMIEERLKTYAHLFDDKVMKQLKRRRYTGWGRLSRKLINGIRDKQSGKTILDFLKSDGFANRNFMQLIHDDSLTFKEDIQKAQVSGQGDSLHEHIANLAGSPAIKKGILQTVKVVDELVKVMGRHKPENIVIEMARENQTTQKGQKNSRERMKRIEEGIKELGSQILKEHPVENTQLQNEKLYLYYLQNGRDMYVDQELDINRLSDYDVDHIVPQSFLKDDSIDNKVLTRSDKARGKSDNVPSEEVVKKMKNYWRQLLNAKLITQRKFDNLTKAERGGLSELDKAGFIKRQLVETRQITKHVAQILDSRMNTKYDENDKLIREVKVITLKSKLVSDFRKDFQFYKVREINNYHHAHDAYLNAVVGTALIKKYPKLESEFVYGDYKVYDVRKMIAKSEQEIGKATAKYFFYSNIMNFFKTEITLANGEIRKRPLIETNGETGEIVWDKGRDFATVRKVLSMPQVNIVKKTEVQTGGFSKESILPKRNSDKLIARKKDWDPKKYGGFDSPTVAYSVLVVAKVEKGKSKKLKSVKELLGITIMERSSFEKNPIDFLEAKGYKEVKKDLIIKLPKYSLFELENGRKRMLASAGELQKGNELALPSKYVNFLYLASHYEKLKGSPEDNEQKQLFVEQHKHYLDEIIEQISEFSKRVILADANLDKVLSAYNKHRDKPIREQAENIIHLFTLTNLGAPAAFKYFDTTIDRKRYTSTKEVLDATLIHQSITGLYETRIDLSQLGGDGGEAAAKEAAAKEAAAKEAAAKEAAAKEAAAKGGTLNLEDEYRLYETSAEPEVSPGSTWLSDFPQAWAETGGMGLAVRQAPLIIPLKATSTPVSIKQYPMSQEAKLGIKPHIQRLLDQGILVPCQSPWNTPLLPVKKPGTNDYRPVQDLREVNKRVEDIHPTVPNPYNLLSGLPPSHRWYTVLDLKDAFFCLRLHPTSQPLFAFEWRDPGMGISGQLTWTRLPQGFKNSPTLFNEALHRDLADFRIQHPDLILLQYVDDILLAATSELDCQQGTRALLLTLGNLGYRASAKKAQLCQKQVKYLGYLLKEGQRWLTEARKETVMGQPTPKTPRQLREFLGKAGFCRLFIPGFAEMAAPLYPLTKPGTLFNWGPDQQKAYQEIKQALLTAPALGLPDLTKPFELFVDEKQGYAKGVLTQKLGPWRRPVAYLSKKLDPVAAGWPPCLRMVAAIAVLRKDAGKLTMGQPLVILAPHAVEALVKQPPDRWLSNARMTHYQAMLLDTDRVQFGPVVALNPATLLPLPEEGAPHDCLEILAETHGTRPDLTDQPIPDADHTWYTDGSSFLQEGQRKAGAAVTTETEVIWARALPAGTSAQRAELIALTQALKMAEGKRLNVYTDSRYAFATAHIHGEIYRRRGWLTSEGREIKNKSEILALLKALFLPKRLSIIHCLGHQKGDSAEARGNRLADQAAREAAIKTPPDTSTLLAGKRTADGSEFEKRTADGSEFESPKKKAKVE

SEQ ID NO: 1897 - protein, 2091 aa, synthetic construct
MPAAKRVKLDGGDKKYSIGLDIGTNSVGWAVITDEYKVPSKKFKVLGNTDRHSIKKNLIGALLFDSGETAEATRLKRTARRRYTRRKNRICYLQEIFSNEMAKVDDSFFHRLEESFLVEEDKKHERHPIFGNIVDEVAYHEKYPTIYHLRKKLVDSTDKADLRLIYLALAHMIKFRGHFLIEGDLNPDNSDVDKLFIQLVQTYNQLFEENPINASGVDAKAILSARLSKSRRLENLIAQLPGEKKNGLFGNLIALSLGLTPNFKSNFDLAEDAKLQLSKDTYDDDLDNLLAQIGDQYADLFLAAKNLSDAILLSDILRVNTEITKAPLSASMIKRYDEHHQDLTLLKALVRQQLPEKYKEIFFDQSKNGYAGYIDGGASQEEFYKFIKPILEKMDGTEELLVKLNREDLLRKQRTFDNGSIPHQIHLGELHAILRRQEDFYPFLKDNREKIEKILTFRIPYYVGPLARGNSRFAWMTRKSEETITPWNFEEVVDKGASAQSFIERMTNFDKNLPNEKVLPKHSLLYEYFTVYNELTKVKYVTEGMRKPAFLSGEQKKAIVDLLFKTNRKVTVKQLKEDYFKKIECFDSVEISGVEDRFNASLGTYHDLLKIIKDKDFLDNEENEDILEDIVLTLTLFEDREMIEERLKTYAHLFDDKVMKQLKRRRYTGWGRLSRKLINGIRDKQSGKTILDFLKSDGFANRNFMQLIHDDSLTFKEDIQKAQVSGQGDSLHEHIANLAGSPAIKKGILQTVKVVDELVKVMGRHKPENIVIEMARENQTTQKGQKNSRERMKRIEEGIKELGSQILKEHPVENTQLQNEKLYLYYLQNGRDMYVDQELDINRLSDYDVDHIVPQSFLKDDSIDNKVLTRSDKARGKSDNVPSEEVVKKMKNYWRQLLNAKLITQRKFDNLTKAERGGLSELDKAGFIKRQLVETRQITKHVAQILDSRMNTKYDENDKLIREVKVITLKSKLVSDFRKDFQFYKVREINNYHHAHDAYLNAVVGTALIKKYPKLESEFVYGDYKVYDVRKMIAKSEQEIGKATAKYFFYSNIMNFFKTEITLANGEIRKRPLIETNGETGEIVWDKGRDFATVRKVLSMPQVNIVKKTEVQTGGFSKESILPKRNSDKLIARKKDWDPKKYGGFDSPTVAYSVLVVAKVEKGKSKKLKSVKELLGITIMERSSFEKNPIDFLEAKGYKEVKKDLIIKLPKYSLFELENGRKRMLASAGELQKGNELALPSKYVNFLYLASHYEKLKGSPEDNEQKQLFVEQHKHYLDEIIEQISEFSKRVILADANLDKVLSAYNKHRDKPIREQAENIIHLFTLTNLGAPAAFKYFDTTIDRKRYTSTKEVLDATLIHQSITGLYETRIDLSQLGGDGGGGSGGSGGTLNLEDEYRLYETSAEPEVSPGSTWLSDFPQAWAETGGMGLAVRQAPLIIPLKATSTPVSIKQYPMSQEAKLGIKPHIQRLLDQGILVPCQSPWNTPLLPVKKPGTNDYRPVQDLREVNKRVEDIHPTVPNPYNLLSGLPPSHRWYTVLDLKDAFFCLRLHPTSQPLFAFEWRDPGMGISGQLTWTRLPQGFKNSPTLFNEALHRDLADFRIQHPDLILLQYVDDILLAATSELDCQQGTRALLLTLGNLGYRASAKKAQLCQKQVKYLGYLLKEGQRWLTEARKETVMGQPTPKTPRQLREFLGKAGFCRLFIPGFAEMAAPLYPLTKPGTLFNWGPDQQKAYQEIKQALLTAPALGLPDLTKPFELFVDEKQGYAKGVLTQKLGPWRRPVAYLSKKLDPVAAGWPPCLRMVAAIAVLRKDAGKLTMGQPLVILAPHAVEALVKQPPDRWLSNARMTHYQAMLLDTDRVQFGPVVALNPATLLPLPEEGAPHDCLEILAETHGTRPDLTDQPIPDADHTWYTDGSSFLQEGQRKAGAAVTTETEVIWARALPAGTSAQRAELIALTQALKMAEGKRLNVYTDSRYAFATAHIHGEIYRRRGWLTSEGREIKNKSEILALLKALFLPKRLSIIHCLGHQKGDSAEARGNRLADQAAREAAIKTPPDTSTLLAGKRTADGSEFEKRTADGSEFESPKKKAKVE

SEQ ID NO: 1898 - protein, 2093 aa, synthetic construct
MPAAKRVKLDGGDKKYSIGLDIGTNSVGWAVITDEYKVPSKKFKVLGNTDRHSIKKNLIGALLFDSGETAEATRLKRTARRRYTRRKNRICYLQEIFSNEMAKVDDSFFHRLEESFLVEEDKKHERHPIFGNIVDEVAYHEKYPTIYHLRKKLVDSTDKADLRLIYLALAHMIKFRGHFLIEGDLNPDNSDVDKLFIQLVQTYNQLFEENPINASGVDAKAILSARLSKSRRLENLIAQLPGEKKNGLFGNLIALSLGLTPNFKSNFDLAEDAKLQLSKDTYDDDLDNLLAQIGDQYADLFLAAKNLSDAILLSDILRVNTEITKAPLSASMIKRYDEHHQDLTLLKALVRQQLPEKYKEIFFDQSKNGYAGYIDGGASQEEFYKFIKPILEKMDGTEELLVKLNREDLLRKQRTFDNGSIPHQIHLGELHAILRRQEDFYPFLKDNREKIEKILTFRIPYYVGPLARGNSRFAWMTRKSEETITPWNFEEVVDKGASAQSFIERMTNFDKNLPNEKVLPKHSLLYEYFTVYNELTKVKYVTEGMRKPAFLSGEQKKAIVDLLFKTNRKVTVKQLKEDYFKKIECFDSVEISGVEDRFNASLGTYHDLLKIIKDKDFLDNEENEDILEDIVLTLTLFEDREMIEERLKTYAHLFDDKVMKQLKRRRYTGWGRLSRKLINGIRDKQSGKTILDFLKSDGFANRNFMQLIHDDSLTFKEDIQKAQVSGQGDSLHEHIANLAGSPAIKKGILQTVKVVDELVKVMGRHKPENIVIEMARENQTTQKGQKNSRERMKRIEEGIKELGSQILKEHPVENTQLQNEKLYLYYLQNGRDMYVDQELDINRLSDYDVDHIVPQSFLKDDSIDNKVLTRSDKARGKSDNVPSEEVVKKMKNYWRQLLNAKLITQRKFDNLTKAERGGLSELDKAGFIKRQLVETRQITKHVAQILDSRMNTKYDENDKLIREVKVITLKSKLVSDFRKDFQFYKVREINNYHHAHDAYLNAVVGTALIKKYPKLESEFVYGDYKVYDVRKMIAKSEQEIGKATAKYFFYSNIMNFFKTEITLANGEIRKRPLIETNGETGEIVWDKGRDFATVRKVLSMPQVNIVKKTEVQTGGFSKESILPKRNSDKLIARKKDWDPKKYGGFDSPTVAYSVLVVAKVEKGKSKKLKSVKELLGITIMERSSFEKNPIDFLEAKGYKEVKKDLIIKLPKYSLFELENGRKRMLASAGELQKGNELALPSKYVNFLYLASHYEKLKGSPEDNEQKQLFVEQHKHYLDEIIEQISEFSKRVILADANLDKVLSAYNKHRDKPIREQAENIIHLFTLTNLGAPAAFKYFDTTIDRKRYTSTKEVLDATLIHQSITGLYETRIDLSQLGGDGGEAAAKGSSGGTLNLEDEYRLYETSAEPEVSPGSTWLSDFPQAWAETGGMGLAVRQAPLIIPLKATSTPVSIKQYPMSQEAKLGIKPHIQRLLDQGILVPCQSPWNTPLLPVKKPGTNDYRPVQDLREVNKRVEDIHPTVPNPYNLLSGLPPSHRWYTVLDLKDAFFCLRLHPTSQPLFAFEWRDPGMGISGQLTWTRLPQGFKNSPTLFNEALHRDLADFRIQHPDLILLQYVDDILLAATSELDCQQGTRALLLTLGNLGYRASAKKAQLCQKQVKYLGYLLKEGQRWLTEARKETVMGQPTPKTPRQLREFLGKAGFCRLFIPGFAEMAAPLYPLTKPGTLFNWGPDQQKAYQEIKQALLTAPALGLPDLTKPFELFVDEKQGYAKGVLTQKLGPWRRPVAYLSKKLDPVAAGWPPCLRMVAAIAVLRKDAGKLTMGQPLVILAPHAVEALVKQPPDRWLSNARMTHYQAMLLDTDRVQFGPVVALNPATLLPLPEEGAPHDCLEILAETHGTRPDLTDQPIPDADHTWYTDGSSFLQEGQRKAGAAVTTETEVIWARALPAGTSAQRAELIALTQALKMAEGKRLNVYTDSRYAFATAHIHGEIYRRRGWLTSEGREIKNKSEILALLKALFLPKRLSIIHCLGHQKGDSAEARGNRLADQAAREAAIKTPPDTSTLLAGKRTADGSEFEKRTADGSEFESPKKKAKVE

SEQ ID NO: 1899 - protein, 2094 aa, synthetic construct
MPAAKRVKLDGGDKKYSIGLDIGTNSVGWAVITDEYKVPSKKFKVLGNTDRHSIKKNLIGALLFDSGETAEATRLKRTARRRYTRRKNRICYLQEIFSNEMAKVDDSFFHRLEESFLVEEDKKHERHPIFGNIVDEVAYHEKYPTIYHLRKKLVDSTDKADLRLIYLALAHMIKFRGHFLIEGDLNPDNSDVDKLFIQLVQTYNQLFEENPINASGVDAKAILSARLSKSRRLENLIAQLPGEKKNGLFGNLIALSLGLTPNFKSNFDLAEDAKLQLSKDTYDDDLDNLLAQIGDQYADLFLAAKNLSDAILLSDILRVNTEITKAPLSASMIKRYDEHHQDLTLLKALVRQQLPEKYKEIFFDQSKNGYAGYIDGGASQEEFYKFIKPILEKMDGTEELLVKLNREDLLRKQRTFDNGSIPHQIHLGELHAILRRQEDFYPFLKDNREKIEKILTFRIPYYVGPLARGNSRFAWMTRKSEETITPWNFEEVVDKGASAQSFIERMTNFDKNLPNEKVLPKHSLLYEYFTVYNELTKVKYVTEGMRKPAFLSGEQKKAIVDLLFKTNRKVTVKQLKEDYFKKIECFDSVEISGVEDRFNASLGTYHDLLKIIKDKDFLDNEENEDILEDIVLTLTLFEDREMIEERLKTYAHLFDDKVMKQLKRRRYTGWGRLSRKLINGIRDKQSGKTILDFLKSDGFANRNFMQLIHDDSLTFKEDIQKAQVSGQGDSLHEHIANLAGSPAIKKGILQTVKVVDELVKVMGRHKPENIVIEMARENQTTQKGQKNSRERMKRIEEGIKELGSQILKEHPVENTQLQNEKLYLYYLQNGRDMYVDQELDINRLSDYDVDHIVPQSFLKDDSIDNKVLTRSDKARGKSDNVPSEEVVKKMKNYWRQLLNAKLITQRKFDNLTKAERGGLSELDKAGFIKRQLVETRQITKHVAQILDSRMNTKYDENDKLIREVKVITLKSKLVSDFRKDFQFYKVREINNYHHAHDAYLNAVVGTALIKKYPKLESEFVYGDYKVYDVRKMIAKSEQEIGKATAKYFFYSNIMNFFKTEITLANGEIRKRPLIETNGETGEIVWDKGRDFATVRKVLSMPQVNIVKKTEVQTGGFSKESILPKRNSDKLIARKKDWDPKKYGGFDSPTVAYSVLVVAKVEKGKSKKLKSVKELLGITIMERSSFEKNPIDFLEAKGYKEVKKDLIIKLPKYSLFELENGRKRMLASAGELQKGNELALPSKYVNFLYLASHYEKLKGSPEDNEQKQLFVEQHKHYLDEIIEQISEFSKRVILADANLDKVLSAYNKHRDKPIREQAENIIHLFTLTNLGAPAAFKYFDTTIDRKRYTSTKEVLDATLIHQSITGLYETRIDLSQLGGDGGGGSPAPGGGGGTLNLEDEYRLYETSAEPEVSPGSTWLSDFPQAWAETGGMGLAVRQAPLIIPLKATSTPVSIKQYPMSQEAKLGIKPHIQRLLDQGILVPCQSPWNTPLLPVKKPGTNDYRPVQDLREVNKRVEDIHPTVPNPYNLLSGLPPSHRWYTVLDLKDAFFCLRLHPTSQPLFAFEWRDPGMGISGQLTWTRLPQGFKNSPTLFNEALHRDLADFRIQHPDLILLQYVDDILLAATSELDCQQGTRALLLTLGNLGYRASAKKAQLCQKQVKYLGYLLKEGQRWLTEARKETVMGQPTPKTPRQLREFLGKAGFCRLFIPGFAEMAAPLYPLTKPGTLFNWGPDQQKAYQEIKQALLTAPALGLPDLTKPFELFVDEKQGYAKGVLTQKLGPWRRPVAYLSKKLDPVAAGWPPCLRMVAAIAVLRKDAGKLTMGQPLVILAPHAVEALVKQPPDRWLSNARMTHYQAMLLDTDRVQFGPVVALNPATLLPLPEEGAPHDCLEILAETHGTRPDLTDQPIPDADHTWYTDGSSFLQEGQRKAGAAVTTETEVIWARALPAGTSAQRAELIALTQALKMAEGKRLNVYTDSRYAFATAHIHGEIYRRRGWLTSEGREIKNKSEILALLKALFLPKRLSIIHCLGHQKGDSAEARGNRLADQAAREAAIKTPPDTSTLLAGKRTADGSEFEKRTADGSEFESPKKKAKVE

SEQ ID NO: 1900 - protein, 2091 aa, synthetic construct
MPAAKRVKLDGGDKKYSIGLDIGTNSVGWAVITDEYKVPSKKFKVLGNTDRHSIKKNLIGALLFDSGETAEATRLKRTARRRYTRRKNRICYLQEIFSNEMAKVDDSFFHRLEESFLVEEDKKHERHPIFGNIVDEVAYHEKYPTIYHLRKKLVDSTDKADLRLIYLALAHMIKFRGHFLIEGDLNPDNSDVDKLFIQLVQTYNQLFEENPINASGVDAKAILSARLSKSRRLENLIAQLPGEKKNGLFGNLIALSLGLTPNFKSNFDLAEDAKLQLSKDTYDDDLDNLLAQIGDQYADLFLAAKNLSDAILLSDILRVNTEITKAPLSASMIKRYDEHHQDLTLLKALVRQQLPEKYKEIFFDQSKNGYAGYIDGGASQEEFYKFIKPILEKMDGTEELLVKLNREDLLRKQRTFDNGSIPHQIHLGELHAILRRQEDFYPFLKDNREKIEKILTFRIPYYVGPLARGNSRFAWMTRKSEETITPWNFEEVVDKGASAQSFIERMTNFDKNLPNEKVLPKHSLLYEYFTVYNELTKVKYVTEGMRKPAFLSGEQKKAIVDLLFKTNRKVTVKQLKEDYFKKIECFDSVEISGVEDRFNASLGTYHDLLKIIKDKDFLDNEENEDILEDIVLTLTLFEDREMIEERLKTYAHLFDDKVMKQLKRRRYTGWGRLSRKLINGIRDKQSGKTILDFLKSDGFANRNFMQLIHDDSLTFKEDIQKAQVSGQGDSLHEHIANLAGSPAIKKGILQTVKVVDELVKVMGRHKPENIVIEMARENQTTQKGQKNSRERMKRIEEGIKELGSQILKEHPVENTQLQNEKLYLYYLQNGRDMYVDQELDINRLSDYDVDHIVPQSFLKDDSIDNKVLTRSDKARGKSDNVPSEEVVKKMKNYWRQLLNAKLITQRKFDNLTKAERGGLSELDKAGFIKRQLVETRQITKHVAQILDSRMNTKYDENDKLIREVKVITLKSKLVSDFRKDFQFYKVREINNYHHAHDAYLNAVVGTALIKKYPKLESEFVYGDYKVYDVRKMIAKSEQEIGKATAKYFFYSNIMNFFKTEITLANGEIRKRPLIETNGETGEIVWDKGRDFATVRKVLSMPQVNIVKKTEVQTGGFSKESILPKRNSDKLIARKKDWDPKKYGGFDSPTVAYSVLVVAKVEKGKSKKLKSVKELLGITIMERSSFEKNPIDFLEAKGYKEVKKDLIIKLPKYSLFELENGRKRMLASAGELQKGNELALPSKYVNFLYLASHYEKLKGSPEDNEQKQLFVEQHKHYLDEIIEQISEFSKRVILADANLDKVLSAYNKHRDKPIREQAENIIHLFTLTNLGAPAAFKYFDTTIDRKRYTSTKEVLDATLIHQSITGLYETRIDLSQLGGDGGPAPGSSGGTLNLEDEYRLYETSAEPEVSPGSTWLSDFPQAWAETGGMGLAVRQAPLIIPLKATSTPVSIKQYPMSQEAKLGIKPHIQRLLDQGILVPCQSPWNTPLLPVKKPGTNDYRPVQDLREVNKRVEDIHPTVPNPYNLLSGLPPSHRWYTVLDLKDAFFCLRLHPTSQPLFAFEWRDPGMGISGQLTWTRLPQGFKNSPTLFNEALHRDLADFRIQHPDLILLQYVDDILLAATSELDCQQGTRALLLTLGNLGYRASAKKAQLCQKQVKYLGYLLKEGQRWLTEARKETVMGQPTPKTPRQLREFLGKAGFCRLFIPGFAEMAAPLYPLTKPGTLFNWGPDQQKAYQEIKQALLTAPALGLPDLTKPFELFVDEKQGYAKGVLTQKLGPWRRPVAYLSKKLDPVAAGWPPCLRMVAAIAVLRKDAGKLTMGQPLVILAPHAVEALVKQPPDRWLSNARMTHYQAMLLDTDRVQFGPVVALNPATLLPLPEEGAPHDCLEILAETHGTRPDLTDQPIPDADHTWYTDGSSFLQEGQRKAGAAVTTETEVIWARALPAGTSAQRAELIALTQALKMAEGKRLNVYTDSRYAFATAHIHGEIYRRRGWLTSEGREIKNKSEILALLKALFLPKRLSIIHCLGHQKGDSAEARGNRLADQAAREAAIKTPPDTSTLLAGKRTADGSEFEKRTADGSEFESPKKKAKVE

SEQ ID NO: 1901 - protein, 2096 aa, synthetic construct
MPAAKRVKLDGGDKKYSIGLDIGTNSVGWAVITDEYKVPSKKFKVLGNTDRHSIKKNLIGALLFDSGETAEATRLKRTARRRYTRRKNRICYLQEIFSNEMAKVDDSFFHRLEESFLVEEDKKHERHPIFGNIVDEVAYHEKYPTIYHLRKKLVDSTDKADLRLIYLALAHMIKFRGHFLIEGDLNPDNSDVDKLFIQLVQTYNQLFEENPINASGVDAKAILSARLSKSRRLENLIAQLPGEKKNGLFGNLIALSLGLTPNFKSNFDLAEDAKLQLSKDTYDDDLDNLLAQIGDQYADLFLAAKNLSDAILLSDILRVNTEITKAPLSASMIKRYDEHHQDLTLLKALVRQQLPEKYKEIFFDQSKNGYAGYIDGGASQEEFYKFIKPILEKMDGTEELLVKLNREDLLRKQRTFDNGSIPHQIHLGELHAILRRQEDFYPFLKDNREKIEKILTFRIPYYVGPLARGNSRFAWMTRKSEETITPWNFEEVVDKGASAQSFIERMTNFDKNLPNEKVLPKHSLLYEYFTVYNELTKVKYVTEGMRKPAFLSGEQKKAIVDLLFKTNRKVTVKQLKEDYFKKIECFDSVEISGVEDRFNASLGTYHDLLKIIKDKDFLDNEENEDILEDIVLTLTLFEDREMIEERLKTYAHLFDDKVMKQLKRRRYTGWGRLSRKLINGIRDKQSGKTILDFLKSDGFANRNFMQLIHDDSLTFKEDIQKAQVSGQGDSLHEHIANLAGSPAIKKGILQTVKVVDELVKVMGRHKPENIVIEMARENQTTQKGQKNSRERMKRIEEGIKELGSQILKEHPVENTQLQNEKLYLYYLQNGRDMYVDQELDINRLSDYDVDHIVPQSFLKDDSIDNKVLTRSDKARGKSDNVPSEEVVKKMKNYWRQLLNAKLITQRKFDNLTKAERGGLSELDKAGFIKRQLVETRQITKHVAQILDSRMNTKYDENDKLIREVKVITLKSKLVSDFRKDFQFYKVREINNYHHAHDAYLNAVVGTALIKKYPKLESEFVYGDYKVYDVRKMIAKSEQEIGKATAKYFFYSNIMNFFKTEITLANGEIRKRPLIETNGETGEIVWDKGRDFATVRKVLSMPQVNIVKKTEVQTGGFSKESILPKRNSDKLIARKKDWDPKKYGGFDSPTVAYSVLVVAKVEKGKSKKLKSVKELLGITIMERSSFEKNPIDFLEAKGYKEVKKDLIIKLPKYSLFELENGRKRMLASAGELQKGNELALPSKYVNFLYLASHYEKLKGSPEDNEQKQLFVEQHKHYLDEIIEQISEFSKRVILADANLDKVLSAYNKHRDKPIREQAENIIHLFTLTNLGAPAAFKYFDTTIDRKRYTSTKEVLDATLIHQSITGLYETRIDLSQLGGDGGGSSGGSEAAAKGGTLNLEDEYRLYETSAEPEVSPGSTWLSDFPQAWAETGGMGLAVRQAPLIIPLKATSTPVSIKQYPMSQEAKLGIKPHIQRLLDQGILVPCQSPWNTPLLPVKKPGTNDYRPVQDLREVNKRVEDIHPTVPNPYNLLSGLPPSHRWYTVLDLKDAFFCLRLHPTSQPLFAFEWRDPGMGISGQLTWTRLPQGFKNSPTLFNEALHRDLADFRIQHPDLILLQYVDDILLAATSELDCQQGTRALLLTLGNLGYRASAKKAQLCQKQVKYLGYLLKEGQRWLTEARKETVMGQPTPKTPRQLREFLGKAGFCRLFIPGFAEMAAPLYPLTKPGTLFNWGPDQQKAYQEIKQALLTAPALGLPDLTKPFELFVDEKQGYAKGVLTQKLGPWRRPVAYLSKKLDPVAAGWPPCLRMVAAIAVLRKDAGKLTMGQPLVILAPHAVEALVKQPPDRWLSNARMTHYQAMLLDTDRVQFGPVVALNPATLLPLPEEGAPHDCLEILAETHGTRPDLTDQPIPDADHTWYTDGSSFLQEGQRKAGAAVTTETEVIWARALPAGTSAQRAELIALTQALKMAEGKRLNVYTDSRYAFATAHIHGEIYRRRGWLTSEGREIKNKSEILALLKALFLPKRLSIIHCLGHQKGDSAEARGNRLADQAAREAAIKTPPDTSTLLAGKRTADGSEFEKRTADGSEFESPKKKAKVE

SEQ ID NO: 1902 - protein, 2094 aa, synthetic construct
MPAAKRVKLDGGDKKYSIGLDIGTNSVGWAVITDEYKVPSKKFKVLGNTDRHSIKKNLIGALLFDSGETAEATRLKRTARRRYTRRKNRICYLQEIFSNEMAKVDDSFFHRLEESFLVEEDKKHERHPIFGNIVDEVAYHEKYPTIYHLRKKLVDSTDKADLRLIYLALAHMIKFRGHFLIEGDLNPDNSDVDKLFIQLVQTYNQLFEENPINASGVDAKAILSARLSKSRRLENLIAQLPGEKKNGLFGNLIALSLGLTPNFKSNFDLAEDAKLQLSKDTYDDDLDNLLAQIGDQYADLFLAAKNLSDAILLSDILRVNTEITKAPLSASMIKRYDEHHQDLTLLKALVRQQLPEKYKEIFFDQSKNGYAGYIDGGASQEEFYKFIKPILEKMDGTEELLVKLNREDLLRKQRTFDNGSIPHQIHLGELHAILRRQEDFYPFLKDNREKIEKILTFRIPYYVGPLARGNSRFAWMTRKSEETITPWNFEEVVDKGASAQSFIERMTNFDKNLPNEKVLPKHSLLYEYFTVYNELTKVKYVTEGMRKPAFLSGEQKKAIVDLLFKTNRKVTVKQLKEDYFKKIECFDSVEISGVEDRFNASLGTYHDLLKIIKDKDFLDNEENEDILEDIVLTLTLFEDREMIEERLKTYAHLFDDKVMKQLKRRRYTGWGRLSRKLINGIRDKQSGKTILDFLKSDGFANRNFMQLIHDDSLTFKEDIQKAQVSGQGDSLHEHIANLAGSPAIKKGILQTVKVVDELVKVMGRHKPENIVIEMARENQTTQKGQKNSRERMKRIEEGIKELGSQILKEHPVENTQLQNEKLYLYYLQNGRDMYVDQELDINRLSDYDVDHIVPQSFLKDDSIDNKVLTRSDKARGKSDNVPSEEVVKKMKNYWRQLLNAKLITQRKFDNLTKAERGGLSELDKAGFIKRQLVETRQITKHVAQILDSRMNTKYDENDKLIREVKVITLKSKLVSDFRKDFQFYKVREINNYHHAHDAYLNAVVGTALIKKYPKLESEFVYGDYKVYDVRKMIAKSEQEIGKATAKYFFYSNIMNFFKTEITLANGEIRKRPLIETNGETGEIVWDKGRDFATVRKVLSMPQVNIVKKTEVQTGGFSKESILPKRNSDKLIARKKDWDPKKYGGFDSPTVAYSVLVVAKVEKGKSKKLKSVKELLGITIMERSSFEKNPIDFLEAKGYKEVKKDLIIKLPKYSLFELENGRKRMLASAGELQKGNELALPSKYVNFLYLASHYEKLKGSPEDNEQKQLFVEQHKHYLDEIIEQISEFSKRVILADANLDKVLSAYNKHRDKPIREQAENIIHLFTLTNLGAPAAFKYFDTTIDRKRYTSTKEVLDATLIHQSITGLYETRIDLSQLGGDGGPAPGGSGSSGGTLNLEDEYRLYETSAEPEVSPGSTWLSDFPQAWAETGGMGLAVRQAPLIIPLKATSTPVSIKQYPMSQEAKLGIKPHIQRLLDQGILVPCQSPWNTPLLPVKKPGTNDYRPVQDLREVNKRVEDIHPTVPNPYNLLSGLPPSHRWYTVLDLKDAFFCLRLHPTSQPLFAFEWRDPGMGISGQLTWTRLPQGFKNSPTLFNEALHRDLADFRIQHPDLILLQYVDDILLAATSELDCQQGTRALLLTLGNLGYRASAKKAQLCQKQVKYLGYLLKEGQRWLTEARKETVMGQPTPKTPRQLREFLGKAGFCRLFIPGFAEMAAPLYPLTKPGTLFNWGPDQQKAYQEIKQALLTAPALGLPDLTKPFELFVDEKQGYAKGVLTQKLGPWRRPVAYLSKKLDPVAAGWPPCLRMVAAIAVLRKDAGKLTMGQPLVILAPHAVEALVKQPPDRWLSNARMTHYQAMLLDTDRVQFGPVVALNPATLLPLPEEGAPHDCLEILAETHGTRPDLTDQPIPDADHTWYTDGSSFLQEGQRKAGAAVTTETEVIWARALPAGTSAQRAELIALTQALKMAEGKRLNVYTDSRYAFATAHIHGEIYRRRGWLTSEGREIKNKSEILALLKALFLPKRLSIIHCLGHQKGDSAEARGNRLADQAAREAAIKTPPDTSTLLAGKRTADGSEFEKRTADGSEFESPKKKAKVE

SEQ ID NO: 1903 - protein, 2094 aa, synthetic construct
MPAAKRVKLDGGDKKYSIGLDIGTNSVGWAVITDEYKVPSKKFKVLGNTDRHSIKKNLIGALLFDSGETAEATRLKRTARRRYTRRKNRICYLQEIFSNEMAKVDDSFFHRLEESFLVEEDKKHERHPIFGNIVDEVAYHEKYPTIYHLRKKLVDSTDKADLRLIYLALAHMIKFRGHFLIEGDLNPDNSDVDKLFIQLVQTYNQLFEENPINASGVDAKAILSARLSKSRRLENLIAQLPGEKKNGLFGNLIALSLGLTPNFKSNFDLAEDAKLQLSKDTYDDDLDNLLAQIGDQYADLFLAAKNLSDAILLSDILRVNTEITKAPLSASMIKRYDEHHQDLTLLKALVRQQLPEKYKEIFFDQSKNGYAGYIDGGASQEEFYKFIKPILEKMDGTEELLVKLNREDLLRKQRTFDNGSIPHQIHLGELHAILRRQEDFYPFLKDNREKIEKILTFRIPYYVGPLARGNSRFAWMTRKSEETITPWNFEEVVDKGASAQSFIERMTNFDKNLPNEKVLPKHSLLYEYFTVYNELTKVKYVTEGMRKPAFLSGEQKKAIVDLLFKTNRKVTVKQLKEDYFKKIECFDSVEISGVEDRFNASLGTYHDLLKIIKDKDFLDNEENEDILEDIVLTLTLFEDREMIEERLKTYAHLFDDKVMKQLKRRRYTGWGRLSRKLINGIRDKQSGKTILDFLKSDGFANRNFMQLIHDDSLTFKEDIQKAQVSGQGDSLHEHIANLAGSPAIKKGILQTVKVVDELVKVMGRHKPENIVIEMARENQTTQKGQKNSRERMKRIEEGIKELGSQILKEHPVENTQLQNEKLYLYYLQNGRDMYVDQELDINRLSDYDVDHIVPQSFLKDDSIDNKVLTRSDKARGKSDNVPSEEVVKKMKNYWRQLLNAKLITQRKFDNLTKAERGGLSELDKAGFIKRQLVETRQITKHVAQILDSRMNTKYDENDKLIREVKVITLKSKLVSDFRKDFQFYKVREINNYHHAHDAYLNAVVGTALIKKYPKLESEFVYGDYKVYDVRKMIAKSEQEIGKATAKYFFYSNIMNFFKTEITLANGEIRKRPLIETNGETGEIVWDKGRDFATVRKVLSMPQVNIVKKTEVQTGGFSKESILPKRNSDKLIARKKDWDPKKYGGFDSPTVAYSVLVVAKVEKGKSKKLKSVKELLGITIMERSSFEKNPIDFLEAKGYKEVKKDLIIKLPKYSLFELENGRKRMLASAGELQKGNELALPSKYVNFLYLASHYEKLKGSPEDNEQKQLFVEQHKHYLDEIIEQISEFSKRVILADANLDKVLSAYNKHRDKPIREQAENIIHLFTLTNLGAPAAFKYFDTTIDRKRYTSTKEVLDATLIHQSITGLYETRIDLSQLGGDGGGGSPAPGSSGGTLNLEDEYRLYETSAEPEVSPGSTWLSDFPQAWAETGGMGLAVRQAPLIIPLKATSTPVSIKQYPMSQEAKLGIKPHIQRLLDQGILVPCQSPWNTPLLPVKKPGTNDYRPVQDLREVNKRVEDIHPTVPNPYNLLSGLPPSHRWYTVLDLKDAFFCLRLHPTSQPLFAFEWRDPGMGISGQLTWTRLPQGFKNSPTLFNEALHRDLADFRIQHPDLILLQYVDDILLAATSELDCQQGTRALLLTLGNLGYRASAKKAQLCQKQVKYLGYLLKEGQRWLTEARKETVMGQPTPKTPRQLREFLGKAGFCRLFIPGFAEMAAPLYPLTKPGTLFNWGPDQQKAYQEIKQALLTAPALGLPDLTKPFELFVDEKQGYAKGVLTQKLGPWRRPVAYLSKKLDPVAAGWPPCLRMVAAIAVLRKDAGKLTMGQPLVILAPHAVEALVKQPPDRWLSNARMTHYQAMLLDTDRVQFGPVVALNPATLLPLPEEGAPHDCLEILAETHGTRPDLTDQPIPDADHTWYTDGSSFLQEGQRKAGAAVTTETEVIWARALPAGTSAQRAELIALTQALKMAEGKRLNVYTDSRYAFATAHIHGEIYRRRGWLTSEGREIKNKSEILALLKALFLPKRLSIIHCLGHQKGDSAEARGNRLADQAAREAAIKTPPDTSTLLAGKRTADGSEFEKRTADGSEFESPKKKAKVE

SEQ ID NO: 1904 - protein, 2091 aa, synthetic construct
MPAAKRVKLDGGDKKYSIGLDIGTNSVGWAVITDEYKVPSKKFKVLGNTDRHSIKKNLIGALLFDSGETAEATRLKRTARRRYTRRKNRICYLQEIFSNEMAKVDDSFFHRLEESFLVEEDKKHERHPIFGNIVDEVAYHEKYPTIYHLRKKLVDSTDKADLRLIYLALAHMIKFRGHFLIEGDLNPDNSDVDKLFIQLVQTYNQLFEENPINASGVDAKAILSARLSKSRRLENLIAQLPGEKKNGLFGNLIALSLGLTPNFKSNFDLAEDAKLQLSKDTYDDDLDNLLAQIGDQYADLFLAAKNLSDAILLSDILRVNTEITKAPLSASMIKRYDEHHQDLTLLKALVRQQLPEKYKEIFFDQSKNGYAGYIDGGASQEEFYKFIKPILEKMDGTEELLVKLNREDLLRKQRTFDNGSIPHQIHLGELHAILRRQEDFYPFLKDNREKIEKILTFRIPYYVGPLARGNSRFAWMTRKSEETITPWNFEEVVDKGASAQSFIERMTNFDKNLPNEKVLPKHSLLYEYFTVYNELTKVKYVTEGMRKPAFLSGEQKKAIVDLLFKTNRKVTVKQLKEDYFKKIECFDSVEISGVEDRFNASLGTYHDLLKIIKDKDFLDNEENEDILEDIVLTLTLFEDREMIEERLKTYAHLFDDKVMKQLKRRRYTGWGRLSRKLINGIRDKQSGKTILDFLKSDGFANRNFMQLIHDDSLTFKEDIQKAQVSGQGDSLHEHIANLAGSPAIKKGILQTVKVVDELVKVMGRHKPENIVIEMARENQTTQKGQKNSRERMKRIEEGIKELGSQILKEHPVENTQLQNEKLYLYYLQNGRDMYVDQELDINRLSDYDVDHIVPQSFLKDDSIDNKVLTRSDKARGKSDNVPSEEVVKKMKNYWRQLLNAKLITQRKFDNLTKAERGGLSELDKAGFIKRQLVETRQITKHVAQILDSRMNTKYDENDKLIREVKVITLKSKLVSDFRKDFQFYKVREINNYHHAHDAYLNAVVGTALIKKYPKLESEFVYGDYKVYDVRKMIAKSEQEIGKATAKYFFYSNIMNFFKTEITLANGEIRKRPLIETNGETGEIVWDKGRDFATVRKVLSMPQVNIVKKTEVQTGGFSKESILPKRNSDKLIARKKDWDPKKYGGFDSPTVAYSVLVVAKVEKGKSKKLKSVKELLGITIMERSSFEKNPIDFLEAKGYKEVKKDLIIKLPKYSLFELENGRKRMLASAGELQKGNELALPSKYVNFLYLASHYEKLKGSPEDNEQKQLFVEQHKHYLDEIIEQISEFSKRVILADANLDKVLSAYNKHRDKPIREQAENIIHLFTLTNLGAPAAFKYFDTTIDRKRYTSTKEVLDATLIHQSITGLYETRIDLSQLGGDGGGSSGGGGGTLNLEDEYRLYETSAEPEVSPGSTWLSDFPQAWAETGGMGLAVRQAPLIIPLKATSTPVSIKQYPMSQEAKLGIKPHIQRLLDQGILVPCQSPWNTPLLPVKKPGTNDYRPVQDLREVNKRVEDIHPTVPNPYNLLSGLPPSHRWYTVLDLKDAFFCLRLHPTSQPLFAFEWRDPGMGISGQLTWTRLPQGFKNSPTLFNEALHRDLADFRIQHPDLILLQYVDDILLAATSELDCQQGTRALLLTLGNLGYRASAKKAQLCQKQVKYLGYLLKEGQRWLTEARKETVMGQPTPKTPRQLREFLGKAGFCRLFIPGFAEMAAPLYPLTKPGTLFNWGPDQQKAYQEIKQALLTAPALGLPDLTKPFELFVDEKQGYAKGVLTQKLGPWRRPVAYLSKKLDPVAAGWPPCLRMVAAIAVLRKDAGKLTMGQPLVILAPHAVEALVKQPPDRWLSNARMTHYQAMLLDTDRVQFGPVVALNPATLLPLPEEGAPHDCLEILAETHGTRPDLTDQPIPDADHTWYTDGSSFLQEGQRKAGAAVTTETEVIWARALPAGTSAQRAELIALTQALKMAEGKRLNVYTDSRYAFATAHIHGEIYRRRGWLTSEGREIKNKSEILALLKALFLPKRLSIIHCLGHQKGDSAEARGNRLADQAAREAAIKTPPDTSTLLAGKRTADGSEFEKRTADGSEFESPKKKAKVE

SEQ ID NO: 1905 - protein, 2094 aa, synthetic construct
MPAAKRVKLDGGDKKYSIGLDIGTNSVGWAVITDEYKVPSKKFKVLGNTDRHSIKKNLIGALLFDSGETAEATRLKRTARRRYTRRKNRICYLQEIFSNEMAKVDDSFFHRLEESFLVEEDKKHERHPIFGNIVDEVAYHEKYPTIYHLRKKLVDSTDKADLRLIYLALAHMIKFRGHFLIEGDLNPDNSDVDKLFIQLVQTYNQLFEENPINASGVDAKAILSARLSKSRRLENLIAQLPGEKKNGLFGNLIALSLGLTPNFKSNFDLAEDAKLQLSKDTYDDDLDNLLAQIGDQYADLFLAAKNLSDAILLSDILRVNTEITKAPLSASMIKRYDEHHQDLTLLKALVRQQLPEKYKEIFFDQSKNGYAGYIDGGASQEEFYKFIKPILEKMDGTEELLVKLNREDLLRKQRTFDNGSIPHQIHLGELHAILRRQEDFYPFLKDNREKIEKILTFRIPYYVGPLARGNSRFAWMTRKSEETITPWNFEEVVDKGASAQSFIERMTNFDKNLPNEKVLPKHSLLYEYFTVYNELTKVKYVTEGMRKPAFLSGEQKKAIVDLLFKTNRKVTVKQLKEDYFKKIECFDSVEISGVEDRFNASLGTYHDLLKIIKDKDFLDNEENEDILEDIVLTLTLFEDREMIEERLKTYAHLFDDKVMKQLKRRRYTGWGRLSRKLINGIRDKQSGKTILDFLKSDGFANRNFMQLIHDDSLTFKEDIQKAQVSGQGDSLHEHIANLAGSPAIKKGILQTVKVVDELVKVMGRHKPENIVIEMARENQTTQKGQKNSRERMKRIEEGIKELGSQILKEHPVENTQLQNEKLYLYYLQNGRDMYVDQELDINRLSDYDVDHIVPQSFLKDDSIDNKVLTRSDKARGKSDNVPSEEVVKKMKNYWRQLLNAKLITQRKFDNLTKAERGGLSELDKAGFIKRQLVETRQITKHVAQILDSRMNTKYDENDKLIREVKVITLKSKLVSDFRKDFQFYKVREINNYHHAHDAYLNAVVGTALIKKYPKLESEFVYGDYKVYDVRKMIAKSEQEIGKATAKYFFYSNIMNFFKTEITLANGEIRKRPLIETNGETGEIVWDKGRDFATVRKVLSMPQVNIVKKTEVQTGGFSKESILPKRNSDKLIARKKDWDPKKYGGFDSPTVAYSVLVVAKVEKGKSKKLKSVKELLGITIMERSSFEKNPIDFLEAKGYKEVKKDLIIKLPKYSLFELENGRKRMLASAGELQKGNELALPSKYVNFLYLASHYEKLKGSPEDNEQKQLFVEQHKHYLDEIIEQISEFSKRVILADANLDKVLSAYNKHRDKPIREQAENIIHLFTLTNLGAPAAFKYFDTTIDRKRYTSTKEVLDATLIHQSITGLYETRIDLSQLGGDGGGGGGSSPAPGGTLNLEDEYRLYETSAEPEVSPGSTWLSDFPQAWAETGGMGLAVRQAPLIIPLKATSTPVSIKQYPMSQEAKLGIKPHIQRLLDQGILVPCQSPWNTPLLPVKKPGTNDYRPVQDLREVNKRVEDIHPTVPNPYNLLSGLPPSHRWYTVLDLKDAFFCLRLHPTSQPLFAFEWRDPGMGISGQLTWTRLPQGFKNSPTLFNEALHRDLADFRIQHPDLILLQYVDDILLAATSELDCQQGTRALLLTLGNLGYRASAKKAQLCQKQVKYLGYLLKEGQRWLTEARKETVMGQPTPKTPRQLREFLGKAGFCRLFIPGFAEMAAPLYPLTKPGTLFNWGPDQQKAYQEIKQALLTAPALGLPDLTKPFELFVDEKQGYAKGVLTQKLGPWRRPVAYLSKKLDPVAAGWPPCLRMVAAIAVLRKDAGKLTMGQPLVILAPHAVEALVKQPPDRWLSNARMTHYQAMLLDTDRVQFGPVVALNPATLLPLPEEGAPHDCLEILAETHGTRPDLTDQPIPDADHTWYTDGSSFLQEGQRKAGAAVTTETEVIWARALPAGTSAQRAELIALTQALKMAEGKRLNVYTDSRYAFATAHIHGEIYRRRGWLTSEGREIKNKSEILALLKALFLPKRLSIIHCLGHQKGDSAEARGNRLADQAAREAAIKTPPDTSTLLAGKRTADGSEFEKRTADGSEFESPKKKAKVE

SEQ ID NO: 1906 - protein, 2096 aa, synthetic construct
MPAAKRVKLDGGDKKYSIGLDIGTNSVGWAVITDEYKVPSKKFKVLGNTDRHSIKKNLIGALLFDSGETAEATRLKRTARRRYTRRKNRICYLQEIFSNEMAKVDDSFFHRLEESFLVEEDKKHERHPIFGNIVDEVAYHEKYPTIYHLRKKLVDSTDKADLRLIYLALAHMIKFRGHFLIEGDLNPDNSDVDKLFIQLVQTYNQLFEENPINASGVDAKAILSARLSKSRRLENLIAQLPGEKKNGLFGNLIALSLGLTPNFKSNFDLAEDAKLQLSKDTYDDDLDNLLAQIGDQYADLFLAAKNLSDAILLSDILRVNTEITKAPLSASMIKRYDEHHQDLTLLKALVRQQLPEKYKEIFFDQSKNGYAGYIDGGASQEEFYKFIKPILEKMDGTEELLVKLNREDLLRKQRTFDNGSIPHQIHLGELHAILRRQEDFYPFLKDNREKIEKILTFRIPYYVGPLARGNSRFAWMTRKSEETITPWNFEEVVDKGASAQSFIERMTNFDKNLPNEKVLPKHSLLYEYFTVYNELTKVKYVTEGMRKPAFLSGEQKKAIVDLLFKTNRKVTVKQLKEDYFKKIECFDSVEISGVEDRFNASLGTYHDLLKIIKDKDFLDNEENEDILEDIVLTLTLFEDREMIEERLKTYAHLFDDKVMKQLKRRRYTGWGRLSRKLINGIRDKQSGKTILDFLKSDGFANRNFMQLIHDDSLTFKEDIQKAQVSGQGDSLHEHIANLAGSPAIKKGILQTVKVVDELVKVMGRHKPENIVIEMARENQTTQKGQKNSRERMKRIEEGIKELGSQILKEHPVENTQLQNEKLYLYYLQNGRDMYVDQELDINRLSDYDVDHIVPQSFLKDDSIDNKVLTRSDKARGKSDNVPSEEVVKKMKNYWRQLLNAKLITQRKFDNLTKAERGGLSELDKAGFIKRQLVETRQITKHVAQILDSRMNTKYDENDKLIREVKVITLKSKLVSDFRKDFQFYKVREINNYHHAHDAYLNAVVGTALIKKYPKLESEFVYGDYKVYDVRKMIAKSEQEIGKATAKYFFYSNIMNFFKTEITLANGEIRKRPLIETNGETGEIVWDKGRDFATVRKVLSMPQVNIVKKTEVQTGGFSKESILPKRNSDKLIARKKDWDPKKYGGFDSPTVAYSVLVVAKVEKGKSKKLKSVKELLGITIMERSSFEKNPIDFLEAKGYKEVKKDLIIKLPKYSLFELENGRKRMLASAGELQKGNELALPSKYVNFLYLASHYEKLKGSPEDNEQKQLFVEQHKHYLDEIIEQISEFSKRVILADANLDKVLSAYNKHRDKPIREQAENIIHLFTLTNLGAPAAFKYFDTTIDRKRYTSTKEVLDATLIHQSITGLYETRIDLSQLGGDGGGGGGGSEAAAKGGTLNLEDEYRLYETSAEPEVSPGSTWLSDFPQAWAETGGMGLAVRQAPLIIPLKATSTPVSIKQYPMSQEAKLGIKPHIQRLLDQGILVPCQSPWNTPLLPVKKPGTNDYRPVQDLREVNKRVEDIHPTVPNPYNLLSGLPPSHRWYTVLDLKDAFFCLRLHPTSQPLFAFEWRDPGMGISGQLTWTRLPQGFKNSPTLFNEALHRDLADFRIQHPDLILLQYVDDILLAATSELDCQQGTRALLLTLGNLGYRASAKKAQLCQKQVKYLGYLLKEGQRWLTEARKETVMGQPTPKTPRQLREFLGKAGFCRLFIPGFAEMAAPLYPLTKPGTLFNWGPDQQKAYQEIKQALLTAPALGLPDLTKPFELFVDEKQGYAKGVLTQKLGPWRRPVAYLSKKLDPVAAGWPPCLRMVAAIAVLRKDAGKLTMGQPLVILAPHAVEALVKQPPDRWLSNARMTHYQAMLLDTDRVQFGPVVALNPATLLPLPEEGAPHDCLEILAETHGTRPDLTDQPIPDADHTWYTDGSSFLQEGQRKAGAAVTTETEVIWARALPAGTSAQRAELIALTQALKMAEGKRLNVYTDSRYAFATAHIHGEIYRRRGWLTSEGREIKNKSEILALLKALFLPKRLSIIHCLGHQKGDSAEARGNRLADQAAREAAIKTPPDTSTLLAGKRTADGSEFEKRTADGSEFESPKKKAKVE

SEQ ID NO: 1907 - protein, 2096 aa, synthetic construct
MPAAKRVKLDGGDKKYSIGLDIGTNSVGWAVITDEYKVPSKKFKVLGNTDRHSIKKNLIGALLFDSGETAEATRLKRTARRRYTRRKNRICYLQEIFSNEMAKVDDSFFHRLEESFLVEEDKKHERHPIFGNIVDEVAYHEKYPTIYHLRKKLVDSTDKADLRLIYLALAHMIKFRGHFLIEGDLNPDNSDVDKLFIQLVQTYNQLFEENPINASGVDAKAILSARLSKSRRLENLIAQLPGEKKNGLFGNLIALSLGLTPNFKSNFDLAEDAKLQLSKDTYDDDLDNLLAQIGDQYADLFLAAKNLSDAILLSDILRVNTEITKAPLSASMIKRYDEHHQDLTLLKALVRQQLPEKYKEIFFDQSKNGYAGYIDGGASQEEFYKFIKPILEKMDGTEELLVKLNREDLLRKQRTFDNGSIPHQIHLGELHAILRRQEDFYPFLKDNREKIEKILTFRIPYYVGPLARGNSRFAWMTRKSEETITPWNFEEVVDKGASAQSFIERMTNFDKNLPNEKVLPKHSLLYEYFTVYNELTKVKYVTEGMRKPAFLSGEQKKAIVDLLFKTNRKVTVKQLKEDYFKKIECFDSVEISGVEDRFNASLGTYHDLLKIIKDKDFLDNEENEDILEDIVLTLTLFEDREMIEERLKTYAHLFDDKVMKQLKRRRYTGWGRLSRKLINGIRDKQSGKTILDFLKSDGFANRNFMQLIHDDSLTFKEDIQKAQVSGQGDSLHEHIANLAGSPAIKKGILQTVKVVDELVKVMGRHKPENIVIEMARENQTTQKGQKNSRERMKRIEEGIKELGSQILKEHPVENTQLQNEKLYLYYLQNGRDMYVDQELDINRLSDYDVDHIVPQSFLKDDSIDNKVLTRSDKARGKSDNVPSEEVVKKMKNYWRQLLNAKLITQRKFDNLTKAERGGLSELDKAGFIKRQLVETRQITKHVAQILDSRMNTKYDENDKLIREVKVITLKSKLVSDFRKDFQFYKVREINNYHHAHDAYLNAVVGTALIKKYPKLESEFVYGDYKVYDVRKMIAKSEQEIGKATAKYFFYSNIMNFFKTEITLANGEIRKRPLIETNGETGEIVWDKGRDFATVRKVLSMPQVNIVKKTEVQTGGFSKESILPKRNSDKLIARKKDWDPKKYGGFDSPTVAYSVLVVAKVEKGKSKKLKSVKELLGITIMERSSFEKNPIDFLEAKGYKEVKKDLIIKLPKYSLFELENGRKRMLASAGELQKGNELALPSKYVNFLYLASHYEKLKGSPEDNEQKQLFVEQHKHYLDEIIEQISEFSKRVILADANLDKVLSAYNKHRDKPIREQAENIIHLFTLTNLGAPAAFKYFDTTIDRKRYTSTKEVLDATLIHQSITGLYETRIDLSQLGGDGGEAAAKGGSGGGGGTLNLEDEYRLYETSAEPEVSPGSTWLSDFPQAWAETGGMGLAVRQAPLIIPLKATSTPVSIKQYPMSQEAKLGIKPHIQRLLDQGILVPCQSPWNTPLLPVKKPGTNDYRPVQDLREVNKRVEDIHPTVPNPYNLLSGLPPSHRWYTVLDLKDAFFCLRLHPTSQPLFAFEWRDPGMGISGQLTWTRLPQGFKNSPTLFNEALHRDLADFRIQHPDLILLQYVDDILLAATSELDCQQGTRALLLTLGNLGYRASAKKAQLCQKQVKYLGYLLKEGQRWLTEARKETVMGQPTPKTPRQLREFLGKAGFCRLFIPGFAEMAAPLYPLTKPGTLFNWGPDQQKAYQEIKQALLTAPALGLPDLTKPFELFVDEKQGYAKGVLTQKLGPWRRPVAYLSKKLDPVAAGWPPCLRMVAAIAVLRKDAGKLTMGQPLVILAPHAVEALVKQPPDRWLSNARMTHYQAMLLDTDRVQFGPVVALNPATLLPLPEEGAPHDCLEILAETHGTRPDLTDQPIPDADHTWYTDGSSFLQEGQRKAGAAVTTETEVIWARALPAGTSAQRAELIALTQALKMAEGKRLNVYTDSRYAFATAHIHGEIYRRRGWLTSEGREIKNKSEILALLKALFLPKRLSIIHCLGHQKGDSAEARGNRLADQAAREAAIKTPPDTSTLLAGKRTADGSEFEKRTADGSEFESPKKKAKVE

SEQ ID NO: 1908 - protein, 2096 aa, synthetic construct
MPAAKRVKLDGGDKKYSIGLDIGTNSVGWAVITDEYKVPSKKFKVLGNTDRHSIKKNLIGALLFDSGETAEATRLKRTARRRYTRRKNRICYLQEIFSNEMAKVDDSFFHRLEESFLVEEDKKHERHPIFGNIVDEVAYHEKYPTIYHLRKKLVDSTDKADLRLIYLALAHMIKFRGHFLIEGDLNPDNSDVDKLFIQLVQTYNQLFEENPINASGVDAKAILSARLSKSRRLENLIAQLPGEKKNGLFGNLIALSLGLTPNFKSNFDLAEDAKLQLSKDTYDDDLDNLLAQIGDQYADLFLAAKNLSDAILLSDILRVNTEITKAPLSASMIKRYDEHHQDLTLLKALVRQQLPEKYKEIFFDQSKNGYAGYIDGGASQEEFYKFIKPILEKMDGTEELLVKLNREDLLRKQRTFDNGSIPHQIHLGELHAILRRQEDFYPFLKDNREKIEKILTFRIPYYVGPLARGNSRFAWMTRKSEETITPWNFEEVVDKGASAQSFIERMTNFDKNLPNEKVLPKHSLLYEYFTVYNELTKVKYVTEGMRKPAFLSGEQKKAIVDLLFKTNRKVTVKQLKEDYFKKIECFDSVEISGVEDRFNASLGTYHDLLKIIKDKDFLDNEENEDILEDIVLTLTLFEDREMIEERLKTYAHLFDDKVMKQLKRRRYTGWGRLSRKLINGIRDKQSGKTILDFLKSDGFANRNFMQLIHDDSLTFKEDIQKAQVSGQGDSLHEHIANLAGSPAIKKGILQTVKVVDELVKVMGRHKPENIVIEMARENQTTQKGQKNSRERMKRIEEGIKELGSQILKEHPVENTQLQNEKLYLYYLQNGRDMYVDQELDINRLSDYDVDHIVPQSFLKDDSIDNKVLTRSDKARGKSDNVPSEEVVKKMKNYWRQLLNAKLITQRKFDNLTKAERGGLSELDKAGFIKRQLVETRQITKHVAQILDSRMNTKYDENDKLIREVKVITLKSKLVSDFRKDFQFYKVREINNYHHAHDAYLNAVVGTALIKKYPKLESEFVYGDYKVYDVRKMIAKSEQEIGKATAKYFFYSNIMNFFKTEITLANGEIRKRPLIETNGETGEIVWDKGRDFATVRKVLSMPQVNIVKKTEVQTGGFSKESILPKRNSDKLIARKKDWDPKKYGGFDSPTVAYSVLVVAKVEKGKSKKLKSVKELLGITIMERSSFEKNPIDFLEAKGYKEVKKDLIIKLPKYSLFELENGRKRMLASAGELQKGNELALPSKYVNFLYLASHYEKLKGSPEDNEQKQLFVEQHKHYLDEIIEQISEFSKRVILADANLDKVLSAYNKHRDKPIREQAENIIHLFTLTNLGAPAAFKYFDTTIDRKRYTSTKEVLDATLIHQSITGLYETRIDLSQLGGDGGGGSPAPEAAAKGGTLNLEDEYRLYETSAEPEVSPGSTWLSDFPQAWAETGGMGLAVRQAPLIIPLKATSTPVSIKQYPMSQEAKLGIKPHIQRLLDQGILVPCQSPWNTPLLPVKKPGTNDYRPVQDLREVNKRVEDIHPTVPNPYNLLSGLPPSHRWYTVLDLKDAFFCLRLHPTSQPLFAFEWRDPGMGISGQLTWTRLPQGFKNSPTLFNEALHRDLADFRIQHPDLILLQYVDDILLAATSELDCQQGTRALLLTLGNLGYRASAKKAQLCQKQVKYLGYLLKEGQRWLTEARKETVMGQPTPKTPRQLREFLGKAGFCRLFIPGFAEMAAPLYPLTKPGTLFNWGPDQQKAYQEIKQALLTAPALGLPDLTKPFELFVDEKQGYAKGVLTQKLGPWRRPVAYLSKKLDPVAAGWPPCLRMVAAIAVLRKDAGKLTMGQPLVILAPHAVEALVKQPPDRWLSNARMTHYQAMLLDTDRVQFGPVVALNPATLLPLPEEGAPHDCLEILAETHGTRPDLTDQPIPDADHTWYTDGSSFLQEGQRKAGAAVTTETEVIWARALPAGTSAQRAELIALTQALKMAEGKRLNVYTDSRYAFATAHIHGEIYRRRGWLTSEGREIKNKSEILALLKALFLPKRLSIIHCLGHQKGDSAEARGNRLADQAAREAAIKTPPDTSTLLAGKRTADGSEFEKRTADGSEFESPKKKAKVE

SEQ ID NO: 1909 - protein, 2094 aa, synthetic construct
MPAAKRVKLDGGDKKYSIGLDIGTNSVGWAVITDEYKVPSKKFKVLGNTDRHSIKKNLIGALLFDSGETAEATRLKRTARRRYTRRKNRICYLQEIFSNEMAKVDDSFFHRLEESFLVEEDKKHERHPIFGNIVDEVAYHEKYPTIYHLRKKLVDSTDKADLRLIYLALAHMIKFRGHFLIEGDLNPDNSDVDKLFIQLVQTYNQLFEENPINASGVDAKAILSARLSKSRRLENLIAQLPGEKKNGLFGNLIALSLGLTPNFKSNFDLAEDAKLQLSKDTYDDDLDNLLAQIGDQYADLFLAAKNLSDAILLSDILRVNTEITKAPLSASMIKRYDEHHQDLTLLKALVRQQLPEKYKEIFFDQSKNGYAGYIDGGASQEEFYKFIKPILEKMDGTEELLVKLNREDLLRKQRTFDNGSIPHQIHLGELHAILRRQEDFYPFLKDNREKIEKILTFRIPYYVGPLARGNSRFAWMTRKSEETITPWNFEEVVDKGASAQSFIERMTNFDKNLPNEKVLPKHSLLYEYFTVYNELTKVKYVTEGMRKPAFLSGEQKKAIVDLLFKTNRKVTVKQLKEDYFKKIECFDSVEISGVEDRFNASLGTYHDLLKIIKDKDFLDNEENEDILEDIVLTLTLFEDREMIEERLKTYAHLFDDKVMKQLKRRRYTGWGRLSRKLINGIRDKQSGKTILDFLKSDGFANRNFMQLIHDDSLTFKEDIQKAQVSGQGDSLHEHIANLAGSPAIKKGILQTVKVVDELVKVMGRHKPENIVIEMARENQTTQKGQKNSRERMKRIEEGIKELGSQILKEHPVENTQLQNEKLYLYYLQNGRDMYVDQELDINRLSDYDVDHIVPQSFLKDDSIDNKVLTRSDKARGKSDNVPSEEVVKKMKNYWRQLLNAKLITQRKFDNLTKAERGGLSELDKAGFIKRQLVETRQITKHVAQILDSRMNTKYDENDKLIREVKVITLKSKLVSDFRKDFQFYKVREINNYHHAHDAYLNAVVGTALIKKYPKLESEFVYGDYKVYDVRKMIAKSEQEIGKATAKYFFYSNIMNFFKTEITLANGEIRKRPLIETNGETGEIVWDKGRDFATVRKVLSMPQVNIVKKTEVQTGGFSKESILPKRNSDKLIARKKDWDPKKYGGFDSPTVAYSVLVVAKVEKGKSKKLKSVKELLGITIMERSSFEKNPIDFLEAKGYKEVKKDLIIKLPKYSLFELENGRKRMLASAGELQKGNELALPSKYVNFLYLASHYEKLKGSPEDNEQKQLFVEQHKHYLDEIIEQISEFSKRVILADANLDKVLSAYNKHRDKPIREQAENIIHLFTLTNLGAPAAFKYFDTTIDRKRYTSTKEVLDATLIHQSITGLYETRIDLSQLGGDGGGSSGGGGGSGGTLNLEDEYRLYETSAEPEVSPGSTWLSDFPQAWAETGGMGLAVRQAPLIIPLKATSTPVSIKQYPMSQEAKLGIKPHIQRLLDQGILVPCQSPWNTPLLPVKKPGTNDYRPVQDLREVNKRVEDIHPTVPNPYNLLSGLPPSHRWYTVLDLKDAFFCLRLHPTSQPLFAFEWRDPGMGISGQLTWTRLPQGFKNSPTLFNEALHRDLADFRIQHPDLILLQYVDDILLAATSELDCQQGTRALLLTLGNLGYRASAKKAQLCQKQVKYLGYLLKEGQRWLTEARKETVMGQPTPKTPRQLREFLGKAGFCRLFIPGFAEMAAPLYPLTKPGTLFNWGPDQQKAYQEIKQALLTAPALGLPDLTKPFELFVDEKQGYAKGVLTQKLGPWRRPVAYLSKKLDPVAAGWPPCLRMVAAIAVLRKDAGKLTMGQPLVILAPHAVEALVKQPPDRWLSNARMTHYQAMLLDTDRVQFGPVVALNPATLLPLPEEGAPHDCLEILAETHGTRPDLTDQPIPDADHTWYTDGSSFLQEGQRKAGAAVTTETEVIWARALPAGTSAQRAELIALTQALKMAEGKRLNVYTDSRYAFATAHIHGEIYRRRGWLTSEGREIKNKSEILALLKALFLPKRLSIIHCLGHQKGDSAEARGNRLADQAAREAAIKTPPDTSTLLAGKRTADGSEFEKRTADGSEFESPKKKAKVE

SEQ ID NO: 1910 - protein, 2096 aa, synthetic construct
MPAAKRVKLDGGDKKYSIGLDIGTNSVGWAVITDEYKVPSKKFKVLGNTDRHSIKKNLIGALLFDSGETAEATRLKRTARRRYTRRKNRICYLQEIFSNEMAKVDDSFFHRLEESFLVEEDKKHERHPIFGNIVDEVAYHEKYPTIYHLRKKLVDSTDKADLRLIYLALAHMIKFRGHFLIEGDLNPDNSDVDKLFIQLVQTYNQLFEENPINASGVDAKAILSARLSKSRRLENLIAQLPGEKKNGLFGNLIALSLGLTPNFKSNFDLAEDAKLQLSKDTYDDDLDNLLAQIGDQYADLFLAAKNLSDAILLSDILRVNTEITKAPLSASMIKRYDEHHQDLTLLKALVRQQLPEKYKEIFFDQSKNGYAGYIDGGASQEEFYKFIKPILEKMDGTEELLVKLNREDLLRKQRTFDNGSIPHQIHLGELHAILRRQEDFYPFLKDNREKIEKILTFRIPYYVGPLARGNSRFAWMTRKSEETITPWNFEEVVDKGASAQSFIERMTNFDKNLPNEKVLPKHSLLYEYFTVYNELTKVKYVTEGMRKPAFLSGEQKKAIVDLLFKTNRKVTVKQLKEDYFKKIECFDSVEISGVEDRFNASLGTYHDLLKIIKDKDFLDNEENEDILEDIVLTLTLFEDREMIEERLKTYAHLFDDKVMKQLKRRRYTGWGRLSRKLINGIRDKQSGKTILDFLKSDGFANRNFMQLIHDDSLTFKEDIQKAQVSGQGDSLHEHIANLAGSPAIKKGILQTVKVVDELVKVMGRHKPENIVIEMARENQTTQKGQKNSRERMKRIEEGIKELGSQILKEHPVENTQLQNEKLYLYYLQNGRDMYVDQELDINRLSDYDVDHIVPQSFLKDDSIDNKVLTRSDKARGKSDNVPSEEVVKKMKNYWRQLLNAKLITQRKFDNLTKAERGGLSELDKAGFIKRQLVETRQITKHVAQILDSRMNTKYDENDKLIREVKVITLKSKLVSDFRKDFQFYKVREINNYHHAHDAYLNAVVGTALIKKYPKLESEFVYGDYKVYDVRKMIAKSEQEIGKATAKYFFYSNIMNFFKTEITLANGEIRKRPLIETNGETGEIVWDKGRDFATVRKVLSMPQVNIVKKTEVQTGGFSKESILPKRNSDKLIARKKDWDPKKYGGFDSPTVAYSVLVVAKVEKGKSKKLKSVKELLGITIMERSSFEKNPIDFLEAKGYKEVKKDLIIKLPKYSLFELENGRKRMLASAGELQKGNELALPSKYVNFLYLASHYEKLKGSPEDNEQKQLFVEQHKHYLDEIIEQISEFSKRVILADANLDKVLSAYNKHRDKPIREQAENIIHLFTLTNLGAPAAFKYFDTTIDRKRYTSTKEVLDATLIHQSITGLYETRIDLSQLGGDGGGSSEAAAKGGSGGTLNLEDEYRLYETSAEPEVSPGSTWLSDFPQAWAETGGMGLAVRQAPLIIPLKATSTPVSIKQYPMSQEAKLGIKPHIQRLLDQGILVPCQSPWNTPLLPVKKPGTNDYRPVQDLREVNKRVEDIHPTVPNPYNLLSGLPPSHRWYTVLDLKDAFFCLRLHPTSQPLFAFEWRDPGMGISGQLTWTRLPQGFKNSPTLFNEALHRDLADFRIQHPDLILLQYVDDILLAATSELDCQQGTRALLLTLGNLGYRASAKKAQLCQKQVKYLGYLLKEGQRWLTEARKETVMGQPTPKTPRQLREFLGKAGFCRLFIPGFAEMAAPLYPLTKPGTLFNWGPDQQKAYQEIKQALLTAPALGLPDLTKPFELFVDEKQGYAKGVLTQKLGPWRRPVAYLSKKLDPVAAGWPPCLRMVAAIAVLRKDAGKLTMGQPLVILAPHAVEALVKQPPDRWLSNARMTHYQAMLLDTDRVQFGPVVALNPATLLPLPEEGAPHDCLEILAETHGTRPDLTDQPIPDADHTWYTDGSSFLQEGQRKAGAAVTTETEVIWARALPAGTSAQRAELIALTQALKMAEGKRLNVYTDSRYAFATAHIHGEIYRRRGWLTSEGREIKNKSEILALLKALFLPKRLSIIHCLGHQKGDSAEARGNRLADQAAREAAIKTPPDTSTLLAGKRTADGSEFEKRTADGSEFESPKKKAKVE

SEQ ID NO: 1911 - protein, 2091 aa, synthetic construct
MPAAKRVKLDGGDKKYSIGLDIGTNSVGWAVITDEYKVPSKKFKVLGNTDRHSIKKNLIGALLFDSGETAEATRLKRTARRRYTRRKNRICYLQEIFSNEMAKVDDSFFHRLEESFLVEEDKKHERHPIFGNIVDEVAYHEKYPTIYHLRKKLVDSTDKADLRLIYLALAHMIKFRGHFLIEGDLNPDNSDVDKLFIQLVQTYNQLFEENPINASGVDAKAILSARLSKSRRLENLIAQLPGEKKNGLFGNLIALSLGLTPNFKSNFDLAEDAKLQLSKDTYDDDLDNLLAQIGDQYADLFLAAKNLSDAILLSDILRVNTEITKAPLSASMIKRYDEHHQDLTLLKALVRQQLPEKYKEIFFDQSKNGYAGYIDGGASQEEFYKFIKPILEKMDGTEELLVKLNREDLLRKQRTFDNGSIPHQIHLGELHAILRRQEDFYPFLKDNREKIEKILTFRIPYYVGPLARGNSRFAWMTRKSEETITPWNFEEVVDKGASAQSFIERMTNFDKNLPNEKVLPKHSLLYEYFTVYNELTKVKYVTEGMRKPAFLSGEQKKAIVDLLFKTNRKVTVKQLKEDYFKKIECFDSVEISGVEDRFNASLGTYHDLLKIIKDKDFLDNEENEDILEDIVLTLTLFEDREMIEERLKTYAHLFDDKVMKQLKRRRYTGWGRLSRKLINGIRDKQSGKTILDFLKSDGFANRNFMQLIHDDSLTFKEDIQKAQVSGQGDSLHEHIANLAGSPAIKKGILQTVKVVDELVKVMGRHKPENIVIEMARENQTTQKGQKNSRERMKRIEEGIKELGSQILKEHPVENTQLQNEKLYLYYLQNGRDMYVDQELDINRLSDYDVDHIVPQSFLKDDSIDNKVLTRSDKARGKSDNVPSEEVVKKMKNYWRQLLNAKLITQRKFDNLTKAERGGLSELDKAGFIKRQLVETRQITKHVAQILDSRMNTKYDENDKLIREVKVITLKSKLVSDFRKDFQFYKVREINNYHHAHDAYLNAVVGTALIKKYPKLESEFVYGDYKVYDVRKMIAKSEQEIGKATAKYFFYSNIMNFFKTEITLANGEIRKRPLIETNGETGEIVWDKGRDFATVRKVLSMPQVNIVKKTEVQTGGFSKESILPKRNSDKLIARKKDWDPKKYGGFDSPTVAYSVLVVAKVEKGKSKKLKSVKELLGITIMERSSFEKNPIDFLEAKGYKEVKKDLIIKLPKYSLFELENGRKRMLASAGELQKGNELALPSKYVNFLYLASHYEKLKGSPEDNEQKQLFVEQHKHYLDEIIEQISEFSKRVILADANLDKVLSAYNKHRDKPIREQAENIIHLFTLTNLGAPAAFKYFDTTIDRKRYTSTKEVLDATLIHQSITGLYETRIDLSQLGGDGGGGSGSSGGTLNLEDEYRLYETSAEPEVSPGSTWLSDFPQAWAETGGMGLAVRQAPLIIPLKATSTPVSIKQYPMSQEAKLGIKPHIQRLLDQGILVPCQSPWNTPLLPVKKPGTNDYRPVQDLREVNKRVEDIHPTVPNPYNLLSGLPPSHRWYTVLDLKDAFFCLRLHPTSQPLFAFEWRDPGMGISGQLTWTRLPQGFKNSPTLFNEALHRDLADFRIQHPDLILLQYVDDILLAATSELDCQQGTRALLLTLGNLGYRASAKKAQLCQKQVKYLGYLLKEGQRWLTEARKETVMGQPTPKTPRQLREFLGKAGFCRLFIPGFAEMAAPLYPLTKPGTLFNWGPDQQKAYQEIKQALLTAPALGLPDLTKPFELFVDEKQGYAKGVLTQKLGPWRRPVAYLSKKLDPVAAGWPPCLRMVAAIAVLRKDAGKLTMGQPLVILAPHAVEALVKQPPDRWLSNARMTHYQAMLLDTDRVQFGPVVALNPATLLPLPEEGAPHDCLEILAETHGTRPDLTDQPIPDADHTWYTDGSSFLQEGQRKAGAAVTTETEVIWARALPAGTSAQRAELIALTQALKMAEGKRLNVYTDSRYAFATAHIHGEIYRRRGWLTSEGREIKNKSEILALLKALFLPKRLSIIHCLGHQKGDSAEARGNRLADQAAREAAIKTPPDTSTLLAGKRTADGSEFEKRTADGSEFESPKKKAKVE

SEQ ID NO: 1912 - protein, 2096 aa, synthetic construct
MPAAKRVKLDGGDKKYSIGLDIGTNSVGWAVITDEYKVPSKKFKVLGNTDRHSIKKNLIGALLFDSGETAEATRLKRTARRRYTRRKNRICYLQEIFSNEMAKVDDSFFHRLEESFLVEEDKKHERHPIFGNIVDEVAYHEKYPTIYHLRKKLVDSTDKADLRLIYLALAHMIKFRGHFLIEGDLNPDNSDVDKLFIQLVQTYNQLFEENPINASGVDAKAILSARLSKSRRLENLIAQLPGEKKNGLFGNLIALSLGLTPNFKSNFDLAEDAKLQLSKDTYDDDLDNLLAQIGDQYADLFLAAKNLSDAILLSDILRVNTEITKAPLSASMIKRYDEHHQDLTLLKALVRQQLPEKYKEIFFDQSKNGYAGYIDGGASQEEFYKFIKPILEKMDGTEELLVKLNREDLLRKQRTFDNGSIPHQIHLGELHAILRRQEDFYPFLKDNREKIEKILTFRIPYYVGPLARGNSRFAWMTRKSEETITPWNFEEVVDKGASAQSFIERMTNFDKNLPNEKVLPKHSLLYEYFTVYNELTKVKYVTEGMRKPAFLSGEQKKAIVDLLFKTNRKVTVKQLKEDYFKKIECFDSVEISGVEDRFNASLGTYHDLLKIIKDKDFLDNEENEDILEDIVLTLTLFEDREMIEERLKTYAHLFDDKVMKQLKRRRYTGWGRLSRKLINGIRDKQSGKTILDFLKSDGFANRNFMQLIHDDSLTFKEDIQKAQVSGQGDSLHEHIANLAGSPAIKKGILQTVKVVDELVKVMGRHKPENIVIEMARENQTTQKGQKNSRERMKRIEEGIKELGSQILKEHPVENTQLQNEKLYLYYLQNGRDMYVDQELDINRLSDYDVDHIVPQSFLKDDSIDNKVLTRSDKARGKSDNVPSEEVVKKMKNYWRQLLNAKLITQRKFDNLTKAERGGLSELDKAGFIKRQLVETRQITKHVAQILDSRMNTKYDENDKLIREVKVITLKSKLVSDFRKDFQFYKVREINNYHHAHDAYLNAVVGTALIKKYPKLESEFVYGDYKVYDVRKMIAKSEQEIGKATAKYFFYSNIMNFFKTEITLANGEIRKRPLIETNGETGEIVWDKGRDFATVRKVLSMPQVNIVKKTEVQTGGFSKESILPKRNSDKLIARKKDWDPKKYGGFDSPTVAYSVLVVAKVEKGKSKKLKSVKELLGITIMERSSFEKNPIDFLEAKGYKEVKKDLIIKLPKYSLFELENGRKRMLASAGELQKGNELALPSKYVNFLYLASHYEKLKGSPEDNEQKQLFVEQHKHYLDEIIEQISEFSKRVILADANLDKVLSAYNKHRDKPIREQAENIIHLFTLTNLGAPAAFKYFDTTIDRKRYTSTKEVLDATLIHQSITGLYETRIDLSQLGGDGGPAPGSSEAAAKGGTLNLEDEYRLYETSAEPEVSPGSTWLSDFPQAWAETGGMGLAVRQAPLIIPLKATSTPVSIKQYPMSQEAKLGIKPHIQRLLDQGILVPCQSPWNTPLLPVKKPGTNDYRPVQDLREVNKRVEDIHPTVPNPYNLLSGLPPSHRWYTVLDLKDAFFCLRLHPTSQPLFAFEWRDPGMGISGQLTWTRLPQGFKNSPTLFNEALHRDLADFRIQHPDLILLQYVDDILLAATSELDCQQGTRALLLTLGNLGYRASAKKAQLCQKQVKYLGYLLKEGQRWLTEARKETVMGQPTPKTPRQLREFLGKAGFCRLFIPGFAEMAAPLYPLTKPGTLFNWGPDQQKAYQEIKQALLTAPALGLPDLTKPFELFVDEKQGYAKGVLTQKLGPWRRPVAYLSKKLDPVAAGWPPCLRMVAAIAVLRKDAGKLTMGQPLVILAPHAVEALVKQPPDRWLSNARMTHYQAMLLDTDRVQFGPVVALNPATLLPLPEEGAPHDCLEILAETHGTRPDLTDQPIPDADHTWYTDGSSFLQEGQRKAGAAVTTETEVIWARALPAGTSAQRAELIALTQALKMAEGKRLNVYTDSRYAFATAHIHGEIYRRRGWLTSEGREIKNKSEILALLKALFLPKRLSIIHCLGHQKGDSAEARGNRLADQAAREAAIKTPPDTSTLLAGKRTADGSEFEKRTADGSEFESPKKKAKVE

SEQ ID NO: 1913 - protein, 2096 aa, synthetic construct
MPAAKRVKLDGGDKKYSIGLDIGTNSVGWAVITDEYKVPSKKFKVLGNTDRHSIKKNLIGALLFDSGETAEATRLKRTARRRYTRRKNRICYLQEIFSNEMAKVDDSFFHRLEESFLVEEDKKHERHPIFGNIVDEVAYHEKYPTIYHLRKKLVDSTDKADLRLIYLALAHMIKFRGHFLIEGDLNPDNSDVDKLFIQLVQTYNQLFEENPINASGVDAKAILSARLSKSRRLENLIAQLPGEKKNGLFGNLIALSLGLTPNFKSNFDLAEDAKLQLSKDTYDDDLDNLLAQIGDQYADLFLAAKNLSDAILLSDILRVNTEITKAPLSASMIKRYDEHHQDLTLLKALVRQQLPEKYKEIFFDQSKNGYAGYIDGGASQEEFYKFIKPILEKMDGTEELLVKLNREDLLRKQRTFDNGSIPHQIHLGELHAILRRQEDFYPFLKDNREKIEKILTFRIPYYVGPLARGNSRFAWMTRKSEETITPWNFEEVVDKGASAQSFIERMTNFDKNLPNEKVLPKHSLLYEYFTVYNELTKVKYVTEGMRKPAFLSGEQKKAIVDLLFKTNRKVTVKQLKEDYFKKIECFDSVEISGVEDRFNASLGTYHDLLKIIKDKDFLDNEENEDILEDIVLTLTLFEDREMIEERLKTYAHLFDDKVMKQLKRRRYTGWGRLSRKLINGIRDKQSGKTILDFLKSDGFANRNFMQLIHDDSLTFKEDIQKAQVSGQGDSLHEHIANLAGSPAIKKGILQTVKVVDELVKVMGRHKPENIVIEMARENQTTQKGQKNSRERMKRIEEGIKELGSQILKEHPVENTQLQNEKLYLYYLQNGRDMYVDQELDINRLSDYDVDHIVPQSFLKDDSIDNKVLTRSDKARGKSDNVPSEEVVKKMKNYWRQLLNAKLITQRKFDNLTKAERGGLSELDKAGFIKRQLVETRQITKHVAQILDSRMNTKYDENDKLIREVKVITLKSKLVSDFRKDFQFYKVREINNYHHAHDAYLNAVVGTALIKKYPKLESEFVYGDYKVYDVRKMIAKSEQEIGKATAKYFFYSNIMNFFKTEITLANGEIRKRPLIETNGETGEIVWDKGRDFATVRKVLSMPQVNIVKKTEVQTGGFSKESILPKRNSDKLIARKKDWDPKKYGGFDSPTVAYSVLVVAKVEKGKSKKLKSVKELLGITIMERSSFEKNPIDFLEAKGYKEVKKDLIIKLPKYSLFELENGRKRMLASAGELQKGNELALPSKYVNFLYLASHYEKLKGSPEDNEQKQLFVEQHKHYLDEIIEQISEFSKRVILADANLDKVLSAYNKHRDKPIREQAENIIHLFTLTNLGAPAAFKYFDTTIDRKRYTSTKEVLDATLIHQSITGLYETRIDLSQLGGDGGEAAAKGSSGGSGGTLNLEDEYRLYETSAEPEVSPGSTWLSDFPQAWAETGGMGLAVRQAPLIIPLKATSTPVSIKQYPMSQEAKLGIKPHIQRLLDQGILVPCQSPWNTPLLPVKKPGTNDYRPVQDLREVNKRVEDIHPTVPNPYNLLSGLPPSHRWYTVLDLKDAFFCLRLHPTSQPLFAFEWRDPGMGISGQLTWTRLPQGFKNSPTLFNEALHRDLADFRIQHPDLILLQYVDDILLAATSELDCQQGTRALLLTLGNLGYRASAKKAQLCQKQVKYLGYLLKEGQRWLTEARKETVMGQPTPKTPRQLREFLGKAGFCRLFIPGFAEMAAPLYPLTKPGTLFNWGPDQQKAYQEIKQALLTAPALGLPDLTKPFELFVDEKQGYAKGVLTQKLGPWRRPVAYLSKKLDPVAAGWPPCLRMVAAIAVLRKDAGKLTMGQPLVILAPHAVEALVKQPPDRWLSNARMTHYQAMLLDTDRVQFGPVVALNPATLLPLPEEGAPHDCLEILAETHGTRPDLTDQPIPDADHTWYTDGSSFLQEGQRKAGAAVTTETEVIWARALPAGTSAQRAELIALTQALKMAEGKRLNVYTDSRYAFATAHIHGEIYRRRGWLTSEGREIKNKSEILALLKALFLPKRLSIIHCLGHQKGDSAEARGNRLADQAAREAAIKTPPDTSTLLAGKRTADGSEFEKRTADGSEFESPKKKAKVE

SEQ ID NO: 1914 - protein, 2091 aa, synthetic construct
MPAAKRVKLDGGDKKYSIGLDIGTNSVGWAVITDEYKVPSKKFKVLGNTDRHSIKKNLIGALLFDSGETAEATRLKRTARRRYTRRKNRICYLQEIFSNEMAKVDDSFFHRLEESFLVEEDKKHERHPIFGNIVDEVAYHEKYPTIYHLRKKLVDSTDKADLRLIYLALAHMIKFRGHFLIEGDLNPDNSDVDKLFIQLVQTYNQLFEENPINASGVDAKAILSARLSKSRRLENLIAQLPGEKKNGLFGNLIALSLGLTPNFKSNFDLAEDAKLQLSKDTYDDDLDNLLAQIGDQYADLFLAAKNLSDAILLSDILRVNTEITKAPLSASMIKRYDEHHQDLTLLKALVRQQLPEKYKEIFFDQSKNGYAGYIDGGASQEEFYKFIKPILEKMDGTEELLVKLNREDLLRKQRTFDNGSIPHQIHLGELHAILRRQEDFYPFLKDNREKIEKILTFRIPYYVGPLARGNSRFAWMTRKSEETITPWNFEEVVDKGASAQSFIERMTNFDKNLPNEKVLPKHSLLYEYFTVYNELTKVKYVTEGMRKPAFLSGEQKKAIVDLLFKTNRKVTVKQLKEDYFKKIECFDSVEISGVEDRFNASLGTYHDLLKIIKDKDFLDNEENEDILEDIVLTLTLFEDREMIEERLKTYAHLFDDKVMKQLKRRRYTGWGRLSRKLINGIRDKQSGKTILDFLKSDGFANRNFMQLIHDDSLTFKEDIQKAQVSGQGDSLHEHIANLAGSPAIKKGILQTVKVVDELVKVMGRHKPENIVIEMARENQTTQKGQKNSRERMKRIEEGIKELGSQILKEHPVENTQLQNEKLYLYYLQNGRDMYVDQELDINRLSDYDVDHIVPQSFLKDDSIDNKVLTRSDKARGKSDNVPSEEVVKKMKNYWRQLLNAKLITQRKFDNLTKAERGGLSELDKAGFIKRQLVETRQITKHVAQILDSRMNTKYDENDKLIREVKVITLKSKLVSDFRKDFQFYKVREINNYHHAHDAYLNAVVGTALIKKYPKLESEFVYGDYKVYDVRKMIAKSEQEIGKATAKYFFYSNIMNFFKTEITLANGEIRKRPLIETNGETGEIVWDKGRDFATVRKVLSMPQVNIVKKTEVQTGGFSKESILPKRNSDKLIARKKDWDPKKYGGFDSPTVAYSVLVVAKVEKGKSKKLKSVKELLGITIMERSSFEKNPIDFLEAKGYKEVKKDLIIKLPKYSLFELENGRKRMLASAGELQKGNELALPSKYVNFLYLASHYEKLKGSPEDNEQKQLFVEQHKHYLDEIIEQISEFSKRVILADANLDKVLSAYNKHRDKPIREQAENIIHLFTLTNLGAPAAFKYFDTTIDRKRYTSTKEVLDATLIHQSITGLYETRIDLSQLGGDGGGGSPAPGGTLNLEDEYRLYETSAEPEVSPGSTWLSDFPQAWAETGGMGLAVRQAPLIIPLKATSTPVSIKQYPMSQEAKLGIKPHIQRLLDQGILVPCQSPWNTPLLPVKKPGTNDYRPVQDLREVNKRVEDIHPTVPNPYNLLSGLPPSHRWYTVLDLKDAFFCLRLHPTSQPLFAFEWRDPGMGISGQLTWTRLPQGFKNSPTLFNEALHRDLADFRIQHPDLILLQYVDDILLAATSELDCQQGTRALLLTLGNLGYRASAKKAQLCQKQVKYLGYLLKEGQRWLTEARKETVMGQPTPKTPRQLREFLGKAGFCRLFIPGFAEMAAPLYPLTKPGTLFNWGPDQQKAYQEIKQALLTAPALGLPDLTKPFELFVDEKQGYAKGVLTQKLGPWRRPVAYLSKKLDPVAAGWPPCLRMVAAIAVLRKDAGKLTMGQPLVILAPHAVEALVKQPPDRWLSNARMTHYQAMLLDTDRVQFGPVVALNPATLLPLPEEGAPHDCLEILAETHGTRPDLTDQPIPDADHTWYTDGSSFLQEGQRKAGAAVTTETEVIWARALPAGTSAQRAELIALTQALKMAEGKRLNVYTDSRYAFATAHIHGEIYRRRGWLTSEGREIKNKSEILALLKALFLPKRLSIIHCLGHQKGDSAEARGNRLADQAAREAAIKTPPDTSTLLAGKRTADGSEFEKRTADGSEFESPKKKAKVE

SEQ ID NO: 1915 - protein, 2096 aa, synthetic construct
MPAAKRVKLDGGDKKYSIGLDIGTNSVGWAVITDEYKVPSKKFKVLGNTDRHSIKKNLIGALLFDSGETAEATRLKRTARRRYTRRKNRICYLQEIFSNEMAKVDDSFFHRLEESFLVEEDKKHERHPIFGNIVDEVAYHEKYPTIYHLRKKLVDSTDKADLRLIYLALAHMIKFRGHFLIEGDLNPDNSDVDKLFIQLVQTYNQLFEENPINASGVDAKAILSARLSKSRRLENLIAQLPGEKKNGLFGNLIALSLGLTPNFKSNFDLAEDAKLQLSKDTYDDDLDNLLAQIGDQYADLFLAAKNLSDAILLSDILRVNTEITKAPLSASMIKRYDEHHQDLTLLKALVRQQLPEKYKEIFFDQSKNGYAGYIDGGASQEEFYKFIKPILEKMDGTEELLVKLNREDLLRKQRTFDNGSIPHQIHLGELHAILRRQEDFYPFLKDNREKIEKILTFRIPYYVGPLARGNSRFAWMTRKSEETITPWNFEEVVDKGASAQSFIERMTNFDKNLPNEKVLPKHSLLYEYFTVYNELTKVKYVTEGMRKPAFLSGEQKKAIVDLLFKTNRKVTVKQLKEDYFKKIECFDSVEISGVEDRFNASLGTYHDLLKIIKDKDFLDNEENEDILEDIVLTLTLFEDREMIEERLKTYAHLFDDKVMKQLKRRRYTGWGRLSRKLINGIRDKQSGKTILDFLKSDGFANRNFMQLIHDDSLTFKEDIQKAQVSGQGDSLHEHIANLAGSPAIKKGILQTVKVVDELVKVMGRHKPENIVIEMARENQTTQKGQKNSRERMKRIEEGIKELGSQILKEHPVENTQLQNEKLYLYYLQNGRDMYVDQELDINRLSDYDVDHIVPQSFLKDDSIDNKVLTRSDKARGKSDNVPSEEVVKKMKNYWRQLLNAKLITQRKFDNLTKAERGGLSELDKAGFIKRQLVETRQITKHVAQILDSRMNTKYDENDKLIREVKVITLKSKLVSDFRKDFQFYKVREINNYHHAHDAYLNAVVGTALIKKYPKLESEFVYGDYKVYDVRKMIAKSEQEIGKATAKYFFYSNIMNFFKTEITLANGEIRKRPLIETNGETGEIVWDKGRDFATVRKVLSMPQVNIVKKTEVQTGGFSKESILPKRNSDKLIARKKDWDPKKYGGFDSPTVAYSVLVVAKVEKGKSKKLKSVKELLGITIMERSSFEKNPIDFLEAKGYKEVKKDLIIKLPKYSLFELENGRKRMLASAGELQKGNELALPSKYVNFLYLASHYEKLKGSPEDNEQKQLFVEQHKHYLDEIIEQISEFSKRVILADANLDKVLSAYNKHRDKPIREQAENIIHLFTLTNLGAPAAFKYFDTTIDRKRYTSTKEVLDATLIHQSITGLYETRIDLSQLGGDGGGGSEAAAKGGGGGTLNLEDEYRLYETSAEPEVSPGSTWLSDFPQAWAETGGMGLAVRQAPLIIPLKATSTPVSIKQYPMSQEAKLGIKPHIQRLLDQGILVPCQSPWNTPLLPVKKPGTNDYRPVQDLREVNKRVEDIHPTVPNPYNLLSGLPPSHRWYTVLDLKDAFFCLRLHPTSQPLFAFEWRDPGMGISGQLTWTRLPQGFKNSPTLFNEALHRDLADFRIQHPDLILLQYVDDILLAATSELDCQQGTRALLLTLGNLGYRASAKKAQLCQKQVKYLGYLLKEGQRWLTEARKETVMGQPTPKTPRQLREFLGKAGFCRLFIPGFAEMAAPLYPLTKPGTLFNWGPDQQKAYQEIKQALLTAPALGLPDLTKPFELFVDEKQGYAKGVLTQKLGPWRRPVAYLSKKLDPVAAGWPPCLRMVAAIAVLRKDAGKLTMGQPLVILAPHAVEALVKQPPDRWLSNARMTHYQAMLLDTDRVQFGPVVALNPATLLPLPEEGAPHDCLEILAETHGTRPDLTDQPIPDADHTWYTDGSSFLQEGQRKAGAAVTTETEVIWARALPAGTSAQRAELIALTQALKMAEGKRLNVYTDSRYAFATAHIHGEIYRRRGWLTSEGREIKNKSEILALLKALFLPKRLSIIHCLGHQKGDSAEARGNRLADQAAREAAIKTPPDTSTLLAGKRTADGSEFEKRTADGSEFESPKKKAKVE

SEQ ID NO: 1916 - protein, 2097 aa, synthetic construct
MPAAKRVKLDGGDKKYSIGLDIGTNSVGWAVITDEYKVPSKKFKVLGNTDRHSIKKNLIGALLFDSGETAEATRLKRTARRRYTRRKNRICYLQEIFSNEMAKVDDSFFHRLEESFLVEEDKKHERHPIFGNIVDEVAYHEKYPTIYHLRKKLVDSTDKADLRLIYLALAHMIKFRGHFLIEGDLNPDNSDVDKLFIQLVQTYNQLFEENPINASGVDAKAILSARLSKSRRLENLIAQLPGEKKNGLFGNLIALSLGLTPNFKSNFDLAEDAKLQLSKDTYDDDLDNLLAQIGDQYADLFLAAKNLSDAILLSDILRVNTEITKAPLSASMIKRYDEHHQDLTLLKALVRQQLPEKYKEIFFDQSKNGYAGYIDGGASQEEFYKFIKPILEKMDGTEELLVKLNREDLLRKQRTFDNGSIPHQIHLGELHAILRRQEDFYPFLKDNREKIEKILTFRIPYYVGPLARGNSRFAWMTRKSEETITPWNFEEVVDKGASAQSFIERMTNFDKNLPNEKVLPKHSLLYEYFTVYNELTKVKYVTEGMRKPAFLSGEQKKAIVDLLFKTNRKVTVKQLKEDYFKKIECFDSVEISGVEDRFNASLGTYHDLLKIIKDKDFLDNEENEDILEDIVLTLTLFEDREMIEERLKTYAHLFDDKVMKQLKRRRYTGWGRLSRKLINGIRDKQSGKTILDFLKSDGFANRNFMQLIHDDSLTFKEDIQKAQVSGQGDSLHEHIANLAGSPAIKKGILQTVKVVDELVKVMGRHKPENIVIEMARENQTTQKGQKNSRERMKRIEEGIKELGSQILKEHPVENTQLQNEKLYLYYLQNGRDMYVDQELDINRLSDYDVDHIVPQSFLKDDSIDNKVLTRSDKARGKSDNVPSEEVVKKMKNYWRQLLNAKLITQRKFDNLTKAERGGLSELDKAGFIKRQLVETRQITKHVAQILDSRMNTKYDENDKLIREVKVITLKSKLVSDFRKDFQFYKVREINNYHHAHDAYLNAVVGTALIKKYPKLESEFVYGDYKVYDVRKMIAKSEQEIGKATAKYFFYSNIMNFFKTEITLANGEIRKRPLIETNGETGEIVWDKGRDFATVRKVLSMPQVNIVKKTEVQTGGFSKESILPKRNSDKLIARKKDWDPKKYGGFDSPTVAYSVLVVAKVEKGKSKKLKSVKELLGITIMERSSFEKNPIDFLEAKGYKEVKKDLIIKLPKYSLFELENGRKRMLASAGELQKGNELALPSKYVNFLYLASHYEKLKGSPEDNEQKQLFVEQHKHYLDEIIEQISEFSKRVILADANLDKVLSAYNKHRDKPIREQAENIIHLFTLTNLGAPAAFKYFDTTIDRKRYTSTKEVLDATLIHQSITGLYETRIDLSQLGGDGGGGSGGSGGSGGSGGTLNLEDEYRLYETSAEPEVSPGSTWLSDFPQAWAETGGMGLAVRQAPLIIPLKATSTPVSIKQYPMSQEAKLGIKPHIQRLLDQGILVPCQSPWNTPLLPVKKPGTNDYRPVQDLREVNKRVEDIHPTVPNPYNLLSGLPPSHRWYTVLDLKDAFFCLRLHPTSQPLFAFEWRDPGMGISGQLTWTRLPQGFKNSPTLFNEALHRDLADFRIQHPDLILLQYVDDILLAATSELDCQQGTRALLLTLGNLGYRASAKKAQLCQKQVKYLGYLLKEGQRWLTEARKETVMGQPTPKTPRQLREFLGKAGFCRLFIPGFAEMAAPLYPLTKPGTLFNWGPDQQKAYQEIKQALLTAPALGLPDLTKPFELFVDEKQGYAKGVLTQKLGPWRRPVAYLSKKLDPVAAGWPPCLRMVAAIAVLRKDAGKLTMGQPLVILAPHAVEALVKQPPDRWLSNARMTHYQAMLLDTDRVQFGPVVALNPATLLPLPEEGAPHDCLEILAETHGTRPDLTDQPIPDADHTWYTDGSSFLQEGQRKAGAAVTTETEVIWARALPAGTSAQRAELIALTQALKMAEGKRLNVYTDSRYAFATAHIHGEIYRRRGWLTSEGREIKNKSEILALLKALFLPKRLSIIHCLGHQKGDSAEARGNRLADQAAREAAIKTPPDTSTLLAGKRTADGSEFEKRTADGSEFESPKKKAKVE

SEQ ID NO: 1917 - protein, 2090 aa, synthetic construct
MPAAKRVKLDGGDKKYSIGLDIGTNSVGWAVITDEYKVPSKKFKVLGNTDRHSIKKNLIGALLFDSGETAEATRLKRTARRRYTRRKNRICYLQEIFSNEMAKVDDSFFHRLEESFLVEEDKKHERHPIFGNIVDEVAYHEKYPTIYHLRKKLVDSTDKADLRLIYLALAHMIKFRGHFLIEGDLNPDNSDVDKLFIQLVQTYNQLFEENPINASGVDAKAILSARLSKSRRLENLIAQLPGEKKNGLFGNLIALSLGLTPNFKSNFDLAEDAKLQLSKDTYDDDLDNLLAQIGDQYADLFLAAKNLSDAILLSDILRVNTEITKAPLSASMIKRYDEHHQDLTLLKALVRQQLPEKYKEIFFDQSKNGYAGYIDGGASQEEFYKFIKPILEKMDGTEELLVKLNREDLLRKQRTFDNGSIPHQIHLGELHAILRRQEDFYPFLKDNREKIEKILTFRIPYYVGPLARGNSRFAWMTRKSEETITPWNFEEVVDKGASAQSFIERMTNFDKNLPNEKVLPKHSLLYEYFTVYNELTKVKYVTEGMRKPAFLSGEQKKAIVDLLFKTNRKVTVKQLKEDYFKKIECFDSVEISGVEDRFNASLGTYHDLLKIIKDKDFLDNEENEDILEDIVLTLTLFEDREMIEERLKTYAHLFDDKVMKQLKRRRYTGWGRLSRKLINGIRDKQSGKTILDFLKSDGFANRNFMQLIHDDSLTFKEDIQKAQVSGQGDSLHEHIANLAGSPAIKKGILQTVKVVDELVKVMGRHKPENIVIEMARENQTTQKGQKNSRERMKRIEEGIKELGSQILKEHPVENTQLQNEKLYLYYLQNGRDMYVDQELDINRLSDYDVDHIVPQSFLKDDSIDNKVLTRSDKARGKSDNVPSEEVVKKMKNYWRQLLNAKLITQRKFDNLTKAERGGLSELDKAGFIKRQLVETRQITKHVAQILDSRMNTKYDENDKLIREVKVITLKSKLVSDFRKDFQFYKVREINNYHHAHDAYLNAVVGTALIKKYPKLESEFVYGDYKVYDVRKMIAKSEQEIGKATAKYFFYSNIMNFFKTEITLANGEIRKRPLIETNGETGEIVWDKGRDFATVRKVLSMPQVNIVKKTEVQTGGFSKESILPKRNSDKLIARKKDWDPKKYGGFDSPTVAYSVLVVAKVEKGKSKKLKSVKELLGITIMERSSFEKNPIDFLEAKGYKEVKKDLIIKLPKYSLFELENGRKRMLASAGELQKGNELALPSKYVNFLYLASHYEKLKGSPEDNEQKQLFVEQHKHYLDEIIEQISEFSKRVILADANLDKVLSAYNKHRDKPIREQAENIIHLFTLTNLGAPAAFKYFDTTIDRKRYTSTKEVLDATLIHQSITGLYETRIDLSQLGGDGGGGGGGGGTLNLEDEYRLYETSAEPEVSPGSTWLSDFPQAWAETGGMGLAVRQAPLIIPLKATSTPVSIKQYPMSQEAKLGIKPHIQRLLDQGILVPCQSPWNTPLLPVKKPGTNDYRPVQDLREVNKRVEDIHPTVPNPYNLLSGLPPSHRWYTVLDLKDAFFCLRLHPTSQPLFAFEWRDPGMGISGQLTWTRLPQGFKNSPTLFNEALHRDLADFRIQHPDLILLQYVDDILLAATSELDCQQGTRALLLTLGNLGYRASAKKAQLCQKQVKYLGYLLKEGQRWLTEARKETVMGQPTPKTPRQLREFLGKAGFCRLFIPGFAEMAAPLYPLTKPGTLFNWGPDQQKAYQEIKQALLTAPALGLPDLTKPFELFVDEKQGYAKGVLTQKLGPWRRPVAYLSKKLDPVAAGWPPCLRMVAAIAVLRKDAGKLTMGQPLVILAPHAVEALVKQPPDRWLSNARMTHYQAMLLDTDRVQFGPVVALNPATLLPLPEEGAPHDCLEILAETHGTRPDLTDQPIPDADHTWYTDGSSFLQEGQRKAGAAVTTETEVIWARALPAGTSAQRAELIALTQALKMAEGKRLNVYTDSRYAFATAHIHGEIYRRRGWLTSEGREIKNKSEILALLKALFLPKRLSIIHCLGHQKGDSAEARGNRLADQAAREAAIKTPPDTSTLLAGKRTADGSEFEKRTADGSEFESPKKKAKVE

SEQ ID NO: 1918 - protein, 2131 aa, synthetic construct
MPAAKRVKLDGGDKKYSIGLDIGTNSVGWAVITDEYKVPSKKFKVLGNTDRHSIKKNLIGALLFDSGETAEATRLKRTARRRYTRRKNRICYLQEIFSNEMAKVDDSFFHRLEESFLVEEDKKHERHPIFGNIVDEVAYHEKYPTIYHLRKKLVDSTDKADLRLIYLALAHMIKFRGHFLIEGDLNPDNSDVDKLFIQLVQTYNQLFEENPINASGVDAKAILSARLSKSRRLENLIAQLPGEKKNGLFGNLIALSLGLTPNFKSNFDLAEDAKLQLSKDTYDDDLDNLLAQIGDQYADLFLAAKNLSDAILLSDILRVNTEITKAPLSASMIKRYDEHHQDLTLLKALVRQQLPEKYKEIFFDQSKNGYAGYIDGGASQEEFYKFIKPILEKMDGTEELLVKLNREDLLRKQRTFDNGSIPHQIHLGELHAILRRQEDFYPFLKDNREKIEKILTFRIPYYVGPLARGNSRFAWMTRKSEETITPWNFEEVVDKGASAQSFIERMTNFDKNLPNEKVLPKHSLLYEYFTVYNELTKVKYVTEGMRKPAFLSGEQKKAIVDLLFKTNRKVTVKQLKEDYFKKIECFDSVEISGVEDRFNASLGTYHDLLKIIKDKDFLDNEENEDILEDIVLTLTLFEDREMIEERLKTYAHLFDDKVMKQLKRRRYTGWGRLSRKLINGIRDKQSGKTILDFLKSDGFANRNFMQLIHDDSLTFKEDIQKAQVSGQGDSLHEHIANLAGSPAIKKGILQTVKVVDELVKVMGRHKPENIVIEMARENQTTQKGQKNSRERMKRIEEGIKELGSQILKEHPVENTQLQNEKLYLYYLQNGRDMYVDQELDINRLSDYDVDHIVPQSFLKDDSIDNKVLTRSDKARGKSDNVPSEEVVKKMKNYWRQLLNAKLITQRKFDNLTKAERGGLSELDKAGFIKRQLVETRQITKHVAQILDSRMNTKYDENDKLIREVKVITLKSKLVSDFRKDFQFYKVREINNYHHAHDAYLNAVVGTALIKKYPKLESEFVYGDYKVYDVRKMIAKSEQEIGKATAKYFFYSNIMNFFKTEITLANGEIRKRPLIETNGETGEIVWDKGRDFATVRKVLSMPQVNIVKKTEVQTGGFSKESILPKRNSDKLIARKKDWDPKKYGGFDSPTVAYSVLVVAKVEKGKSKKLKSVKELLGITIMERSSFEKNPIDFLEAKGYKEVKKDLIIKLPKYSLFELENGRKRMLASAGELQKGNELALPSKYVNFLYLASHYEKLKGSPEDNEQKQLFVEQHKHYLDEIIEQISEFSKRVILADANLDKVLSAYNKHRDKPIREQAENIIHLFTLTNLGAPAAFKYFDTTIDRKRYTSTKEVLDATLIHQSITGLYETRIDLSQLGGDGGAEAAAKEAAAKEAAAKEAAAKALEAEAAAKEAAAKEAAAKEAAAKAGGTLNLEDEYRLYETSAEPEVSPGSTWLSDFPQAWAETGGMGLAVRQAPLIIPLKATSTPVSIKQYPMSQEAKLGIKPHIQRLLDQGILVPCQSPWNTPLLPVKKPGTNDYRPVQDLREVNKRVEDIHPTVPNPYNLLSGLPPSHRWYTVLDLKDAFFCLRLHPTSQPLFAFEWRDPGMGISGQLTWTRLPQGFKNSPTLFNEALHRDLADFRIQHPDLILLQYVDDILLAATSELDCQQGTRALLLTLGNLGYRASAKKAQLCQKQVKYLGYLLKEGQRWLTEARKETVMGQPTPKTPRQLREFLGKAGFCRLFIPGFAEMAAPLYPLTKPGTLFNWGPDQQKAYQEIKQALLTAPALGLPDLTKPFELFVDEKQGYAKGVLTQKLGPWRRPVAYLSKKLDPVAAGWPPCLRMVAAIAVLRKDAGKLTMGQPLVILAPHAVEALVKQPPDRWLSNARMTHYQAMLLDTDRVQFGPVVALNPATLLPLPEEGAPHDCLEILAETHGTRPDLTDQPIPDADHTWYTDGSSFLQEGQRKAGAAVTTETEVIWARALPAGTSAQRAELIALTQALKMAEGKRLNVYTDSRYAFATAHIHGEIYRRRGWLTSEGREIKNKSEILALLKALFLPKRLSIIHCLGHQKGDSAEARGNRLADQAAREAAIKTPPDTSTLLAGKRTADGSEFEKRTADGSEFESPKKKAKVE

SEQ ID NO: 1919 - protein, 2096 aa, synthetic construct
MPAAKRVKLDGGDKKYSIGLDIGTNSVGWAVITDEYKVPSKKFKVLGNTDRHSIKKNLIGALLFDSGETAEATRLKRTARRRYTRRKNRICYLQEIFSNEMAKVDDSFFHRLEESFLVEEDKKHERHPIFGNIVDEVAYHEKYPTIYHLRKKLVDSTDKADLRLIYLALAHMIKFRGHFLIEGDLNPDNSDVDKLFIQLVQTYNQLFEENPINASGVDAKAILSARLSKSRRLENLIAQLPGEKKNGLFGNLIALSLGLTPNFKSNFDLAEDAKLQLSKDTYDDDLDNLLAQIGDQYADLFLAAKNLSDAILLSDILRVNTEITKAPLSASMIKRYDEHHQDLTLLKALVRQQLPEKYKEIFFDQSKNGYAGYIDGGASQEEFYKFIKPILEKMDGTEELLVKLNREDLLRKQRTFDNGSIPHQIHLGELHAILRRQEDFYPFLKDNREKIEKILTFRIPYYVGPLARGNSRFAWMTRKSEETITPWNFEEVVDKGASAQSFIERMTNFDKNLPNEKVLPKHSLLYEYFTVYNELTKVKYVTEGMRKPAFLSGEQKKAIVDLLFKTNRKVTVKQLKEDYFKKIECFDSVEISGVEDRFNASLGTYHDLLKIIKDKDFLDNEENEDILEDIVLTLTLFEDREMIEERLKTYAHLFDDKVMKQLKRRRYTGWGRLSRKLINGIRDKQSGKTILDFLKSDGFANRNFMQLIHDDSLTFKEDIQKAQVSGQGDSLHEHIANLAGSPAIKKGILQTVKVVDELVKVMGRHKPENIVIEMARENQTTQKGQKNSRERMKRIEEGIKELGSQILKEHPVENTQLQNEKLYLYYLQNGRDMYVDQELDINRLSDYDVDHIVPQSFLKDDSIDNKVLTRSDKARGKSDNVPSEEVVKKMKNYWRQLLNAKLITQRKFDNLTKAERGGLSELDKAGFIKRQLVETRQITKHVAQILDSRMNTKYDENDKLIREVKVITLKSKLVSDFRKDFQFYKVREINNYHHAHDAYLNAVVGTALIKKYPKLESEFVYGDYKVYDVRKMIAKSEQEIGKATAKYFFYSNIMNFFKTEITLANGEIRKRPLIETNGETGEIVWDKGRDFATVRKVLSMPQVNIVKKTEVQTGGFSKESILPKRNSDKLIARKKDWDPKKYGGFDSPTVAYSVLVVAKVEKGKSKKLKSVKELLGITIMERSSFEKNPIDFLEAKGYKEVKKDLIIKLPKYSLFELENGRKRMLASAGELQKGNELALPSKYVNFLYLASHYEKLKGSPEDNEQKQLFVEQHKHYLDEIIEQISEFSKRVILADANLDKVLSAYNKHRDKPIREQAENIIHLFTLTNLGAPAAFKYFDTTIDRKRYTSTKEVLDATLIHQSITGLYETRIDLSQLGGDGGPAPEAAAKGSSGGTLNLEDEYRLYETSAEPEVSPGSTWLSDFPQAWAETGGMGLAVRQAPLIIPLKATSTPVSIKQYPMSQEAKLGIKPHIQRLLDQGILVPCQSPWNTPLLPVKKPGTNDYRPVQDLREVNKRVEDIHPTVPNPYNLLSGLPPSHRWYTVLDLKDAFFCLRLHPTSQPLFAFEWRDPGMGISGQLTWTRLPQGFKNSPTLFNEALHRDLADFRIQHPDLILLQYVDDILLAATSELDCQQGTRALLLTLGNLGYRASAKKAQLCQKQVKYLGYLLKEGQRWLTEARKETVMGQPTPKTPRQLREFLGKAGFCRLFIPGFAEMAAPLYPLTKPGTLFNWGPDQQKAYQEIKQALLTAPALGLPDLTKPFELFVDEKQGYAKGVLTQKLGPWRRPVAYLSKKLDPVAAGWPPCLRMVAAIAVLRKDAGKLTMGQPLVILAPHAVEALVKQPPDRWLSNARMTHYQAMLLDTDRVQFGPVVALNPATLLPLPEEGAPHDCLEILAETHGTRPDLTDQPIPDADHTWYTDGSSFLQEGQRKAGAAVTTETEVIWARALPAGTSAQRAELIALTQALKMAEGKRLNVYTDSRYAFATAHIHGEIYRRRGWLTSEGREIKNKSEILALLKALFLPKRLSIIHCLGHQKGDSAEARGNRLADQAAREAAIKTPPDTSTLLAGKRTADGSEFEKRTADGSEFESPKKKAKVE

SEQ ID NO: 1920 - protein, 2096 aa, synthetic construct
MPAAKRVKLDGGDKKYSIGLDIGTNSVGWAVITDEYKVPSKKFKVLGNTDRHSIKKNLIGALLFDSGETAEATRLKRTARRRYTRRKNRICYLQEIFSNEMAKVDDSFFHRLEESFLVEEDKKHERHPIFGNIVDEVAYHEKYPTIYHLRKKLVDSTDKADLRLIYLALAHMIKFRGHFLIEGDLNPDNSDVDKLFIQLVQTYNQLFEENPINASGVDAKAILSARLSKSRRLENLIAQLPGEKKNGLFGNLIALSLGLTPNFKSNFDLAEDAKLQLSKDTYDDDLDNLLAQIGDQYADLFLAAKNLSDAILLSDILRVNTEITKAPLSASMIKRYDEHHQDLTLLKALVRQQLPEKYKEIFFDQSKNGYAGYIDGGASQEEFYKFIKPILEKMDGTEELLVKLNREDLLRKQRTFDNGSIPHQIHLGELHAILRRQEDFYPFLKDNREKIEKILTFRIPYYVGPLARGNSRFAWMTRKSEETITPWNFEEVVDKGASAQSFIERMTNFDKNLPNEKVLPKHSLLYEYFTVYNELTKVKYVTEGMRKPAFLSGEQKKAIVDLLFKTNRKVTVKQLKEDYFKKIECFDSVEISGVEDRFNASLGTYHDLLKIIKDKDFLDNEENEDILEDIVLTLTLFEDREMIEERLKTYAHLFDDKVMKQLKRRRYTGWGRLSRKLINGIRDKQSGKTILDFLKSDGFANRNFMQLIHDDSLTFKEDIQKAQVSGQGDSLHEHIANLAGSPAIKKGILQTVKVVDELVKVMGRHKPENIVIEMARENQTTQKGQKNSRERMKRIEEGIKELGSQILKEHPVENTQLQNEKLYLYYLQNGRDMYVDQELDINRLSDYDVDHIVPQSFLKDDSIDNKVLTRSDKARGKSDNVPSEEVVKKMKNYWRQLLNAKLITQRKFDNLTKAERGGLSELDKAGFIKRQLVETRQITKHVAQILDSRMNTKYDENDKLIREVKVITLKSKLVSDFRKDFQFYKVREINNYHHAHDAYLNAVVGTALIKKYPKLESEFVYGDYKVYDVRKMIAKSEQEIGKATAKYFFYSNIMNFFKTEITLANGEIRKRPLIETNGETGEIVWDKGRDFATVRKVLSMPQVNIVKKTEVQTGGFSKESILPKRNSDKLIARKKDWDPKKYGGFDSPTVAYSVLVVAKVEKGKSKKLKSVKELLGITIMERSSFEKNPIDFLEAKGYKEVKKDLIIKLPKYSLFELENGRKRMLASAGELQKGNELALPSKYVNFLYLASHYEKLKGSPEDNEQKQLFVEQHKHYLDEIIEQISEFSKRVILADANLDKVLSAYNKHRDKPIREQAENIIHLFTLTNLGAPAAFKYFDTTIDRKRYTSTKEVLDATLIHQSITGLYETRIDLSQLGGDGGGGGEAAAKGGSGGTLNLEDEYRLYETSAEPEVSPGSTWLSDFPQAWAETGGMGLAVRQAPLIIPLKATSTPVSIKQYPMSQEAKLGIKPHIQRLLDQGILVPCQSPWNTPLLPVKKPGTNDYRPVQDLREVNKRVEDIHPTVPNPYNLLSGLPPSHRWYTVLDLKDAFFCLRLHPTSQPLFAFEWRDPGMGISGQLTWTRLPQGFKNSPTLFNEALHRDLADFRIQHPDLILLQYVDDILLAATSELDCQQGTRALLLTLGNLGYRASAKKAQLCQKQVKYLGYLLKEGQRWLTEARKETVMGQPTPKTPRQLREFLGKAGFCRLFIPGFAEMAAPLYPLTKPGTLFNWGPDQQKAYQEIKQALLTAPALGLPDLTKPFELFVDEKQGYAKGVLTQKLGPWRRPVAYLSKKLDPVAAGWPPCLRMVAAIAVLRKDAGKLTMGQPLVILAPHAVEALVKQPPDRWLSNARMTHYQAMLLDTDRVQFGPVVALNPATLLPLPEEGAPHDCLEILAETHGTRPDLTDQPIPDADHTWYTDGSSFLQEGQRKAGAAVTTETEVIWARALPAGTSAQRAELIALTQALKMAEGKRLNVYTDSRYAFATAHIHGEIYRRRGWLTSEGREIKNKSEILALLKALFLPKRLSIIHCLGHQKGDSAEARGNRLADQAAREAAIKTPPDTSTLLAGKRTADGSEFEKRTADGSEFESPKKKAKVE

SEQ ID NO: 1921 - protein, 2096 aa, synthetic construct
MPAAKRVKLDGGDKKYSIGLDIGTNSVGWAVITDEYKVPSKKFKVLGNTDRHSIKKNLIGALLFDSGETAEATRLKRTARRRYTRRKNRICYLQEIFSNEMAKVDDSFFHRLEESFLVEEDKKHERHPIFGNIVDEVAYHEKYPTIYHLRKKLVDSTDKADLRLIYLALAHMIKFRGHFLIEGDLNPDNSDVDKLFIQLVQTYNQLFEENPINASGVDAKAILSARLSKSRRLENLIAQLPGEKKNGLFGNLIALSLGLTPNFKSNFDLAEDAKLQLSKDTYDDDLDNLLAQIGDQYADLFLAAKNLSDAILLSDILRVNTEITKAPLSASMIKRYDEHHQDLTLLKALVRQQLPEKYKEIFFDQSKNGYAGYIDGGASQEEFYKFIKPILEKMDGTEELLVKLNREDLLRKQRTFDNGSIPHQIHLGELHAILRRQEDFYPFLKDNREKIEKILTFRIPYYVGPLARGNSRFAWMTRKSEETITPWNFEEVVDKGASAQSFIERMTNFDKNLPNEKVLPKHSLLYEYFTVYNELTKVKYVTEGMRKPAFLSGEQKKAIVDLLFKTNRKVTVKQLKEDYFKKIECFDSVEISGVEDRFNASLGTYHDLLKIIKDKDFLDNEENEDILEDIVLTLTLFEDREMIEERLKTYAHLFDDKVMKQLKRRRYTGWGRLSRKLINGIRDKQSGKTILDFLKSDGFANRNFMQLIHDDSLTFKEDIQKAQVSGQGDSLHEHIANLAGSPAIKKGILQTVKVVDELVKVMGRHKPENIVIEMARENQTTQKGQKNSRERMKRIEEGIKELGSQILKEHPVENTQLQNEKLYLYYLQNGRDMYVDQELDINRLSDYDVDHIVPQSFLKDDSIDNKVLTRSDKARGKSDNVPSEEVVKKMKNYWRQLLNAKLITQRKFDNLTKAERGGLSELDKAGFIKRQLVETRQITKHVAQILDSRMNTKYDENDKLIREVKVITLKSKLVSDFRKDFQFYKVREINNYHHAHDAYLNAVVGTALIKKYPKLESEFVYGDYKVYDVRKMIAKSEQEIGKATAKYFFYSNIMNFFKTEITLANGEIRKRPLIETNGETGEIVWDKGRDFATVRKVLSMPQVNIVKKTEVQTGGFSKESILPKRNSDKLIARKKDWDPKKYGGFDSPTVAYSVLVVAKVEKGKSKKLKSVKELLGITIMERSSFEKNPIDFLEAKGYKEVKKDLIIKLPKYSLFELENGRKRMLASAGELQKGNELALPSKYVNFLYLASHYEKLKGSPEDNEQKQLFVEQHKHYLDEIIEQISEFSKRVILADANLDKVLSAYNKHRDKPIREQAENIIHLFTLTNLGAPAAFKYFDTTIDRKRYTSTKEVLDATLIHQSITGLYETRIDLSQLGGDGGEAAAKGSSGGGGGTLNLEDEYRLYETSAEPEVSPGSTWLSDFPQAWAETGGMGLAVRQAPLIIPLKATSTPVSIKQYPMSQEAKLGIKPHIQRLLDQGILVPCQSPWNTPLLPVKKPGTNDYRPVQDLREVNKRVEDIHPTVPNPYNLLSGLPPSHRWYTVLDLKDAFFCLRLHPTSQPLFAFEWRDPGMGISGQLTWTRLPQGFKNSPTLFNEALHRDLADFRIQHPDLILLQYVDDILLAATSELDCQQGTRALLLTLGNLGYRASAKKAQLCQKQVKYLGYLLKEGQRWLTEARKETVMGQPTPKTPRQLREFLGKAGFCRLFIPGFAEMAAPLYPLTKPGTLFNWGPDQQKAYQEIKQALLTAPALGLPDLTKPFELFVDEKQGYAKGVLTQKLGPWRRPVAYLSKKLDPVAAGWPPCLRMVAAIAVLRKDAGKLTMGQPLVILAPHAVEALVKQPPDRWLSNARMTHYQAMLLDTDRVQFGPVVALNPATLLPLPEEGAPHDCLEILAETHGTRPDLTDQPIPDADHTWYTDGSSFLQEGQRKAGAAVTTETEVIWARALPAGTSAQRAELIALTQALKMAEGKRLNVYTDSRYAFATAHIHGEIYRRRGWLTSEGREIKNKSEILALLKALFLPKRLSIIHCLGHQKGDSAEARGNRLADQAAREAAIKTPPDTSTLLAGKRTADGSEFEKRTADGSEFESPKKKAKVE

SEQ ID NO: 1922 - protein, 2093 aa, synthetic construct
MPAAKRVKLDGGDKKYSIGLDIGTNSVGWAVITDEYKVPSKKFKVLGNTDRHSIKKNLIGALLFDSGETAEATRLKRTARRRYTRRKNRICYLQEIFSNEMAKVDDSFFHRLEESFLVEEDKKHERHPIFGNIVDEVAYHEKYPTIYHLRKKLVDSTDKADLRLIYLALAHMIKFRGHFLIEGDLNPDNSDVDKLFIQLVQTYNQLFEENPINASGVDAKAILSARLSKSRRLENLIAQLPGEKKNGLFGNLIALSLGLTPNFKSNFDLAEDAKLQLSKDTYDDDLDNLLAQIGDQYADLFLAAKNLSDAILLSDILRVNTEITKAPLSASMIKRYDEHHQDLTLLKALVRQQLPEKYKEIFFDQSKNGYAGYIDGGASQEEFYKFIKPILEKMDGTEELLVKLNREDLLRKQRTFDNGSIPHQIHLGELHAILRRQEDFYPFLKDNREKIEKILTFRIPYYVGPLARGNSRFAWMTRKSEETITPWNFEEVVDKGASAQSFIERMTNFDKNLPNEKVLPKHSLLYEYFTVYNELTKVKYVTEGMRKPAFLSGEQKKAIVDLLFKTNRKVTVKQLKEDYFKKIECFDSVEISGVEDRFNASLGTYHDLLKIIKDKDFLDNEENEDILEDIVLTLTLFEDREMIEERLKTYAHLFDDKVMKQLKRRRYTGWGRLSRKLINGIRDKQSGKTILDFLKSDGFANRNFMQLIHDDSLTFKEDIQKAQVSGQGDSLHEHIANLAGSPAIKKGILQTVKVVDELVKVMGRHKPENIVIEMARENQTTQKGQKNSRERMKRIEEGIKELGSQILKEHPVENTQLQNEKLYLYYLQNGRDMYVDQELDINRLSDYDVDHIVPQSFLKDDSIDNKVLTRSDKARGKSDNVPSEEVVKKMKNYWRQLLNAKLITQRKFDNLTKAERGGLSELDKAGFIKRQLVETRQITKHVAQILDSRMNTKYDENDKLIREVKVITLKSKLVSDFRKDFQFYKVREINNYHHAHDAYLNAVVGTALIKKYPKLESEFVYGDYKVYDVRKMIAKSEQEIGKATAKYFFYSNIMNFFKTEITLANGEIRKRPLIETNGETGEIVWDKGRDFATVRKVLSMPQVNIVKKTEVQTGGFSKESILPKRNSDKLIARKKDWDPKKYGGFDSPTVAYSVLVVAKVEKGKSKKLKSVKELLGITIMERSSFEKNPIDFLEAKGYKEVKKDLIIKLPKYSLFELENGRKRMLASAGELQKGNELALPSKYVNFLYLASHYEKLKGSPEDNEQKQLFVEQHKHYLDEIIEQISEFSKRVILADANLDKVLSAYNKHRDKPIREQAENIIHLFTLTNLGAPAAFKYFDTTIDRKRYTSTKEVLDATLIHQSITGLYETRIDLSQLGGDGGGGSEAAAKGGTLNLEDEYRLYETSAEPEVSPGSTWLSDFPQAWAETGGMGLAVRQAPLIIPLKATSTPVSIKQYPMSQEAKLGIKPHIQRLLDQGILVPCQSPWNTPLLPVKKPGTNDYRPVQDLREVNKRVEDIHPTVPNPYNLLSGLPPSHRWYTVLDLKDAFFCLRLHPTSQPLFAFEWRDPGMGISGQLTWTRLPQGFKNSPTLFNEALHRDLADFRIQHPDLILLQYVDDILLAATSELDCQQGTRALLLTLGNLGYRASAKKAQLCQKQVKYLGYLLKEGQRWLTEARKETVMGQPTPKTPRQLREFLGKAGFCRLFIPGFAEMAAPLYPLTKPGTLFNWGPDQQKAYQEIKQALLTAPALGLPDLTKPFELFVDEKQGYAKGVLTQKLGPWRRPVAYLSKKLDPVAAGWPPCLRMVAAIAVLRKDAGKLTMGQPLVILAPHAVEALVKQPPDRWLSNARMTHYQAMLLDTDRVQFGPVVALNPATLLPLPEEGAPHDCLEILAETHGTRPDLTDQPIPDADHTWYTDGSSFLQEGQRKAGAAVTTETEVIWARALPAGTSAQRAELIALTQALKMAEGKRLNVYTDSRYAFATAHIHGEIYRRRGWLTSEGREIKNKSEILALLKALFLPKRLSIIHCLGHQKGDSAEARGNRLADQAAREAAIKTPPDTSTLLAGKRTADGSEFEKRTADGSEFESPKKKAKVE

SEQ ID NO: 1923 - protein, 2100 aa, synthetic construct
MPAAKRVKLDGGDKKYSIGLDIGTNSVGWAVITDEYKVPSKKFKVLGNTDRHSIKKNLIGALLFDSGETAEATRLKRTARRRYTRRKNRICYLQEIFSNEMAKVDDSFFHRLEESFLVEEDKKHERHPIFGNIVDEVAYHEKYPTIYHLRKKLVDSTDKADLRLIYLALAHMIKFRGHFLIEGDLNPDNSDVDKLFIQLVQTYNQLFEENPINASGVDAKAILSARLSKSRRLENLIAQLPGEKKNGLFGNLIALSLGLTPNFKSNFDLAEDAKLQLSKDTYDDDLDNLLAQIGDQYADLFLAAKNLSDAILLSDILRVNTEITKAPLSASMIKRYDEHHQDLTLLKALVRQQLPEKYKEIFFDQSKNGYAGYIDGGASQEEFYKFIKPILEKMDGTEELLVKLNREDLLRKQRTFDNGSIPHQIHLGELHAILRRQEDFYPFLKDNREKIEKILTFRIPYYVGPLARGNSRFAWMTRKSEETITPWNFEEVVDKGASAQSFIERMTNFDKNLPNEKVLPKHSLLYEYFTVYNELTKVKYVTEGMRKPAFLSGEQKKAIVDLLFKTNRKVTVKQLKEDYFKKIECFDSVEISGVEDRFNASLGTYHDLLKIIKDKDFLDNEENEDILEDIVLTLTLFEDREMIEERLKTYAHLFDDKVMKQLKRRRYTGWGRLSRKLINGIRDKQSGKTILDFLKSDGFANRNFMQLIHDDSLTFKEDIQKAQVSGQGDSLHEHIANLAGSPAIKKGILQTVKVVDELVKVMGRHKPENIVIEMARENQTTQKGQKNSRERMKRIEEGIKELGSQILKEHPVENTQLQNEKLYLYYLQNGRDMYVDQELDINRLSDYDVDHIVPQSFLKDDSIDNKVLTRSDKARGKSDNVPSEEVVKKMKNYWRQLLNAKLITQRKFDNLTKAERGGLSELDKAGFIKRQLVETRQITKHVAQILDSRMNTKYDENDKLIREVKVITLKSKLVSDFRKDFQFYKVREINNYHHAHDAYLNAVVGTALIKKYPKLESEFVYGDYKVYDVRKMIAKSEQEIGKATAKYFFYSNIMNFFKTEITLANGEIRKRPLIETNGETGEIVWDKGRDFATVRKVLSMPQVNIVKKTEVQTGGFSKESILPKRNSDKLIARKKDWDPKKYGGFDSPTVAYSVLVVAKVEKGKSKKLKSVKELLGITIMERSSFEKNPIDFLEAKGYKEVKKDLIIKLPKYSLFELENGRKRMLASAGELQKGNELALPSKYVNFLYLASHYEKLKGSPEDNEQKQLFVEQHKHYLDEIIEQISEFSKRVILADANLDKVLSAYNKHRDKPIREQAENIIHLFTLTNLGAPAAFKYFDTTIDRKRYTSTKEVLDATLIHQSITGLYETRIDLSQLGGDGGGSSGSSGSSGSSGSSGGTLNLEDEYRLYETSAEPEVSPGSTWLSDFPQAWAETGGMGLAVRQAPLIIPLKATSTPVSIKQYPMSQEAKLGIKPHIQRLLDQGILVPCQSPWNTPLLPVKKPGTNDYRPVQDLREVNKRVEDIHPTVPNPYNLLSGLPPSHRWYTVLDLKDAFFCLRLHPTSQPLFAFEWRDPGMGISGQLTWTRLPQGFKNSPTLFNEALHRDLADFRIQHPDLILLQYVDDILLAATSELDCQQGTRALLLTLGNLGYRASAKKAQLCQKQVKYLGYLLKEGQRWLTEARKETVMGQPTPKTPRQLREFLGKAGFCRLFIPGFAEMAAPLYPLTKPGTLFNWGPDQQKAYQEIKQALLTAPALGLPDLTKPFELFVDEKQGYAKGVLTQKLGPWRRPVAYLSKKLDPVAAGWPPCLRMVAAIAVLRKDAGKLTMGQPLVILAPHAVEALVKQPPDRWLSNARMTHYQAMLLDTDRVQFGPVVALNPATLLPLPEEGAPHDCLEILAETHGTRPDLTDQPIPDADHTWYTDGSSFLQEGQRKAGAAVTTETEVIWARALPAGTSAQRAELIALTQALKMAEGKRLNVYTDSRYAFATAHIHGEIYRRRGWLTSEGREIKNKSEILALLKALFLPKRLSIIHCLGHQKGDSAEARGNRLADQAAREAAIKTPPDTSTLLAGKRTADGSEFEKRTADGSEFESPKKKAKVE

SEQ ID NO: 1924 - protein, 2096 aa, synthetic construct
MPAAKRVKLDGGDKKYSIGLDIGTNSVGWAVITDEYKVPSKKFKVLGNTDRHSIKKNLIGALLFDSGETAEATRLKRTARRRYTRRKNRICYLQEIFSNEMAKVDDSFFHRLEESFLVEEDKKHERHPIFGNIVDEVAYHEKYPTIYHLRKKLVDSTDKADLRLIYLALAHMIKFRGHFLIEGDLNPDNSDVDKLFIQLVQTYNQLFEENPINASGVDAKAILSARLSKSRRLENLIAQLPGEKKNGLFGNLIALSLGLTPNFKSNFDLAEDAKLQLSKDTYDDDLDNLLAQIGDQYADLFLAAKNLSDAILLSDILRVNTEITKAPLSASMIKRYDEHHQDLTLLKALVRQQLPEKYKEIFFDQSKNGYAGYIDGGASQEEFYKFIKPILEKMDGTEELLVKLNREDLLRKQRTFDNGSIPHQIHLGELHAILRRQEDFYPFLKDNREKIEKILTFRIPYYVGPLARGNSRFAWMTRKSEETITPWNFEEVVDKGASAQSFIERMTNFDKNLPNEKVLPKHSLLYEYFTVYNELTKVKYVTEGMRKPAFLSGEQKKAIVDLLFKTNRKVTVKQLKEDYFKKIECFDSVEISGVEDRFNASLGTYHDLLKIIKDKDFLDNEENEDILEDIVLTLTLFEDREMIEERLKTYAHLFDDKVMKQLKRRRYTGWGRLSRKLINGIRDKQSGKTILDFLKSDGFANRNFMQLIHDDSLTFKEDIQKAQVSGQGDSLHEHIANLAGSPAIKKGILQTVKVVDELVKVMGRHKPENIVIEMARENQTTQKGQKNSRERMKRIEEGIKELGSQILKEHPVENTQLQNEKLYLYYLQNGRDMYVDQELDINRLSDYDVDHIVPQSFLKDDSIDNKVLTRSDKARGKSDNVPSEEVVKKMKNYWRQLLNAKLITQRKFDNLTKAERGGLSELDKAGFIKRQLVETRQITKHVAQILDSRMNTKYDENDKLIREVKVITLKSKLVSDFRKDFQFYKVREINNYHHAHDAYLNAVVGTALIKKYPKLESEFVYGDYKVYDVRKMIAKSEQEIGKATAKYFFYSNIMNFFKTEITLANGEIRKRPLIETNGETGEIVWDKGRDFATVRKVLSMPQVNIVKKTEVQTGGFSKESILPKRNSDKLIARKKDWDPKKYGGFDSPTVAYSVLVVAKVEKGKSKKLKSVKELLGITIMERSSFEKNPIDFLEAKGYKEVKKDLIIKLPKYSLFELENGRKRMLASAGELQKGNELALPSKYVNFLYLASHYEKLKGSPEDNEQKQLFVEQHKHYLDEIIEQISEFSKRVILADANLDKVLSAYNKHRDKPIREQAENIIHLFTLTNLGAPAAFKYFDTTIDRKRYTSTKEVLDATLIHQSITGLYETRIDLSQLGGDGGPAPAPAPAPAPGGTLNLEDEYRLYETSAEPEVSPGSTWLSDFPQAWAETGGMGLAVRQAPLIIPLKATSTPVSIKQYPMSQEAKLGIKPHIQRLLDQGILVPCQSPWNTPLLPVKKPGTNDYRPVQDLREVNKRVEDIHPTVPNPYNLLSGLPPSHRWYTVLDLKDAFFCLRLHPTSQPLFAFEWRDPGMGISGQLTWTRLPQGFKNSPTLFNEALHRDLADFRIQHPDLILLQYVDDILLAATSELDCQQGTRALLLTLGNLGYRASAKKAQLCQKQVKYLGYLLKEGQRWLTEARKETVMGQPTPKTPRQLREFLGKAGFCRLFIPGFAEMAAPLYPLTKPGTLFNWGPDQQKAYQEIKQALLTAPALGLPDLTKPFELFVDEKQGYAKGVLTQKLGPWRRPVAYLSKKLDPVAAGWPPCLRMVAAIAVLRKDAGKLTMGQPLVILAPHAVEALVKQPPDRWLSNARMTHYQAMLLDTDRVQFGPVVALNPATLLPLPEEGAPHDCLEILAETHGTRPDLTDQPIPDADHTWYTDGSSFLQEGQRKAGAAVTTETEVIWARALPAGTSAQRAELIALTQALKMAEGKRLNVYTDSRYAFATAHIHGEIYRRRGWLTSEGREIKNKSEILALLKALFLPKRLSIIHCLGHQKGDSAEARGNRLADQAAREAAIKTPPDTSTLLAGKRTADGSEFEKRTADGSEFESPKKKAKVE

SEQ ID NO: 1925 - protein, 2094 aa, synthetic construct
MPAAKRVKLDGGDKKYSIGLDIGTNSVGWAVITDEYKVPSKKFKVLGNTDRHSIKKNLIGALLFDSGETAEATRLKRTARRRYTRRKNRICYLQEIFSNEMAKVDDSFFHRLEESFLVEEDKKHERHPIFGNIVDEVAYHEKYPTIYHLRKKLVDSTDKADLRLIYLALAHMIKFRGHFLIEGDLNPDNSDVDKLFIQLVQTYNQLFEENPINASGVDAKAILSARLSKSRRLENLIAQLPGEKKNGLFGNLIALSLGLTPNFKSNFDLAEDAKLQLSKDTYDDDLDNLLAQIGDQYADLFLAAKNLSDAILLSDILRVNTEITKAPLSASMIKRYDEHHQDLTLLKALVRQQLPEKYKEIFFDQSKNGYAGYIDGGASQEEFYKFIKPILEKMDGTEELLVKLNREDLLRKQRTFDNGSIPHQIHLGELHAILRRQEDFYPFLKDNREKIEKILTFRIPYYVGPLARGNSRFAWMTRKSEETITPWNFEEVVDKGASAQSFIERMTNFDKNLPNEKVLPKHSLLYEYFTVYNELTKVKYVTEGMRKPAFLSGEQKKAIVDLLFKTNRKVTVKQLKEDYFKKIECFDSVEISGVEDRFNASLGTYHDLLKIIKDKDFLDNEENEDILEDIVLTLTLFEDREMIEERLKTYAHLFDDKVMKQLKRRRYTGWGRLSRKLINGIRDKQSGKTILDFLKSDGFANRNFMQLIHDDSLTFKEDIQKAQVSGQGDSLHEHIANLAGSPAIKKGILQTVKVVDELVKVMGRHKPENIVIEMARENQTTQKGQKNSRERMKRIEEGIKELGSQILKEHPVENTQLQNEKLYLYYLQNGRDMYVDQELDINRLSDYDVDHIVPQSFLKDDSIDNKVLTRSDKARGKSDNVPSEEVVKKMKNYWRQLLNAKLITQRKFDNLTKAERGGLSELDKAGFIKRQLVETRQITKHVAQILDSRMNTKYDENDKLIREVKVITLKSKLVSDFRKDFQFYKVREINNYHHAHDAYLNAVVGTALIKKYPKLESEFVYGDYKVYDVRKMIAKSEQEIGKATAKYFFYSNIMNFFKTEITLANGEIRKRPLIETNGETGEIVWDKGRDFATVRKVLSMPQVNIVKKTEVQTGGFSKESILPKRNSDKLIARKKDWDPKKYGGFDSPTVAYSVLVVAKVEKGKSKKLKSVKELLGITIMERSSFEKNPIDFLEAKGYKEVKKDLIIKLPKYSLFELENGRKRMLASAGELQKGNELALPSKYVNFLYLASHYEKLKGSPEDNEQKQLFVEQHKHYLDEIIEQISEFSKRVILADANLDKVLSAYNKHRDKPIREQAENIIHLFTLTNLGAPAAFKYFDTTIDRKRYTSTKEVLDATLIHQSITGLYETRIDLSQLGGDGGGSSGSSGSSGGTLNLEDEYRLYETSAEPEVSPGSTWLSDFPQAWAETGGMGLAVRQAPLIIPLKATSTPVSIKQYPMSQEAKLGIKPHIQRLLDQGILVPCQSPWNTPLLPVKKPGTNDYRPVQDLREVNKRVEDIHPTVPNPYNLLSGLPPSHRWYTVLDLKDAFFCLRLHPTSQPLFAFEWRDPGMGISGQLTWTRLPQGFKNSPTLFNEALHRDLADFRIQHPDLILLQYVDDILLAATSELDCQQGTRALLLTLGNLGYRASAKKAQLCQKQVKYLGYLLKEGQRWLTEARKETVMGQPTPKTPRQLREFLGKAGFCRLFIPGFAEMAAPLYPLTKPGTLFNWGPDQQKAYQEIKQALLTAPALGLPDLTKPFELFVDEKQGYAKGVLTQKLGPWRRPVAYLSKKLDPVAAGWPPCLRMVAAIAVLRKDAGKLTMGQPLVILAPHAVEALVKQPPDRWLSNARMTHYQAMLLDTDRVQFGPVVALNPATLLPLPEEGAPHDCLEILAETHGTRPDLTDQPIPDADHTWYTDGSSFLQEGQRKAGAAVTTETEVIWARALPAGTSAQRAELIALTQALKMAEGKRLNVYTDSRYAFATAHIHGEIYRRRGWLTSEGREIKNKSEILALLKALFLPKRLSIIHCLGHQKGDSAEARGNRLADQAAREAAIKTPPDTSTLLAGKRTADGSEFEKRTADGSEFESPKKKAKVE

SEQ ID NO: 1926 - protein, 2094 aa, synthetic construct
MPAAKRVKLDGGDKKYSIGLDIGTNSVGWAVITDEYKVPSKKFKVLGNTDRHSIKKNLIGALLFDSGETAEATRLKRTARRRYTRRKNRICYLQEIFSNEMAKVDDSFFHRLEESFLVEEDKKHERHPIFGNIVDEVAYHEKYPTIYHLRKKLVDSTDKADLRLIYLALAHMIKFRGHFLIEGDLNPDNSDVDKLFIQLVQTYNQLFEENPINASGVDAKAILSARLSKSRRLENLIAQLPGEKKNGLFGNLIALSLGLTPNFKSNFDLAEDAKLQLSKDTYDDDLDNLLAQIGDQYADLFLAAKNLSDAILLSDILRVNTEITKAPLSASMIKRYDEHHQDLTLLKALVRQQLPEKYKEIFFDQSKNGYAGYIDGGASQEEFYKFIKPILEKMDGTEELLVKLNREDLLRKQRTFDNGSIPHQIHLGELHAILRRQEDFYPFLKDNREKIEKILTFRIPYYVGPLARGNSRFAWMTRKSEETITPWNFEEVVDKGASAQSFIERMTNFDKNLPNEKVLPKHSLLYEYFTVYNELTKVKYVTEGMRKPAFLSGEQKKAIVDLLFKTNRKVTVKQLKEDYFKKIECFDSVEISGVEDRFNASLGTYHDLLKIIKDKDFLDNEENEDILEDIVLTLTLFEDREMIEERLKTYAHLFDDKVMKQLKRRRYTGWGRLSRKLINGIRDKQSGKTILDFLKSDGFANRNFMQLIHDDSLTFKEDIQKAQVSGQGDSLHEHIANLAGSPAIKKGILQTVKVVDELVKVMGRHKPENIVIEMARENQTTQKGQKNSRERMKRIEEGIKELGSQILKEHPVENTQLQNEKLYLYYLQNGRDMYVDQELDINRLSDYDVDHIVPQSFLKDDSIDNKVLTRSDKARGKSDNVPSEEVVKKMKNYWRQLLNAKLITQRKFDNLTKAERGGLSELDKAGFIKRQLVETRQITKHVAQILDSRMNTKYDENDKLIREVKVITLKSKLVSDFRKDFQFYKVREINNYHHAHDAYLNAVVGTALIKKYPKLESEFVYGDYKVYDVRKMIAKSEQEIGKATAKYFFYSNIMNFFKTEITLANGEIRKRPLIETNGETGEIVWDKGRDFATVRKVLSMPQVNIVKKTEVQTGGFSKESILPKRNSDKLIARKKDWDPKKYGGFDSPTVAYSVLVVAKVEKGKSKKLKSVKELLGITIMERSSFEKNPIDFLEAKGYKEVKKDLIIKLPKYSLFELENGRKRMLASAGELQKGNELALPSKYVNFLYLASHYEKLKGSPEDNEQKQLFVEQHKHYLDEIIEQISEFSKRVILADANLDKVLSAYNKHRDKPIREQAENIIHLFTLTNLGAPAAFKYFDTTIDRKRYTSTKEVLDATLIHQSITGLYETRIDLSQLGGDGGGSSGGSPAPGGTLNLEDEYRLYETSAEPEVSPGSTWLSDFPQAWAETGGMGLAVRQAPLIIPLKATSTPVSIKQYPMSQEAKLGIKPHIQRLLDQGILVPCQSPWNTPLLPVKKPGTNDYRPVQDLREVNKRVEDIHPTVPNPYNLLSGLPPSHRWYTVLDLKDAFFCLRLHPTSQPLFAFEWRDPGMGISGQLTWTRLPQGFKNSPTLFNEALHRDLADFRIQHPDLILLQYVDDILLAATSELDCQQGTRALLLTLGNLGYRASAKKAQLCQKQVKYLGYLLKEGQRWLTEARKETVMGQPTPKTPRQLREFLGKAGFCRLFIPGFAEMAAPLYPLTKPGTLFNWGPDQQKAYQEIKQALLTAPALGLPDLTKPFELFVDEKQGYAKGVLTQKLGPWRRPVAYLSKKLDPVAAGWPPCLRMVAAIAVLRKDAGKLTMGQPLVILAPHAVEALVKQPPDRWLSNARMTHYQAMLLDTDRVQFGPVVALNPATLLPLPEEGAPHDCLEILAETHGTRPDLTDQPIPDADHTWYTDGSSFLQEGQRKAGAAVTTETEVIWARALPAGTSAQRAELIALTQALKMAEGKRLNVYTDSRYAFATAHIHGEIYRRRGWLTSEGREIKNKSEILALLKALFLPKRLSIIHCLGHQKGDSAEARGNRLADQAAREAAIKTPPDTSTLLAGKRTADGSEFEKRTADGSEFESPKKKAKVE

SEQ ID NO: 1927 - protein, 2091 aa, synthetic construct
MPAAKRVKLDGGDKKYSIGLDIGTNSVGWAVITDEYKVPSKKFKVLGNTDRHSIKKNLIGALLFDSGETAEATRLKRTARRRYTRRKNRICYLQEIFSNEMAKVDDSFFHRLEESFLVEEDKKHERHPIFGNIVDEVAYHEKYPTIYHLRKKLVDSTDKADLRLIYLALAHMIKFRGHFLIEGDLNPDNSDVDKLFIQLVQTYNQLFEENPINASGVDAKAILSARLSKSRRLENLIAQLPGEKKNGLFGNLIALSLGLTPNFKSNFDLAEDAKLQLSKDTYDDDLDNLLAQIGDQYADLFLAAKNLSDAILLSDILRVNTEITKAPLSASMIKRYDEHHQDLTLLKALVRQQLPEKYKEIFFDQSKNGYAGYIDGGASQEEFYKFIKPILEKMDGTEELLVKLNREDLLRKQRTFDNGSIPHQIHLGELHAILRRQEDFYPFLKDNREKIEKILTFRIPYYVGPLARGNSRFAWMTRKSEETITPWNFEEVVDKGASAQSFIERMTNFDKNLPNEKVLPKHSLLYEYFTVYNELTKVKYVTEGMRKPAFLSGEQKKAIVDLLFKTNRKVTVKQLKEDYFKKIECFDSVEISGVEDRFNASLGTYHDLLKIIKDKDFLDNEENEDILEDIVLTLTLFEDREMIEERLKTYAHLFDDKVMKQLKRRRYTGWGRLSRKLINGIRDKQSGKTILDFLKSDGFANRNFMQLIHDDSLTFKEDIQKAQVSGQGDSLHEHIANLAGSPAIKKGILQTVKVVDELVKVMGRHKPENIVIEMARENQTTQKGQKNSRERMKRIEEGIKELGSQILKEHPVENTQLQNEKLYLYYLQNGRDMYVDQELDINRLSDYDVDHIVPQSFLKDDSIDNKVLTRSDKARGKSDNVPSEEVVKKMKNYWRQLLNAKLITQRKFDNLTKAERGGLSELDKAGFIKRQLVETRQITKHVAQILDSRMNTKYDENDKLIREVKVITLKSKLVSDFRKDFQFYKVREINNYHHAHDAYLNAVVGTALIKKYPKLESEFVYGDYKVYDVRKMIAKSEQEIGKATAKYFFYSNIMNFFKTEITLANGEIRKRPLIETNGETGEIVWDKGRDFATVRKVLSMPQVNIVKKTEVQTGGFSKESILPKRNSDKLIARKKDWDPKKYGGFDSPTVAYSVLVVAKVEKGKSKKLKSVKELLGITIMERSSFEKNPIDFLEAKGYKEVKKDLIIKLPKYSLFELENGRKRMLASAGELQKGNELALPSKYVNFLYLASHYEKLKGSPEDNEQKQLFVEQHKHYLDEIIEQISEFSKRVILADANLDKVLSAYNKHRDKPIREQAENIIHLFTLTNLGAPAAFKYFDTTIDRKRYTSTKEVLDATLIHQSITGLYETRIDLSQLGGDGGGSSGSSGGTLNLEDEYRLYETSAEPEVSPGSTWLSDFPQAWAETGGMGLAVRQAPLIIPLKATSTPVSIKQYPMSQEAKLGIKPHIQRLLDQGILVPCQSPWNTPLLPVKKPGTNDYRPVQDLREVNKRVEDIHPTVPNPYNLLSGLPPSHRWYTVLDLKDAFFCLRLHPTSQPLFAFEWRDPGMGISGQLTWTRLPQGFKNSPTLFNEALHRDLADFRIQHPDLILLQYVDDILLAATSELDCQQGTRALLLTLGNLGYRASAKKAQLCQKQVKYLGYLLKEGQRWLTEARKETVMGQPTPKTPRQLREFLGKAGFCRLFIPGFAEMAAPLYPLTKPGTLFNWGPDQQKAYQEIKQALLTAPALGLPDLTKPFELFVDEKQGYAKGVLTQKLGPWRRPVAYLSKKLDPVAAGWPPCLRMVAAIAVLRKDAGKLTMGQPLVILAPHAVEALVKQPPDRWLSNARMTHYQAMLLDTDRVQFGPVVALNPATLLPLPEEGAPHDCLEILAETHGTRPDLTDQPIPDADHTWYTDGSSFLQEGQRKAGAAVTTETEVIWARALPAGTSAQRAELIALTQALKMAEGKRLNVYTDSRYAFATAHIHGEIYRRRGWLTSEGREIKNKSEILALLKALFLPKRLSIIHCLGHQKGDSAEARGNRLADQAAREAAIKTPPDTSTLLAGKRTADGSEFEKRTADGSEFESPKKKAKVE

SEQ ID NO: 1928 - protein, 2091 aa, synthetic construct
MPAAKRVKLDGGDKKYSIGLDIGTNSVGWAVITDEYKVPSKKFKVLGNTDRHSIKKNLIGALLFDSGETAEATRLKRTARRRYTRRKNRICYLQEIFSNEMAKVDDSFFHRLEESFLVEEDKKHERHPIFGNIVDEVAYHEKYPTIYHLRKKLVDSTDKADLRLIYLALAHMIKFRGHFLIEGDLNPDNSDVDKLFIQLVQTYNQLFEENPINASGVDAKAILSARLSKSRRLENLIAQLPGEKKNGLFGNLIALSLGLTPNFKSNFDLAEDAKLQLSKDTYDDDLDNLLAQIGDQYADLFLAAKNLSDAILLSDILRVNTEITKAPLSASMIKRYDEHHQDLTLLKALVRQQLPEKYKEIFFDQSKNGYAGYIDGGASQEEFYKFIKPILEKMDGTEELLVKLNREDLLRKQRTFDNGSIPHQIHLGELHAILRRQEDFYPFLKDNREKIEKILTFRIPYYVGPLARGNSRFAWMTRKSEETITPWNFEEVVDKGASAQSFIERMTNFDKNLPNEKVLPKHSLLYEYFTVYNELTKVKYVTEGMRKPAFLSGEQKKAIVDLLFKTNRKVTVKQLKEDYFKKIECFDSVEISGVEDRFNASLGTYHDLLKIIKDKDFLDNEENEDILEDIVLTLTLFEDREMIEERLKTYAHLFDDKVMKQLKRRRYTGWGRLSRKLINGIRDKQSGKTILDFLKSDGFANRNFMQLIHDDSLTFKEDIQKAQVSGQGDSLHEHIANLAGSPAIKKGILQTVKVVDELVKVMGRHKPENIVIEMARENQTTQKGQKNSRERMKRIEEGIKELGSQILKEHPVENTQLQNEKLYLYYLQNGRDMYVDQELDINRLSDYDVDHIVPQSFLKDDSIDNKVLTRSDKARGKSDNVPSEEVVKKMKNYWRQLLNAKLITQRKFDNLTKAERGGLSELDKAGFIKRQLVETRQITKHVAQILDSRMNTKYDENDKLIREVKVITLKSKLVSDFRKDFQFYKVREINNYHHAHDAYLNAVVGTALIKKYPKLESEFVYGDYKVYDVRKMIAKSEQEIGKATAKYFFYSNIMNFFKTEITLANGEIRKRPLIETNGETGEIVWDKGRDFATVRKVLSMPQVNIVKKTEVQTGGFSKESILPKRNSDKLIARKKDWDPKKYGGFDSPTVAYSVLVVAKVEKGKSKKLKSVKELLGITIMERSSFEKNPIDFLEAKGYKEVKKDLIIKLPKYSLFELENGRKRMLASAGELQKGNELALPSKYVNFLYLASHYEKLKGSPEDNEQKQLFVEQHKHYLDEIIEQISEFSKRVILADANLDKVLSAYNKHRDKPIREQAENIIHLFTLTNLGAPAAFKYFDTTIDRKRYTSTKEVLDATLIHQSITGLYETRIDLSQLGGDGGGGGGGSGGTLNLEDEYRLYETSAEPEVSPGSTWLSDFPQAWAETGGMGLAVRQAPLIIPLKATSTPVSIKQYPMSQEAKLGIKPHIQRLLDQGILVPCQSPWNTPLLPVKKPGTNDYRPVQDLREVNKRVEDIHPTVPNPYNLLSGLPPSHRWYTVLDLKDAFFCLRLHPTSQPLFAFEWRDPGMGISGQLTWTRLPQGFKNSPTLFNEALHRDLADFRIQHPDLILLQYVDDILLAATSELDCQQGTRALLLTLGNLGYRASAKKAQLCQKQVKYLGYLLKEGQRWLTEARKETVMGQPTPKTPRQLREFLGKAGFCRLFIPGFAEMAAPLYPLTKPGTLFNWGPDQQKAYQEIKQALLTAPALGLPDLTKPFELFVDEKQGYAKGVLTQKLGPWRRPVAYLSKKLDPVAAGWPPCLRMVAAIAVLRKDAGKLTMGQPLVILAPHAVEALVKQPPDRWLSNARMTHYQAMLLDTDRVQFGPVVALNPATLLPLPEEGAPHDCLEILAETHGTRPDLTDQPIPDADHTWYTDGSSFLQEGQRKAGAAVTTETEVIWARALPAGTSAQRAELIALTQALKMAEGKRLNVYTDSRYAFATAHIHGEIYRRRGWLTSEGREIKNKSEILALLKALFLPKRLSIIHCLGHQKGDSAEARGNRLADQAAREAAIKTPPDTSTLLAGKRTADGSEFEKRTADGSEFESPKKKAKVE

SEQ ID NO: 1929 - protein, 2096 aa, synthetic construct
MPAAKRVKLDGGDKKYSIGLDIGTNSVGWAVITDEYKVPSKKFKVLGNTDRHSIKKNLIGALLFDSGETAEATRLKRTARRRYTRRKNRICYLQEIFSNEMAKVDDSFFHRLEESFLVEEDKKHERHPIFGNIVDEVAYHEKYPTIYHLRKKLVDSTDKADLRLIYLALAHMIKFRGHFLIEGDLNPDNSDVDKLFIQLVQTYNQLFEENPINASGVDAKAILSARLSKSRRLENLIAQLPGEKKNGLFGNLIALSLGLTPNFKSNFDLAEDAKLQLSKDTYDDDLDNLLAQIGDQYADLFLAAKNLSDAILLSDILRVNTEITKAPLSASMIKRYDEHHQDLTLLKALVRQQLPEKYKEIFFDQSKNGYAGYIDGGASQEEFYKFIKPILEKMDGTEELLVKLNREDLLRKQRTFDNGSIPHQIHLGELHAILRRQEDFYPFLKDNREKIEKILTFRIPYYVGPLARGNSRFAWMTRKSEETITPWNFEEVVDKGASAQSFIERMTNFDKNLPNEKVLPKHSLLYEYFTVYNELTKVKYVTEGMRKPAFLSGEQKKAIVDLLFKTNRKVTVKQLKEDYFKKIECFDSVEISGVEDRFNASLGTYHDLLKIIKDKDFLDNEENEDILEDIVLTLTLFEDREMIEERLKTYAHLFDDKVMKQLKRRRYTGWGRLSRKLINGIRDKQSGKTILDFLKSDGFANRNFMQLIHDDSLTFKEDIQKAQVSGQGDSLHEHIANLAGSPAIKKGILQTVKVVDELVKVMGRHKPENIVIEMARENQTTQKGQKNSRERMKRIEEGIKELGSQILKEHPVENTQLQNEKLYLYYLQNGRDMYVDQELDINRLSDYDVDHIVPQSFLKDDSIDNKVLTRSDKARGKSDNVPSEEVVKKMKNYWRQLLNAKLITQRKFDNLTKAERGGLSELDKAGFIKRQLVETRQITKHVAQILDSRMNTKYDENDKLIREVKVITLKSKLVSDFRKDFQFYKVREINNYHHAHDAYLNAVVGTALIKKYPKLESEFVYGDYKVYDVRKMIAKSEQEIGKATAKYFFYSNIMNFFKTEITLANGEIRKRPLIETNGETGEIVWDKGRDFATVRKVLSMPQVNIVKKTEVQTGGFSKESILPKRNSDKLIARKKDWDPKKYGGFDSPTVAYSVLVVAKVEKGKSKKLKSVKELLGITIMERSSFEKNPIDFLEAKGYKEVKKDLIIKLPKYSLFELENGRKRMLASAGELQKGNELALPSKYVNFLYLASHYEKLKGSPEDNEQKQLFVEQHKHYLDEIIEQISEFSKRVILADANLDKVLSAYNKHRDKPIREQAENIIHLFTLTNLGAPAAFKYFDTTIDRKRYTSTKEVLDATLIHQSITGLYETRIDLSQLGGDGGGGGPAPEAAAKGGTLNLEDEYRLYETSAEPEVSPGSTWLSDFPQAWAETGGMGLAVRQAPLIIPLKATSTPVSIKQYPMSQEAKLGIKPHIQRLLDQGILVPCQSPWNTPLLPVKKPGTNDYRPVQDLREVNKRVEDIHPTVPNPYNLLSGLPPSHRWYTVLDLKDAFFCLRLHPTSQPLFAFEWRDPGMGISGQLTWTRLPQGFKNSPTLFNEALHRDLADFRIQHPDLILLQYVDDILLAATSELDCQQGTRALLLTLGNLGYRASAKKAQLCQKQVKYLGYLLKEGQRWLTEARKETVMGQPTPKTPRQLREFLGKAGFCRLFIPGFAEMAAPLYPLTKPGTLFNWGPDQQKAYQEIKQALLTAPALGLPDLTKPFELFVDEKQGYAKGVLTQKLGPWRRPVAYLSKKLDPVAAGWPPCLRMVAAIAVLRKDAGKLTMGQPLVILAPHAVEALVKQPPDRWLSNARMTHYQAMLLDTDRVQFGPVVALNPATLLPLPEEGAPHDCLEILAETHGTRPDLTDQPIPDADHTWYTDGSSFLQEGQRKAGAAVTTETEVIWARALPAGTSAQRAELIALTQALKMAEGKRLNVYTDSRYAFATAHIHGEIYRRRGWLTSEGREIKNKSEILALLKALFLPKRLSIIHCLGHQKGDSAEARGNRLADQAAREAAIKTPPDTSTLLAGKRTADGSEFEKRTADGSEFESPKKKAKVE

SEQ ID NO: 1930 - protein, 2091 aa, synthetic construct
MPAAKRVKLDGGDKKYSIGLDIGTNSVGWAVITDEYKVPSKKFKVLGNTDRHSIKKNLIGALLFDSGETAEATRLKRTARRRYTRRKNRICYLQEIFSNEMAKVDDSFFHRLEESFLVEEDKKHERHPIFGNIVDEVAYHEKYPTIYHLRKKLVDSTDKADLRLIYLALAHMIKFRGHFLIEGDLNPDNSDVDKLFIQLVQTYNQLFEENPINASGVDAKAILSARLSKSRRLENLIAQLPGEKKNGLFGNLIALSLGLTPNFKSNFDLAEDAKLQLSKDTYDDDLDNLLAQIGDQYADLFLAAKNLSDAILLSDILRVNTEITKAPLSASMIKRYDEHHQDLTLLKALVRQQLPEKYKEIFFDQSKNGYAGYIDGGASQEEFYKFIKPILEKMDGTEELLVKLNREDLLRKQRTFDNGSIPHQIHLGELHAILRRQEDFYPFLKDNREKIEKILTFRIPYYVGPLARGNSRFAWMTRKSEETITPWNFEEVVDKGASAQSFIERMTNFDKNLPNEKVLPKHSLLYEYFTVYNELTKVKYVTEGMRKPAFLSGEQKKAIVDLLFKTNRKVTVKQLKEDYFKKIECFDSVEISGVEDRFNASLGTYHDLLKIIKDKDFLDNEENEDILEDIVLTLTLFEDREMIEERLKTYAHLFDDKVMKQLKRRRYTGWGRLSRKLINGIRDKQSGKTILDFLKSDGFANRNFMQLIHDDSLTFKEDIQKAQVSGQGDSLHEHIANLAGSPAIKKGILQTVKVVDELVKVMGRHKPENIVIEMARENQTTQKGQKNSRERMKRIEEGIKELGSQILKEHPVENTQLQNEKLYLYYLQNGRDMYVDQELDINRLSDYDVDHIVPQSFLKDDSIDNKVLTRSDKARGKSDNVPSEEVVKKMKNYWRQLLNAKLITQRKFDNLTKAERGGLSELDKAGFIKRQLVETRQITKHVAQILDSRMNTKYDENDKLIREVKVITLKSKLVSDFRKDFQFYKVREINNYHHAHDAYLNAVVGTALIKKYPKLESEFVYGDYKVYDVRKMIAKSEQEIGKATAKYFFYSNIMNFFKTEITLANGEIRKRPLIETNGETGEIVWDKGRDFATVRKVLSMPQVNIVKKTEVQTGGFSKESILPKRNSDKLIARKKDWDPKKYGGFDSPTVAYSVLVVAKVEKGKSKKLKSVKELLGITIMERSSFEKNPIDFLEAKGYKEVKKDLIIKLPKYSLFELENGRKRMLASAGELQKGNELALPSKYVNFLYLASHYEKLKGSPEDNEQKQLFVEQHKHYLDEIIEQISEFSKRVILADANLDKVLSAYNKHRDKPIREQAENIIHLFTLTNLGAPAAFKYFDTTIDRKRYTSTKEVLDATLIHQSITGLYETRIDLSQLGGDGGGGGGSSGGTLNLEDEYRLYETSAEPEVSPGSTWLSDFPQAWAETGGMGLAVRQAPLIIPLKATSTPVSIKQYPMSQEAKLGIKPHIQRLLDQGILVPCQSPWNTPLLPVKKPGTNDYRPVQDLREVNKRVEDIHPTVPNPYNLLSGLPPSHRWYTVLDLKDAFFCLRLHPTSQPLFAFEWRDPGMGISGQLTWTRLPQGFKNSPTLFNEALHRDLADFRIQHPDLILLQYVDDILLAATSELDCQQGTRALLLTLGNLGYRASAKKAQLCQKQVKYLGYLLKEGQRWLTEARKETVMGQPTPKTPRQLREFLGKAGFCRLFIPGFAEMAAPLYPLTKPGTLFNWGPDQQKAYQEIKQALLTAPALGLPDLTKPFELFVDEKQGYAKGVLTQKLGPWRRPVAYLSKKLDPVAAGWPPCLRMVAAIAVLRKDAGKLTMGQPLVILAPHAVEALVKQPPDRWLSNARMTHYQAMLLDTDRVQFGPVVALNPATLLPLPEEGAPHDCLEILAETHGTRPDLTDQPIPDADHTWYTDGSSFLQEGQRKAGAAVTTETEVIWARALPAGTSAQRAELIALTQALKMAEGKRLNVYTDSRYAFATAHIHGEIYRRRGWLTSEGREIKNKSEILALLKALFLPKRLSIIHCLGHQKGDSAEARGNRLADQAAREAAIKTPPDTSTLLAGKRTADGSEFEKRTADGSEFESPKKKAKVE

SEQ ID NO: 1931 - protein, 2091 aa, synthetic construct
MPAAKRVKLDGGDKKYSIGLDIGTNSVGWAVITDEYKVPSKKFKVLGNTDRHSIKKNLIGALLFDSGETAEATRLKRTARRRYTRRKNRICYLQEIFSNEMAKVDDSFFHRLEESFLVEEDKKHERHPIFGNIVDEVAYHEKYPTIYHLRKKLVDSTDKADLRLIYLALAHMIKFRGHFLIEGDLNPDNSDVDKLFIQLVQTYNQLFEENPINASGVDAKAILSARLSKSRRLENLIAQLPGEKKNGLFGNLIALSLGLTPNFKSNFDLAEDAKLQLSKDTYDDDLDNLLAQIGDQYADLFLAAKNLSDAILLSDILRVNTEITKAPLSASMIKRYDEHHQDLTLLKALVRQQLPEKYKEIFFDQSKNGYAGYIDGGASQEEFYKFIKPILEKMDGTEELLVKLNREDLLRKQRTFDNGSIPHQIHLGELHAILRRQEDFYPFLKDNREKIEKILTFRIPYYVGPLARGNSRFAWMTRKSEETITPWNFEEVVDKGASAQSFIERMTNFDKNLPNEKVLPKHSLLYEYFTVYNELTKVKYVTEGMRKPAFLSGEQKKAIVDLLFKTNRKVTVKQLKEDYFKKIECFDSVEISGVEDRFNASLGTYHDLLKIIKDKDFLDNEENEDILEDIVLTLTLFEDREMIEERLKTYAHLFDDKVMKQLKRRRYTGWGRLSRKLINGIRDKQSGKTILDFLKSDGFANRNFMQLIHDDSLTFKEDIQKAQVSGQGDSLHEHIANLAGSPAIKKGILQTVKVVDELVKVMGRHKPENIVIEMARENQTTQKGQKNSRERMKRIEEGIKELGSQILKEHPVENTQLQNEKLYLYYLQNGRDMYVDQELDINRLSDYDVDHIVPQSFLKDDSIDNKVLTRSDKARGKSDNVPSEEVVKKMKNYWRQLLNAKLITQRKFDNLTKAERGGLSELDKAGFIKRQLVETRQITKHVAQILDSRMNTKYDENDKLIREVKVITLKSKLVSDFRKDFQFYKVREINNYHHAHDAYLNAVVGTALIKKYPKLESEFVYGDYKVYDVRKMIAKSEQEIGKATAKYFFYSNIMNFFKTEITLANGEIRKRPLIETNGETGEIVWDKGRDFATVRKVLSMPQVNIVKKTEVQTGGFSKESILPKRNSDKLIARKKDWDPKKYGGFDSPTVAYSVLVVAKVEKGKSKKLKSVKELLGITIMERSSFEKNPIDFLEAKGYKEVKKDLIIKLPKYSLFELENGRKRMLASAGELQKGNELALPSKYVNFLYLASHYEKLKGSPEDNEQKQLFVEQHKHYLDEIIEQISEFSKRVILADANLDKVLSAYNKHRDKPIREQAENIIHLFTLTNLGAPAAFKYFDTTIDRKRYTSTKEVLDATLIHQSITGLYETRIDLSQLGGDGGGSSGGSGGTLNLEDEYRLYETSAEPEVSPGSTWLSDFPQAWAETGGMGLAVRQAPLIIPLKATSTPVSIKQYPMSQEAKLGIKPHIQRLLDQGILVPCQSPWNTPLLPVKKPGTNDYRPVQDLREVNKRVEDIHPTVPNPYNLLSGLPPSHRWYTVLDLKDAFFCLRLHPTSQPLFAFEWRDPGMGISGQLTWTRLPQGFKNSPTLFNEALHRDLADFRIQHPDLILLQYVDDILLAATSELDCQQGTRALLLTLGNLGYRASAKKAQLCQKQVKYLGYLLKEGQRWLTEARKETVMGQPTPKTPRQLREFLGKAGFCRLFIPGFAEMAAPLYPLTKPGTLFNWGPDQQKAYQEIKQALLTAPALGLPDLTKPFELFVDEKQGYAKGVLTQKLGPWRRPVAYLSKKLDPVAAGWPPCLRMVAAIAVLRKDAGKLTMGQPLVILAPHAVEALVKQPPDRWLSNARMTHYQAMLLDTDRVQFGPVVALNPATLLPLPEEGAPHDCLEILAETHGTRPDLTDQPIPDADHTWYTDGSSFLQEGQRKAGAAVTTETEVIWARALPAGTSAQRAELIALTQALKMAEGKRLNVYTDSRYAFATAHIHGEIYRRRGWLTSEGREIKNKSEILALLKALFLPKRLSIIHCLGHQKGDSAEARGNRLADQAAREAAIKTPPDTSTLLAGKRTADGSEFEKRTADGSEFESPKKKAKVE

SEQ ID NO: 1932 - protein, 2094 aa, synthetic construct
MPAAKRVKLDGGDKKYSIGLDIGTNSVGWAVITDEYKVPSKKFKVLGNTDRHSIKKNLIGALLFDSGETAEATRLKRTARRRYTRRKNRICYLQEIFSNEMAKVDDSFFHRLEESFLVEEDKKHERHPIFGNIVDEVAYHEKYPTIYHLRKKLVDSTDKADLRLIYLALAHMIKFRGHFLIEGDLNPDNSDVDKLFIQLVQTYNQLFEENPINASGVDAKAILSARLSKSRRLENLIAQLPGEKKNGLFGNLIALSLGLTPNFKSNFDLAEDAKLQLSKDTYDDDLDNLLAQIGDQYADLFLAAKNLSDAILLSDILRVNTEITKAPLSASMIKRYDEHHQDLTLLKALVRQQLPEKYKEIFFDQSKNGYAGYIDGGASQEEFYKFIKPILEKMDGTEELLVKLNREDLLRKQRTFDNGSIPHQIHLGELHAILRRQEDFYPFLKDNREKIEKILTFRIPYYVGPLARGNSRFAWMTRKSEETITPWNFEEVVDKGASAQSFIERMTNFDKNLPNEKVLPKHSLLYEYFTVYNELTKVKYVTEGMRKPAFLSGEQKKAIVDLLFKTNRKVTVKQLKEDYFKKIECFDSVEISGVEDRFNASLGTYHDLLKIIKDKDFLDNEENEDILEDIVLTLTLFEDREMIEERLKTYAHLFDDKVMKQLKRRRYTGWGRLSRKLINGIRDKQSGKTILDFLKSDGFANRNFMQLIHDDSLTFKEDIQKAQVSGQGDSLHEHIANLAGSPAIKKGILQTVKVVDELVKVMGRHKPENIVIEMARENQTTQKGQKNSRERMKRIEEGIKELGSQILKEHPVENTQLQNEKLYLYYLQNGRDMYVDQELDINRLSDYDVDHIVPQSFLKDDSIDNKVLTRSDKARGKSDNVPSEEVVKKMKNYWRQLLNAKLITQRKFDNLTKAERGGLSELDKAGFIKRQLVETRQITKHVAQILDSRMNTKYDENDKLIREVKVITLKSKLVSDFRKDFQFYKVREINNYHHAHDAYLNAVVGTALIKKYPKLESEFVYGDYKVYDVRKMIAKSEQEIGKATAKYFFYSNIMNFFKTEITLANGEIRKRPLIETNGETGEIVWDKGRDFATVRKVLSMPQVNIVKKTEVQTGGFSKESILPKRNSDKLIARKKDWDPKKYGGFDSPTVAYSVLVVAKVEKGKSKKLKSVKELLGITIMERSSFEKNPIDFLEAKGYKEVKKDLIIKLPKYSLFELENGRKRMLASAGELQKGNELALPSKYVNFLYLASHYEKLKGSPEDNEQKQLFVEQHKHYLDEIIEQISEFSKRVILADANLDKVLSAYNKHRDKPIREQAENIIHLFTLTNLGAPAAFKYFDTTIDRKRYTSTKEVLDATLIHQSITGLYETRIDLSQLGGDGGGSSGGSGGGGGTLNLEDEYRLYETSAEPEVSPGSTWLSDFPQAWAETGGMGLAVRQAPLIIPLKATSTPVSIKQYPMSQEAKLGIKPHIQRLLDQGILVPCQSPWNTPLLPVKKPGTNDYRPVQDLREVNKRVEDIHPTVPNPYNLLSGLPPSHRWYTVLDLKDAFFCLRLHPTSQPLFAFEWRDPGMGISGQLTWTRLPQGFKNSPTLFNEALHRDLADFRIQHPDLILLQYVDDILLAATSELDCQQGTRALLLTLGNLGYRASAKKAQLCQKQVKYLGYLLKEGQRWLTEARKETVMGQPTPKTPRQLREFLGKAGFCRLFIPGFAEMAAPLYPLTKPGTLFNWGPDQQKAYQEIKQALLTAPALGLPDLTKPFELFVDEKQGYAKGVLTQKLGPWRRPVAYLSKKLDPVAAGWPPCLRMVAAIAVLRKDAGKLTMGQPLVILAPHAVEALVKQPPDRWLSNARMTHYQAMLLDTDRVQFGPVVALNPATLLPLPEEGAPHDCLEILAETHGTRPDLTDQPIPDADHTWYTDGSSFLQEGQRKAGAAVTTETEVIWARALPAGTSAQRAELIALTQALKMAEGKRLNVYTDSRYAFATAHIHGEIYRRRGWLTSEGREIKNKSEILALLKALFLPKRLSIIHCLGHQKGDSAEARGNRLADQAAREAAIKTPPDTSTLLAGKRTADGSEFEKRTADGSEFESPKKKAKVE

SEQ ID NO: 1933 - protein, 2092 aa, synthetic construct
MPAAKRVKLDGGDKKYSIGLDIGTNSVGWAVITDEYKVPSKKFKVLGNTDRHSIKKNLIGALLFDSGETAEATRLKRTARRRYTRRKNRICYLQEIFSNEMAKVDDSFFHRLEESFLVEEDKKHERHPIFGNIVDEVAYHEKYPTIYHLRKKLVDSTDKADLRLIYLALAHMIKFRGHFLIEGDLNPDNSDVDKLFIQLVQTYNQLFEENPINASGVDAKAILSARLSKSRRLENLIAQLPGEKKNGLFGNLIALSLGLTPNFKSNFDLAEDAKLQLSKDTYDDDLDNLLAQIGDQYADLFLAAKNLSDAILLSDILRVNTEITKAPLSASMIKRYDEHHQDLTLLKALVRQQLPEKYKEIFFDQSKNGYAGYIDGGASQEEFYKFIKPILEKMDGTEELLVKLNREDLLRKQRTFDNGSIPHQIHLGELHAILRRQEDFYPFLKDNREKIEKILTFRIPYYVGPLARGNSRFAWMTRKSEETITPWNFEEVVDKGASAQSFIERMTNFDKNLPNEKVLPKHSLLYEYFTVYNELTKVKYVTEGMRKPAFLSGEQKKAIVDLLFKTNRKVTVKQLKEDYFKKIECFDSVEISGVEDRFNASLGTYHDLLKIIKDKDFLDNEENEDILEDIVLTLTLFEDREMIEERLKTYAHLFDDKVMKQLKRRRYTGWGRLSRKLINGIRDKQSGKTILDFLKSDGFANRNFMQLIHDDSLTFKEDIQKAQVSGQGDSLHEHIANLAGSPAIKKGILQTVKVVDELVKVMGRHKPENIVIEMARENQTTQKGQKNSRERMKRIEEGIKELGSQILKEHPVENTQLQNEKLYLYYLQNGRDMYVDQELDINRLSDYDVDHIVPQSFLKDDSIDNKVLTRSDKARGKSDNVPSEEVVKKMKNYWRQLLNAKLITQRKFDNLTKAERGGLSELDKAGFIKRQLVETRQITKHVAQILDSRMNTKYDENDKLIREVKVITLKSKLVSDFRKDFQFYKVREINNYHHAHDAYLNAVVGTALIKKYPKLESEFVYGDYKVYDVRKMIAKSEQEIGKATAKYFFYSNIMNFFKTEITLANGEIRKRPLIETNGETGEIVWDKGRDFATVRKVLSMPQVNIVKKTEVQTGGFSKESILPKRNSDKLIARKKDWDPKKYGGFDSPTVAYSVLVVAKVEKGKSKKLKSVKELLGITIMERSSFEKNPIDFLEAKGYKEVKKDLIIKLPKYSLFELENGRKRMLASAGELQKGNELALPSKYVNFLYLASHYEKLKGSPEDNEQKQLFVEQHKHYLDEIIEQISEFSKRVILADANLDKVLSAYNKHRDKPIREQAENIIHLFTLTNLGAPAAFKYFDTTIDRKRYTSTKEVLDATLIHQSITGLYETRIDLSQLGGDGGPAPAPAPGGTLNLEDEYRLYETSAEPEVSPGSTWLSDFPQAWAETGGMGLAVRQAPLIIPLKATSTPVSIKQYPMSQEAKLGIKPHIQRLLDQGILVPCQSPWNTPLLPVKKPGTNDYRPVQDLREVNKRVEDIHPTVPNPYNLLSGLPPSHRWYTVLDLKDAFFCLRLHPTSQPLFAFEWRDPGMGISGQLTWTRLPQGFKNSPTLFNEALHRDLADFRIQHPDLILLQYVDDILLAATSELDCQQGTRALLLTLGNLGYRASAKKAQLCQKQVKYLGYLLKEGQRWLTEARKETVMGQPTPKTPRQLREFLGKAGFCRLFIPGFAEMAAPLYPLTKPGTLFNWGPDQQKAYQEIKQALLTAPALGLPDLTKPFELFVDEKQGYAKGVLTQKLGPWRRPVAYLSKKLDPVAAGWPPCLRMVAAIAVLRKDAGKLTMGQPLVILAPHAVEALVKQPPDRWLSNARMTHYQAMLLDTDRVQFGPVVALNPATLLPLPEEGAPHDCLEILAETHGTRPDLTDQPIPDADHTWYTDGSSFLQEGQRKAGAAVTTETEVIWARALPAGTSAQRAELIALTQALKMAEGKRLNVYTDSRYAFATAHIHGEIYRRRGWLTSEGREIKNKSEILALLKALFLPKRLSIIHCLGHQKGDSAEARGNRLADQAAREAAIKTPPDTSTLLAGKRTADGSEFEKRTADGSEFESPKKKAKVE

SEQ ID NO: 1934 - protein, 2102 aa, synthetic construct
MPAAKRVKLDGGDKKYSIGLDIGTNSVGWAVITDEYKVPSKKFKVLGNTDRHSIKKNLIGALLFDSGETAEATRLKRTARRRYTRRKNRICYLQEIFSNEMAKVDDSFFHRLEESFLVEEDKKHERHPIFGNIVDEVAYHEKYPTIYHLRKKLVDSTDKADLRLIYLALAHMIKFRGHFLIEGDLNPDNSDVDKLFIQLVQTYNQLFEENPINASGVDAKAILSARLSKSRRLENLIAQLPGEKKNGLFGNLIALSLGLTPNFKSNFDLAEDAKLQLSKDTYDDDLDNLLAQIGDQYADLFLAAKNLSDAILLSDILRVNTEITKAPLSASMIKRYDEHHQDLTLLKALVRQQLPEKYKEIFFDQSKNGYAGYIDGGASQEEFYKFIKPILEKMDGTEELLVKLNREDLLRKQRTFDNGSIPHQIHLGELHAILRRQEDFYPFLKDNREKIEKILTFRIPYYVGPLARGNSRFAWMTRKSEETITPWNFEEVVDKGASAQSFIERMTNFDKNLPNEKVLPKHSLLYEYFTVYNELTKVKYVTEGMRKPAFLSGEQKKAIVDLLFKTNRKVTVKQLKEDYFKKIECFDSVEISGVEDRFNASLGTYHDLLKIIKDKDFLDNEENEDILEDIVLTLTLFEDREMIEERLKTYAHLFDDKVMKQLKRRRYTGWGRLSRKLINGIRDKQSGKTILDFLKSDGFANRNFMQLIHDDSLTFKEDIQKAQVSGQGDSLHEHIANLAGSPAIKKGILQTVKVVDELVKVMGRHKPENIVIEMARENQTTQKGQKNSRERMKRIEEGIKELGSQILKEHPVENTQLQNEKLYLYYLQNGRDMYVDQELDINRLSDYDVDHIVPQSFLKDDSIDNKVLTRSDKARGKSDNVPSEEVVKKMKNYWRQLLNAKLITQRKFDNLTKAERGGLSELDKAGFIKRQLVETRQITKHVAQILDSRMNTKYDENDKLIREVKVITLKSKLVSDFRKDFQFYKVREINNYHHAHDAYLNAVVGTALIKKYPKLESEFVYGDYKVYDVRKMIAKSEQEIGKATAKYFFYSNIMNFFKTEITLANGEIRKRPLIETNGETGEIVWDKGRDFATVRKVLSMPQVNIVKKTEVQTGGFSKESILPKRNSDKLIARKKDWDPKKYGGFDSPTVAYSVLVVAKVEKGKSKKLKSVKELLGITIMERSSFEKNPIDFLEAKGYKEVKKDLIIKLPKYSLFELENGRKRMLASAGELQKGNELALPSKYVNFLYLASHYEKLKGSPEDNEQKQLFVEQHKHYLDEIIEQISEFSKRVILADANLDKVLSAYNKHRDKPIREQAENIIHLFTLTNLGAPAAFKYFDTTIDRKRYTSTKEVLDATLIHQSITGLYETRIDLSQLGGDGGPAPAPAPAPAPGGTVSLQDEHRLFDIPVTTSLPDVWLQDFPQAWAETGGLGRAKCQAPIIIDLKPTAVPVSIKQYPMSLEAHMGIRQHIIKFLELGVLRPCRSPWNTPLLPVKKPGTQDYRPVQDLREINKRTVDIHPTVPNPYNLLSTLKPDYSWYTVLDLKDAFFCLPLAPQSQELFAFEWKDPERGISGQLTWTRLPQGFKNSPTLFNEALHRDLTDFRTQHPEVTLLQYVDDLLLAAPTKKACTQGTRHLLQELGEKGYRASAKKAQICQTKVTYLGYILSEGKRWLTPGRIETVARIPPPRNPREVREFLGKAGFCRLFIPGFAELAAPLYALTKPSTPFTWQTEHQLAFEALKKALLSAPALGLPDTSKPFTLFLDERQGIAKGVLTQKLGPWKRPVAYLSKKLDPVAAGWPPCLRIMAATAMLVKDSAKLTLGQPLTVITPHTLEAIVRQPPDRWITNARLTHYQALLLDTDRVQFGPPVTLNPATLLPVPENQPSPHDCRQVLAETHGTREDLKDQELPDADHTWYTDGSSYLDSGTRRAGAAVVDGHNTIWAQSLPPGTSAQKAELIALTKALELSKGKKANIYTDSRYAFATAHTHGSIYERRGWLTSEGKEIKNKAEIIALLKALFLPQEVAIIHCPGHQKGQDPVAVGNRQADRVARQAAMAEVLTLATEPDNTSHITAGKRTADGSEFEKRTADGSEFESPKKKAKVE

SEQ ID NO: 1935 - protein, 2102 aa, synthetic construct
MPAAKRVKLDGGDKKYSIGLDIGTNSVGWAVITDEYKVPSKKFKVLGNTDRHSIKKNLIGALLFDSGETAEATRLKRTARRRYTRRKNRICYLQEIFSNEMAKVDDSFFHRLEESFLVEEDKKHERHPIFGNIVDEVAYHEKYPTIYHLRKKLVDSTDKADLRLIYLALAHMIKFRGHFLIEGDLNPDNSDVDKLFIQLVQTYNQLFEENPINASGVDAKAILSARLSKSRRLENLIAQLPGEKKNGLFGNLIALSLGLTPNFKSNFDLAEDAKLQLSKDTYDDDLDNLLAQIGDQYADLFLAAKNLSDAILLSDILRVNTEITKAPLSASMIKRYDEHHQDLTLLKALVRQQLPEKYKEIFFDQSKNGYAGYIDGGASQEEFYKFIKPILEKMDGTEELLVKLNREDLLRKQRTFDNGSIPHQIHLGELHAILRRQEDFYPFLKDNREKIEKILTFRIPYYVGPLARGNSRFAWMTRKSEETITPWNFEEVVDKGASAQSFIERMTNFDKNLPNEKVLPKHSLLYEYFTVYNELTKVKYVTEGMRKPAFLSGEQKKAIVDLLFKTNRKVTVKQLKEDYFKKIECFDSVEISGVEDRFNASLGTYHDLLKIIKDKDFLDNEENEDILEDIVLTLTLFEDREMIEERLKTYAHLFDDKVMKQLKRRRYTGWGRLSRKLINGIRDKQSGKTILDFLKSDGFANRNFMQLIHDDSLTFKEDIQKAQVSGQGDSLHEHIANLAGSPAIKKGILQTVKVVDELVKVMGRHKPENIVIEMARENQTTQKGQKNSRERMKRIEEGIKELGSQILKEHPVENTQLQNEKLYLYYLQNGRDMYVDQELDINRLSDYDVDHIVPQSFLKDDSIDNKVLTRSDKARGKSDNVPSEEVVKKMKNYWRQLLNAKLITQRKFDNLTKAERGGLSELDKAGFIKRQLVETRQITKHVAQILDSRMNTKYDENDKLIREVKVITLKSKLVSDFRKDFQFYKVREINNYHHAHDAYLNAVVGTALIKKYPKLESEFVYGDYKVYDVRKMIAKSEQEIGKATAKYFFYSNIMNFFKTEITLANGEIRKRPLIETNGETGEIVWDKGRDFATVRKVLSMPQVNIVKKTEVQTGGFSKESILPKRNSDKLIARKKDWDPKKYGGFDSPTVAYSVLVVAKVEKGKSKKLKSVKELLGITIMERSSFEKNPIDFLEAKGYKEVKKDLIIKLPKYSLFELENGRKRMLASAGELQKGNELALPSKYVNFLYLASHYEKLKGSPEDNEQKQLFVEQHKHYLDEIIEQISEFSKRVILADANLDKVLSAYNKHRDKPIREQAENIIHLFTLTNLGAPAAFKYFDTTIDRKRYTSTKEVLDATLIHQSITGLYETRIDLSQLGGDGGEAAAKGGSGGGGGTVSLQDEHRLFDIPVTTSLPDVWLQDFPQAWAETGGLGRAKCQAPIIIDLKPTAVPVSIKQYPMSLEAHMGIRQHIIKFLELGVLRPCRSPWNTPLLPVKKPGTQDYRPVQDLREINKRTVDIHPTVPNPYNLLSTLKPDYSWYTVLDLKDAFFCLPLAPQSQELFAFEWKDPERGISGQLTWTRLPQGFKNSPTLFNEALHRDLTDFRTQHPEVTLLQYVDDLLLAAPTKKACTQGTRHLLQELGEKGYRASAKKAQICQTKVTYLGYILSEGKRWLTPGRIETVARIPPPRNPREVREFLGKAGFCRLFIPGFAELAAPLYALTKPSTPFTWQTEHQLAFEALKKALLSAPALGLPDTSKPFTLFLDERQGIAKGVLTQKLGPWKRPVAYLSKKLDPVAAGWPPCLRIMAATAMLVKDSAKLTLGQPLTVITPHTLEAIVRQPPDRWITNARLTHYQALLLDTDRVQFGPPVTLNPATLLPVPENQPSPHDCRQVLAETHGTREDLKDQELPDADHTWYTDGSSYLDSGTRRAGAAVVDGHNTIWAQSLPPGTSAQKAELIALTKALELSKGKKANIYTDSRYAFATAHTHGSIYERRGWLTSEGKEIKNKAEIIALLKALFLPQEVAIIHCPGHQKGQDPVAVGNRQADRVARQAAMAEVLTLATEPDNTSHITAGKRTADGSEFEKRTADGSEFESPKKKAKVE

SEQ ID NO: 1936 - protein, 2121 aa, synthetic construct
MPAAKRVKLDGGDKKYSIGLDIGTNSVGWAVITDEYKVPSKKFKVLGNTDRHSIKKNLIGALLFDSGETAEATRLKRTARRRYTRRKNRICYLQEIFSNEMAKVDDSFFHRLEESFLVEEDKKHERHPIFGNIVDEVAYHEKYPTIYHLRKKLVDSTDKADLRLIYLALAHMIKFRGHFLIEGDLNPDNSDVDKLFIQLVQTYNQLFEENPINASGVDAKAILSARLSKSRRLENLIAQLPGEKKNGLFGNLIALSLGLTPNFKSNFDLAEDAKLQLSKDTYDDDLDNLLAQIGDQYADLFLAAKNLSDAILLSDILRVNTEITKAPLSASMIKRYDEHHQDLTLLKALVRQQLPEKYKEIFFDQSKNGYAGYIDGGASQEEFYKFIKPILEKMDGTEELLVKLNREDLLRKQRTFDNGSIPHQIHLGELHAILRRQEDFYPFLKDNREKIEKILTFRIPYYVGPLARGNSRFAWMTRKSEETITPWNFEEVVDKGASAQSFIERMTNFDKNLPNEKVLPKHSLLYEYFTVYNELTKVKYVTEGMRKPAFLSGEQKKAIVDLLFKTNRKVTVKQLKEDYFKKIECFDSVEISGVEDRFNASLGTYHDLLKIIKDKDFLDNEENEDILEDIVLTLTLFEDREMIEERLKTYAHLFDDKVMKQLKRRRYTGWGRLSRKLINGIRDKQSGKTILDFLKSDGFANRNFMQLIHDDSLTFKEDIQKAQVSGQGDSLHEHIANLAGSPAIKKGILQTVKVVDELVKVMGRHKPENIVIEMARENQTTQKGQKNSRERMKRIEEGIKELGSQILKEHPVENTQLQNEKLYLYYLQNGRDMYVDQELDINRLSDYDVDHIVPQSFLKDDSIDNKVLTRSDKARGKSDNVPSEEVVKKMKNYWRQLLNAKLITQRKFDNLTKAERGGLSELDKAGFIKRQLVETRQITKHVAQILDSRMNTKYDENDKLIREVKVITLKSKLVSDFRKDFQFYKVREINNYHHAHDAYLNAVVGTALIKKYPKLESEFVYGDYKVYDVRKMIAKSEQEIGKATAKYFFYSNIMNFFKTEITLANGEIRKRPLIETNGETGEIVWDKGRDFATVRKVLSMPQVNIVKKTEVQTGGFSKESILPKRNSDKLIARKKDWDPKKYGGFDSPTVAYSVLVVAKVEKGKSKKLKSVKELLGITIMERSSFEKNPIDFLEAKGYKEVKKDLIIKLPKYSLFELENGRKRMLASAGELQKGNELALPSKYVNFLYLASHYEKLKGSPEDNEQKQLFVEQHKHYLDEIIEQISEFSKRVILADANLDKVLSAYNKHRDKPIREQAENIIHLFTLTNLGAPAAFKYFDTTIDRKRYTSTKEVLDATLIHQSITGLYETRIDLSQLGGDGGGGGGSGGGGSGGGGSGGGGSGGGGSGGGGSGGTVSLQDEHRLFDIPVTTSLPDVWLQDFPQAWAETGGLGRAKCQAPIIIDLKPTAVPVSIKQYPMSLEAHMGIRQHIIKFLELGVLRPCRSPWNTPLLPVKKPGTQDYRPVQDLREINKRTVDIHPTVPNPYNLLSTLKPDYSWYTVLDLKDAFFCLPLAPQSQELFAFEWKDPERGISGQLTWTRLPQGFKNSPTLFNEALHRDLTDFRTQHPEVTLLQYVDDLLLAAPTKKACTQGTRHLLQELGEKGYRASAKKAQICQTKVTYLGYILSEGKRWLTPGRIETVARIPPPRNPREVREFLGKAGFCRLFIPGFAELAAPLYALTKPSTPFTWQTEHQLAFEALKKALLSAPALGLPDTSKPFTLFLDERQGIAKGVLTQKLGPWKRPVAYLSKKLDPVAAGWPPCLRIMAATAMLVKDSAKLTLGQPLTVITPHTLEAIVRQPPDRWITNARLTHYQALLLDTDRVQFGPPVTLNPATLLPVPENQPSPHDCRQVLAETHGTREDLKDQELPDADHTWYTDGSSYLDSGTRRAGAAVVDGHNTIWAQSLPPGTSAQKAELIALTKALELSKGKKANIYTDSRYAFATAHTHGSIYERRGWLTSEGKEIKNKAEIIALLKALFLPQEVAIIHCPGHQKGQDPVAVGNRQADRVARQAAMAEVLTLATEPDNTSHITAGKRTADGSEFEKRTADGSEFESPKKKAKVE

SEQ ID NO: 1937 - protein, 2102 aa, synthetic construct
MPAAKRVKLDGGDKKYSIGLDIGTNSVGWAVITDEYKVPSKKFKVLGNTDRHSIKKNLIGALLFDSGETAEATRLKRTARRRYTRRKNRICYLQEIFSNEMAKVDDSFFHRLEESFLVEEDKKHERHPIFGNIVDEVAYHEKYPTIYHLRKKLVDSTDKADLRLIYLALAHMIKFRGHFLIEGDLNPDNSDVDKLFIQLVQTYNQLFEENPINASGVDAKAILSARLSKSRRLENLIAQLPGEKKNGLFGNLIALSLGLTPNFKSNFDLAEDAKLQLSKDTYDDDLDNLLAQIGDQYADLFLAAKNLSDAILLSDILRVNTEITKAPLSASMIKRYDEHHQDLTLLKALVRQQLPEKYKEIFFDQSKNGYAGYIDGGASQEEFYKFIKPILEKMDGTEELLVKLNREDLLRKQRTFDNGSIPHQIHLGELHAILRRQEDFYPFLKDNREKIEKILTFRIPYYVGPLARGNSRFAWMTRKSEETITPWNFEEVVDKGASAQSFIERMTNFDKNLPNEKVLPKHSLLYEYFTVYNELTKVKYVTEGMRKPAFLSGEQKKAIVDLLFKTNRKVTVKQLKEDYFKKIECFDSVEISGVEDRFNASLGTYHDLLKIIKDKDFLDNEENEDILEDIVLTLTLFEDREMIEERLKTYAHLFDDKVMKQLKRRRYTGWGRLSRKLINGIRDKQSGKTILDFLKSDGFANRNFMQLIHDDSLTFKEDIQKAQVSGQGDSLHEHIANLAGSPAIKKGILQTVKVVDELVKVMGRHKPENIVIEMARENQTTQKGQKNSRERMKRIEEGIKELGSQILKEHPVENTQLQNEKLYLYYLQNGRDMYVDQELDINRLSDYDVDHIVPQSFLKDDSIDNKVLTRSDKARGKSDNVPSEEVVKKMKNYWRQLLNAKLITQRKFDNLTKAERGGLSELDKAGFIKRQLVETRQITKHVAQILDSRMNTKYDENDKLIREVKVITLKSKLVSDFRKDFQFYKVREINNYHHAHDAYLNAVVGTALIKKYPKLESEFVYGDYKVYDVRKMIAKSEQEIGKATAKYFFYSNIMNFFKTEITLANGEIRKRPLIETNGETGEIVWDKGRDFATVRKVLSMPQVNIVKKTEVQTGGFSKESILPKRNSDKLIARKKDWDPKKYGGFDSPTVAYSVLVVAKVEKGKSKKLKSVKELLGITIMERSSFEKNPIDFLEAKGYKEVKKDLIIKLPKYSLFELENGRKRMLASAGELQKGNELALPSKYVNFLYLASHYEKLKGSPEDNEQKQLFVEQHKHYLDEIIEQISEFSKRVILADANLDKVLSAYNKHRDKPIREQAENIIHLFTLTNLGAPAAFKYFDTTIDRKRYTSTKEVLDATLIHQSITGLYETRIDLSQLGGDGGGGGGGSEAAAKGGTVSLQDEHRLFDIPVTTSLPDVWLQDFPQAWAETGGLGRAKCQAPIIIDLKPTAVPVSIKQYPMSLEAHMGIRQHIIKFLELGVLRPCRSPWNTPLLPVKKPGTQDYRPVQDLREINKRTVDIHPTVPNPYNLLSTLKPDYSWYTVLDLKDAFFCLPLAPQSQELFAFEWKDPERGISGQLTWTRLPQGFKNSPTLFNEALHRDLTDFRTQHPEVTLLQYVDDLLLAAPTKKACTQGTRHLLQELGEKGYRASAKKAQICQTKVTYLGYILSEGKRWLTPGRIETVARIPPPRNPREVREFLGKAGFCRLFIPGFAELAAPLYALTKPSTPFTWQTEHQLAFEALKKALLSAPALGLPDTSKPFTLFLDERQGIAKGVLTQKLGPWKRPVAYLSKKLDPVAAGWPPCLRIMAATAMLVKDSAKLTLGQPLTVITPHTLEAIVRQPPDRWITNARLTHYQALLLDTDRVQFGPPVTLNPATLLPVPENQPSPHDCRQVLAETHGTREDLKDQELPDADHTWYTDGSSYLDSGTRRAGAAVVDGHNTIWAQSLPPGTSAQKAELIALTKALELSKGKKANIYTDSRYAFATAHTHGSIYERRGWLTSEGKEIKNKAEIIALLKALFLPQEVAIIHCPGHQKGQDPVAVGNRQADRVARQAAMAEVLTLATEPDNTSHITAGKRTADGSEFEKRTADGSEFESPKKKAKVE

SEQ ID NO: 1938 - protein, 2102 aa, synthetic construct
MPAAKRVKLDGGDKKYSIGLDIGTNSVGWAVITDEYKVPSKKFKVLGNTDRHSIKKNLIGALLFDSGETAEATRLKRTARRRYTRRKNRICYLQEIFSNEMAKVDDSFFHRLEESFLVEEDKKHERHPIFGNIVDEVAYHEKYPTIYHLRKKLVDSTDKADLRLIYLALAHMIKFRGHFLIEGDLNPDNSDVDKLFIQLVQTYNQLFEENPINASGVDAKAILSARLSKSRRLENLIAQLPGEKKNGLFGNLIALSLGLTPNFKSNFDLAEDAKLQLSKDTYDDDLDNLLAQIGDQYADLFLAAKNLSDAILLSDILRVNTEITKAPLSASMIKRYDEHHQDLTLLKALVRQQLPEKYKEIFFDQSKNGYAGYIDGGASQEEFYKFIKPILEKMDGTEELLVKLNREDLLRKQRTFDNGSIPHQIHLGELHAILRRQEDFYPFLKDNREKIEKILTFRIPYYVGPLARGNSRFAWMTRKSEETITPWNFEEVVDKGASAQSFIERMTNFDKNLPNEKVLPKHSLLYEYFTVYNELTKVKYVTEGMRKPAFLSGEQKKAIVDLLFKTNRKVTVKQLKEDYFKKIECFDSVEISGVEDRFNASLGTYHDLLKIIKDKDFLDNEENEDILEDIVLTLTLFEDREMIEERLKTYAHLFDDKVMKQLKRRRYTGWGRLSRKLINGIRDKQSGKTILDFLKSDGFANRNFMQLIHDDSLTFKEDIQKAQVSGQGDSLHEHIANLAGSPAIKKGILQTVKVVDELVKVMGRHKPENIVIEMARENQTTQKGQKNSRERMKRIEEGIKELGSQILKEHPVENTQLQNEKLYLYYLQNGRDMYVDQELDINRLSDYDVDHIVPQSFLKDDSIDNKVLTRSDKARGKSDNVPSEEVVKKMKNYWRQLLNAKLITQRKFDNLTKAERGGLSELDKAGFIKRQLVETRQITKHVAQILDSRMNTKYDENDKLIREVKVITLKSKLVSDFRKDFQFYKVREINNYHHAHDAYLNAVVGTALIKKYPKLESEFVYGDYKVYDVRKMIAKSEQEIGKATAKYFFYSNIMNFFKTEITLANGEIRKRPLIETNGETGEIVWDKGRDFATVRKVLSMPQVNIVKKTEVQTGGFSKESILPKRNSDKLIARKKDWDPKKYGGFDSPTVAYSVLVVAKVEKGKSKKLKSVKELLGITIMERSSFEKNPIDFLEAKGYKEVKKDLIIKLPKYSLFELENGRKRMLASAGELQKGNELALPSKYVNFLYLASHYEKLKGSPEDNEQKQLFVEQHKHYLDEIIEQISEFSKRVILADANLDKVLSAYNKHRDKPIREQAENIIHLFTLTNLGAPAAFKYFDTTIDRKRYTSTKEVLDATLIHQSITGLYETRIDLSQLGGDGGGGGPAPEAAAKGGTVSLQDEHRLFDIPVTTSLPDVWLQDFPQAWAETGGLGRAKCQAPIIIDLKPTAVPVSIKQYPMSLEAHMGIRQHIIKFLELGVLRPCRSPWNTPLLPVKKPGTQDYRPVQDLREINKRTVDIHPTVPNPYNLLSTLKPDYSWYTVLDLKDAFFCLPLAPQSQELFAFEWKDPERGISGQLTWTRLPQGFKNSPTLFNEALHRDLTDFRTQHPEVTLLQYVDDLLLAAPTKKACTQGTRHLLQELGEKGYRASAKKAQICQTKVTYLGYILSEGKRWLTPGRIETVARIPPPRNPREVREFLGKAGFCRLFIPGFAELAAPLYALTKPSTPFTWQTEHQLAFEALKKALLSAPALGLPDTSKPFTLFLDERQGIAKGVLTQKLGPWKRPVAYLSKKLDPVAAGWPPCLRIMAATAMLVKDSAKLTLGQPLTVITPHTLEAIVRQPPDRWITNARLTHYQALLLDTDRVQFGPPVTLNPATLLPVPENQPSPHDCRQVLAETHGTREDLKDQELPDADHTWYTDGSSYLDSGTRRAGAAVVDGHNTIWAQSLPPGTSAQKAELIALTKALELSKGKKANIYTDSRYAFATAHTHGSIYERRGWLTSEGKEIKNKAEIIALLKALFLPQEVAIIHCPGHQKGQDPVAVGNRQADRVARQAAMAEVLTLATEPDNTSHITAGKRTADGSEFEKRTADGSEFESPKKKAKVE

SEQ ID NO: 1939 - protein, 2102 aa, synthetic construct
MPAAKRVKLDGGDKKYSIGLDIGTNSVGWAVITDEYKVPSKKFKVLGNTDRHSIKKNLIGALLFDSGETAEATRLKRTARRRYTRRKNRICYLQEIFSNEMAKVDDSFFHRLEESFLVEEDKKHERHPIFGNIVDEVAYHEKYPTIYHLRKKLVDSTDKADLRLIYLALAHMIKFRGHFLIEGDLNPDNSDVDKLFIQLVQTYNQLFEENPINASGVDAKAILSARLSKSRRLENLIAQLPGEKKNGLFGNLIALSLGLTPNFKSNFDLAEDAKLQLSKDTYDDDLDNLLAQIGDQYADLFLAAKNLSDAILLSDILRVNTEITKAPLSASMIKRYDEHHQDLTLLKALVRQQLPEKYKEIFFDQSKNGYAGYIDGGASQEEFYKFIKPILEKMDGTEELLVKLNREDLLRKQRTFDNGSIPHQIHLGELHAILRRQEDFYPFLKDNREKIEKILTFRIPYYVGPLARGNSRFAWMTRKSEETITPWNFEEVVDKGASAQSFIERMTNFDKNLPNEKVLPKHSLLYEYFTVYNELTKVKYVTEGMRKPAFLSGEQKKAIVDLLFKTNRKVTVKQLKEDYFKKIECFDSVEISGVEDRFNASLGTYHDLLKIIKDKDFLDNEENEDILEDIVLTLTLFEDREMIEERLKTYAHLFDDKVMKQLKRRRYTGWGRLSRKLINGIRDKQSGKTILDFLKSDGFANRNFMQLIHDDSLTFKEDIQKAQVSGQGDSLHEHIANLAGSPAIKKGILQTVKVVDELVKVMGRHKPENIVIEMARENQTTQKGQKNSRERMKRIEEGIKELGSQILKEHPVENTQLQNEKLYLYYLQNGRDMYVDQELDINRLSDYDVDHIVPQSFLKDDSIDNKVLTRSDKARGKSDNVPSEEVVKKMKNYWRQLLNAKLITQRKFDNLTKAERGGLSELDKAGFIKRQLVETRQITKHVAQILDSRMNTKYDENDKLIREVKVITLKSKLVSDFRKDFQFYKVREINNYHHAHDAYLNAVVGTALIKKYPKLESEFVYGDYKVYDVRKMIAKSEQEIGKATAKYFFYSNIMNFFKTEITLANGEIRKRPLIETNGETGEIVWDKGRDFATVRKVLSMPQVNIVKKTEVQTGGFSKESILPKRNSDKLIARKKDWDPKKYGGFDSPTVAYSVLVVAKVEKGKSKKLKSVKELLGITIMERSSFEKNPIDFLEAKGYKEVKKDLIIKLPKYSLFELENGRKRMLASAGELQKGNELALPSKYVNFLYLASHYEKLKGSPEDNEQKQLFVEQHKHYLDEIIEQISEFSKRVILADANLDKVLSAYNKHRDKPIREQAENIIHLFTLTNLGAPAAFKYFDTTIDRKRYTSTKEVLDATLIHQSITGLYETRIDLSQLGGDGGPAPGGSEAAAKGGTVSLQDEHRLFDIPVTTSLPDVWLQDFPQAWAETGGLGRAKCQAPIIIDLKPTAVPVSIKQYPMSLEAHMGIRQHIIKFLELGVLRPCRSPWNTPLLPVKKPGTQDYRPVQDLREINKRTVDIHPTVPNPYNLLSTLKPDYSWYTVLDLKDAFFCLPLAPQSQELFAFEWKDPERGISGQLTWTRLPQGFKNSPTLFNEALHRDLTDFRTQHPEVTLLQYVDDLLLAAPTKKACTQGTRHLLQELGEKGYRASAKKAQICQTKVTYLGYILSEGKRWLTPGRIETVARIPPPRNPREVREFLGKAGFCRLFIPGFAELAAPLYALTKPSTPFTWQTEHQLAFEALKKALLSAPALGLPDTSKPFTLFLDERQGIAKGVLTQKLGPWKRPVAYLSKKLDPVAAGWPPCLRIMAATAMLVKDSAKLTLGQPLTVITPHTLEAIVRQPPDRWITNARLTHYQALLLDTDRVQFGPPVTLNPATLLPVPENQPSPHDCRQVLAETHGTREDLKDQELPDADHTWYTDGSSYLDSGTRRAGAAVVDGHNTIWAQSLPPGTSAQKAELIALTKALELSKGKKANIYTDSRYAFATAHTHGSIYERRGWLTSEGKEIKNKAEIIALLKALFLPQEVAIIHCPGHQKGQDPVAVGNRQADRVARQAAMAEVLTLATEPDNTSHITAGKRTADGSEFEKRTADGSEFESPKKKAKVE

SEQ ID NO: 1940 - protein, 2097 aa, synthetic construct
MPAAKRVKLDGGDKKYSIGLDIGTNSVGWAVITDEYKVPSKKFKVLGNTDRHSIKKNLIGALLFDSGETAEATRLKRTARRRYTRRKNRICYLQEIFSNEMAKVDDSFFHRLEESFLVEEDKKHERHPIFGNIVDEVAYHEKYPTIYHLRKKLVDSTDKADLRLIYLALAHMIKFRGHFLIEGDLNPDNSDVDKLFIQLVQTYNQLFEENPINASGVDAKAILSARLSKSRRLENLIAQLPGEKKNGLFGNLIALSLGLTPNFKSNFDLAEDAKLQLSKDTYDDDLDNLLAQIGDQYADLFLAAKNLSDAILLSDILRVNTEITKAPLSASMIKRYDEHHQDLTLLKALVRQQLPEKYKEIFFDQSKNGYAGYIDGGASQEEFYKFIKPILEKMDGTEELLVKLNREDLLRKQRTFDNGSIPHQIHLGELHAILRRQEDFYPFLKDNREKIEKILTFRIPYYVGPLARGNSRFAWMTRKSEETITPWNFEEVVDKGASAQSFIERMTNFDKNLPNEKVLPKHSLLYEYFTVYNELTKVKYVTEGMRKPAFLSGEQKKAIVDLLFKTNRKVTVKQLKEDYFKKIECFDSVEISGVEDRFNASLGTYHDLLKIIKDKDFLDNEENEDILEDIVLTLTLFEDREMIEERLKTYAHLFDDKVMKQLKRRRYTGWGRLSRKLINGIRDKQSGKTILDFLKSDGFANRNFMQLIHDDSLTFKEDIQKAQVSGQGDSLHEHIANLAGSPAIKKGILQTVKVVDELVKVMGRHKPENIVIEMARENQTTQKGQKNSRERMKRIEEGIKELGSQILKEHPVENTQLQNEKLYLYYLQNGRDMYVDQELDINRLSDYDVDHIVPQSFLKDDSIDNKVLTRSDKARGKSDNVPSEEVVKKMKNYWRQLLNAKLITQRKFDNLTKAERGGLSELDKAGFIKRQLVETRQITKHVAQILDSRMNTKYDENDKLIREVKVITLKSKLVSDFRKDFQFYKVREINNYHHAHDAYLNAVVGTALIKKYPKLESEFVYGDYKVYDVRKMIAKSEQEIGKATAKYFFYSNIMNFFKTEITLANGEIRKRPLIETNGETGEIVWDKGRDFATVRKVLSMPQVNIVKKTEVQTGGFSKESILPKRNSDKLIARKKDWDPKKYGGFDSPTVAYSVLVVAKVEKGKSKKLKSVKELLGITIMERSSFEKNPIDFLEAKGYKEVKKDLIIKLPKYSLFELENGRKRMLASAGELQKGNELALPSKYVNFLYLASHYEKLKGSPEDNEQKQLFVEQHKHYLDEIIEQISEFSKRVILADANLDKVLSAYNKHRDKPIREQAENIIHLFTLTNLGAPAAFKYFDTTIDRKRYTSTKEVLDATLIHQSITGLYETRIDLSQLGGDGGGGSGGGGGTVSLQDEHRLFDIPVTTSLPDVWLQDFPQAWAETGGLGRAKCQAPIIIDLKPTAVPVSIKQYPMSLEAHMGIRQHIIKFLELGVLRPCRSPWNTPLLPVKKPGTQDYRPVQDLREINKRTVDIHPTVPNPYNLLSTLKPDYSWYTVLDLKDAFFCLPLAPQSQELFAFEWKDPERGISGQLTWTRLPQGFKNSPTLFNEALHRDLTDFRTQHPEVTLLQYVDDLLLAAPTKKACTQGTRHLLQELGEKGYRASAKKAQICQTKVTYLGYILSEGKRWLTPGRIETVARIPPPRNPREVREFLGKAGFCRLFIPGFAELAAPLYALTKPSTPFTWQTEHQLAFEALKKALLSAPALGLPDTSKPFTLFLDERQGIAKGVLTQKLGPWKRPVAYLSKKLDPVAAGWPPCLRIMAATAMLVKDSAKLTLGQPLTVITPHTLEAIVRQPPDRWITNARLTHYQALLLDTDRVQFGPPVTLNPATLLPVPENQPSPHDCRQVLAETHGTREDLKDQELPDADHTWYTDGSSYLDSGTRRAGAAVVDGHNTIWAQSLPPGTSAQKAELIALTKALELSKGKKANIYTDSRYAFATAHTHGSIYERRGWLTSEGKEIKNKAEIIALLKALFLPQEVAIIHCPGHQKGQDPVAVGNRQADRVARQAAMAEVLTLATEPDNTSHITAGKRTADGSEFEKRTADGSEFESPKKKAKVE

SEQ ID NO: 1941 - protein, 2111 aa, synthetic construct
MPAAKRVKLDGGDKKYSIGLDIGTNSVGWAVITDEYKVPSKKFKVLGNTDRHSIKKNLIGALLFDSGETAEATRLKRTARRRYTRRKNRICYLQEIFSNEMAKVDDSFFHRLEESFLVEEDKKHERHPIFGNIVDEVAYHEKYPTIYHLRKKLVDSTDKADLRLIYLALAHMIKFRGHFLIEGDLNPDNSDVDKLFIQLVQTYNQLFEENPINASGVDAKAILSARLSKSRRLENLIAQLPGEKKNGLFGNLIALSLGLTPNFKSNFDLAEDAKLQLSKDTYDDDLDNLLAQIGDQYADLFLAAKNLSDAILLSDILRVNTEITKAPLSASMIKRYDEHHQDLTLLKALVRQQLPEKYKEIFFDQSKNGYAGYIDGGASQEEFYKFIKPILEKMDGTEELLVKLNREDLLRKQRTFDNGSIPHQIHLGELHAILRRQEDFYPFLKDNREKIEKILTFRIPYYVGPLARGNSRFAWMTRKSEETITPWNFEEVVDKGASAQSFIERMTNFDKNLPNEKVLPKHSLLYEYFTVYNELTKVKYVTEGMRKPAFLSGEQKKAIVDLLFKTNRKVTVKQLKEDYFKKIECFDSVEISGVEDRFNASLGTYHDLLKIIKDKDFLDNEENEDILEDIVLTLTLFEDREMIEERLKTYAHLFDDKVMKQLKRRRYTGWGRLSRKLINGIRDKQSGKTILDFLKSDGFANRNFMQLIHDDSLTFKEDIQKAQVSGQGDSLHEHIANLAGSPAIKKGILQTVKVVDELVKVMGRHKPENIVIEMARENQTTQKGQKNSRERMKRIEEGIKELGSQILKEHPVENTQLQNEKLYLYYLQNGRDMYVDQELDINRLSDYDVDHIVPQSFLKDDSIDNKVLTRSDKARGKSDNVPSEEVVKKMKNYWRQLLNAKLITQRKFDNLTKAERGGLSELDKAGFIKRQLVETRQITKHVAQILDSRMNTKYDENDKLIREVKVITLKSKLVSDFRKDFQFYKVREINNYHHAHDAYLNAVVGTALIKKYPKLESEFVYGDYKVYDVRKMIAKSEQEIGKATAKYFFYSNIMNFFKTEITLANGEIRKRPLIETNGETGEIVWDKGRDFATVRKVLSMPQVNIVKKTEVQTGGFSKESILPKRNSDKLIARKKDWDPKKYGGFDSPTVAYSVLVVAKVEKGKSKKLKSVKELLGITIMERSSFEKNPIDFLEAKGYKEVKKDLIIKLPKYSLFELENGRKRMLASAGELQKGNELALPSKYVNFLYLASHYEKLKGSPEDNEQKQLFVEQHKHYLDEIIEQISEFSKRVILADANLDKVLSAYNKHRDKPIREQAENIIHLFTLTNLGAPAAFKYFDTTIDRKRYTSTKEVLDATLIHQSITGLYETRIDLSQLGGDGGEAAAKEAAAKEAAAKEAAAKGGTVSLQDEHRLFDIPVTTSLPDVWLQDFPQAWAETGGLGRAKCQAPIIIDLKPTAVPVSIKQYPMSLEAHMGIRQHIIKFLELGVLRPCRSPWNTPLLPVKKPGTQDYRPVQDLREINKRTVDIHPTVPNPYNLLSTLKPDYSWYTVLDLKDAFFCLPLAPQSQELFAFEWKDPERGISGQLTWTRLPQGFKNSPTLFNEALHRDLTDFRTQHPEVTLLQYVDDLLLAAPTKKACTQGTRHLLQELGEKGYRASAKKAQICQTKVTYLGYILSEGKRWLTPGRIETVARIPPPRNPREVREFLGKAGFCRLFIPGFAELAAPLYALTKPSTPFTWQTEHQLAFEALKKALLSAPALGLPDTSKPFTLFLDERQGIAKGVLTQKLGPWKRPVAYLSKKLDPVAAGWPPCLRIMAATAMLVKDSAKLTLGQPLTVITPHTLEAIVRQPPDRWITNARLTHYQALLLDTDRVQFGPPVTLNPATLLPVPENQPSPHDCRQVLAETHGTREDLKDQELPDADHTWYTDGSSYLDSGTRRAGAAVVDGHNTIWAQSLPPGTSAQKAELIALTKALELSKGKKANIYTDSRYAFATAHTHGSIYERRGWLTSEGKEIKNKAEIIALLKALFLPQEVAIIHCPGHQKGQDPVAVGNRQADRVARQAAMAEVLTLATEPDNTSHITAGKRTADGSEFEKRTADGSEFESPKKKAKVE

SEQ ID NO: 1942 - protein, 2100 aa, synthetic construct
MPAAKRVKLDGGDKKYSIGLDIGTNSVGWAVITDEYKVPSKKFKVLGNTDRHSIKKNLIGALLFDSGETAEATRLKRTARRRYTRRKNRICYLQEIFSNEMAKVDDSFFHRLEESFLVEEDKKHERHPIFGNIVDEVAYHEKYPTIYHLRKKLVDSTDKADLRLIYLALAHMIKFRGHFLIEGDLNPDNSDVDKLFIQLVQTYNQLFEENPINASGVDAKAILSARLSKSRRLENLIAQLPGEKKNGLFGNLIALSLGLTPNFKSNFDLAEDAKLQLSKDTYDDDLDNLLAQIGDQYADLFLAAKNLSDAILLSDILRVNTEITKAPLSASMIKRYDEHHQDLTLLKALVRQQLPEKYKEIFFDQSKNGYAGYIDGGASQEEFYKFIKPILEKMDGTEELLVKLNREDLLRKQRTFDNGSIPHQIHLGELHAILRRQEDFYPFLKDNREKIEKILTFRIPYYVGPLARGNSRFAWMTRKSEETITPWNFEEVVDKGASAQSFIERMTNFDKNLPNEKVLPKHSLLYEYFTVYNELTKVKYVTEGMRKPAFLSGEQKKAIVDLLFKTNRKVTVKQLKEDYFKKIECFDSVEISGVEDRFNASLGTYHDLLKIIKDKDFLDNEENEDILEDIVLTLTLFEDREMIEERLKTYAHLFDDKVMKQLKRRRYTGWGRLSRKLINGIRDKQSGKTILDFLKSDGFANRNFMQLIHDDSLTFKEDIQKAQVSGQGDSLHEHIANLAGSPAIKKGILQTVKVVDELVKVMGRHKPENIVIEMARENQTTQKGQKNSRERMKRIEEGIKELGSQILKEHPVENTQLQNEKLYLYYLQNGRDMYVDQELDINRLSDYDVDHIVPQSFLKDDSIDNKVLTRSDKARGKSDNVPSEEVVKKMKNYWRQLLNAKLITQRKFDNLTKAERGGLSELDKAGFIKRQLVETRQITKHVAQILDSRMNTKYDENDKLIREVKVITLKSKLVSDFRKDFQFYKVREINNYHHAHDAYLNAVVGTALIKKYPKLESEFVYGDYKVYDVRKMIAKSEQEIGKATAKYFFYSNIMNFFKTEITLANGEIRKRPLIETNGETGEIVWDKGRDFATVRKVLSMPQVNIVKKTEVQTGGFSKESILPKRNSDKLIARKKDWDPKKYGGFDSPTVAYSVLVVAKVEKGKSKKLKSVKELLGITIMERSSFEKNPIDFLEAKGYKEVKKDLIIKLPKYSLFELENGRKRMLASAGELQKGNELALPSKYVNFLYLASHYEKLKGSPEDNEQKQLFVEQHKHYLDEIIEQISEFSKRVILADANLDKVLSAYNKHRDKPIREQAENIIHLFTLTNLGAPAAFKYFDTTIDRKRYTSTKEVLDATLIHQSITGLYETRIDLSQLGGDGGGGSGGGPAPGGTVSLQDEHRLFDIPVTTSLPDVWLQDFPQAWAETGGLGRAKCQAPIIIDLKPTAVPVSIKQYPMSLEAHMGIRQHIIKFLELGVLRPCRSPWNTPLLPVKKPGTQDYRPVQDLREINKRTVDIHPTVPNPYNLLSTLKPDYSWYTVLDLKDAFFCLPLAPQSQELFAFEWKDPERGISGQLTWTRLPQGFKNSPTLFNEALHRDLTDFRTQHPEVTLLQYVDDLLLAAPTKKACTQGTRHLLQELGEKGYRASAKKAQICQTKVTYLGYILSEGKRWLTPGRIETVARIPPPRNPREVREFLGKAGFCRLFIPGFAELAAPLYALTKPSTPFTWQTEHQLAFEALKKALLSAPALGLPDTSKPFTLFLDERQGIAKGVLTQKLGPWKRPVAYLSKKLDPVAAGWPPCLRIMAATAMLVKDSAKLTLGQPLTVITPHTLEAIVRQPPDRWITNARLTHYQALLLDTDRVQFGPPVTLNPATLLPVPENQPSPHDCRQVLAETHGTREDLKDQELPDADHTWYTDGSSYLDSGTRRAGAAVVDGHNTIWAQSLPPGTSAQKAELIALTKALELSKGKKANIYTDSRYAFATAHTHGSIYERRGWLTSEGKEIKNKAEIIALLKALFLPQEVAIIHCPGHQKGQDPVAVGNRQADRVARQAAMAEVLTLATEPDNTSHITAGKRTADGSEFEKRTADGSEFESPKKKAKVE

SEQ ID NO: 1943 - protein, 2102 aa, synthetic construct
MPAAKRVKLDGGDKKYSIGLDIGTNSVGWAVITDEYKVPSKKFKVLGNTDRHSIKKNLIGALLFDSGETAEATRLKRTARRRYTRRKNRICYLQEIFSNEMAKVDDSFFHRLEESFLVEEDKKHERHPIFGNIVDEVAYHEKYPTIYHLRKKLVDSTDKADLRLIYLALAHMIKFRGHFLIEGDLNPDNSDVDKLFIQLVQTYNQLFEENPINASGVDAKAILSARLSKSRRLENLIAQLPGEKKNGLFGNLIALSLGLTPNFKSNFDLAEDAKLQLSKDTYDDDLDNLLAQIGDQYADLFLAAKNLSDAILLSDILRVNTEITKAPLSASMIKRYDEHHQDLTLLKALVRQQLPEKYKEIFFDQSKNGYAGYIDGGASQEEFYKFIKPILEKMDGTEELLVKLNREDLLRKQRTFDNGSIPHQIHLGELHAILRRQEDFYPFLKDNREKIEKILTFRIPYYVGPLARGNSRFAWMTRKSEETITPWNFEEVVDKGASAQSFIERMTNFDKNLPNEKVLPKHSLLYEYFTVYNELTKVKYVTEGMRKPAFLSGEQKKAIVDLLFKTNRKVTVKQLKEDYFKKIECFDSVEISGVEDRFNASLGTYHDLLKIIKDKDFLDNEENEDILEDIVLTLTLFEDREMIEERLKTYAHLFDDKVMKQLKRRRYTGWGRLSRKLINGIRDKQSGKTILDFLKSDGFANRNFMQLIHDDSLTFKEDIQKAQVSGQGDSLHEHIANLAGSPAIKKGILQTVKVVDELVKVMGRHKPENIVIEMARENQTTQKGQKNSRERMKRIEEGIKELGSQILKEHPVENTQLQNEKLYLYYLQNGRDMYVDQELDINRLSDYDVDHIVPQSFLKDDSIDNKVLTRSDKARGKSDNVPSEEVVKKMKNYWRQLLNAKLITQRKFDNLTKAERGGLSELDKAGFIKRQLVETRQITKHVAQILDSRMNTKYDENDKLIREVKVITLKSKLVSDFRKDFQFYKVREINNYHHAHDAYLNAVVGTALIKKYPKLESEFVYGDYKVYDVRKMIAKSEQEIGKATAKYFFYSNIMNFFKTEITLANGEIRKRPLIETNGETGEIVWDKGRDFATVRKVLSMPQVNIVKKTEVQTGGFSKESILPKRNSDKLIARKKDWDPKKYGGFDSPTVAYSVLVVAKVEKGKSKKLKSVKELLGITIMERSSFEKNPIDFLEAKGYKEVKKDLIIKLPKYSLFELENGRKRMLASAGELQKGNELALPSKYVNFLYLASHYEKLKGSPEDNEQKQLFVEQHKHYLDEIIEQISEFSKRVILADANLDKVLSAYNKHRDKPIREQAENIIHLFTLTNLGAPAAFKYFDTTIDRKRYTSTKEVLDATLIHQSITGLYETRIDLSQLGGDGGGGGEAAAKGGSGGTVSLQDEHRLFDIPVTTSLPDVWLQDFPQAWAETGGLGRAKCQAPIIIDLKPTAVPVSIKQYPMSLEAHMGIRQHIIKFLELGVLRPCRSPWNTPLLPVKKPGTQDYRPVQDLREINKRTVDIHPTVPNPYNLLSTLKPDYSWYTVLDLKDAFFCLPLAPQSQELFAFEWKDPERGISGQLTWTRLPQGFKNSPTLFNEALHRDLTDFRTQHPEVTLLQYVDDLLLAAPTKKACTQGTRHLLQELGEKGYRASAKKAQICQTKVTYLGYILSEGKRWLTPGRIETVARIPPPRNPREVREFLGKAGFCRLFIPGFAELAAPLYALTKPSTPFTWQTEHQLAFEALKKALLSAPALGLPDTSKPFTLFLDERQGIAKGVLTQKLGPWKRPVAYLSKKLDPVAAGWPPCLRIMAATAMLVKDSAKLTLGQPLTVITPHTLEAIVRQPPDRWITNARLTHYQALLLDTDRVQFGPPVTLNPATLLPVPENQPSPHDCRQVLAETHGTREDLKDQELPDADHTWYTDGSSYLDSGTRRAGAAVVDGHNTIWAQSLPPGTSAQKAELIALTKALELSKGKKANIYTDSRYAFATAHTHGSIYERRGWLTSEGKEIKNKAEIIALLKALFLPQEVAIIHCPGHQKGQDPVAVGNRQADRVARQAAMAEVLTLATEPDNTSHITAGKRTADGSEFEKRTADGSEFESPKKKAKVE

SEQ ID NO: 1944 - protein, 2116 aa, synthetic construct
MPAAKRVKLDGGDKKYSIGLDIGTNSVGWAVITDEYKVPSKKFKVLGNTDRHSIKKNLIGALLFDSGETAEATRLKRTARRRYTRRKNRICYLQEIFSNEMAKVDDSFFHRLEESFLVEEDKKHERHPIFGNIVDEVAYHEKYPTIYHLRKKLVDSTDKADLRLIYLALAHMIKFRGHFLIEGDLNPDNSDVDKLFIQLVQTYNQLFEENPINASGVDAKAILSARLSKSRRLENLIAQLPGEKKNGLFGNLIALSLGLTPNFKSNFDLAEDAKLQLSKDTYDDDLDNLLAQIGDQYADLFLAAKNLSDAILLSDILRVNTEITKAPLSASMIKRYDEHHQDLTLLKALVRQQLPEKYKEIFFDQSKNGYAGYIDGGASQEEFYKFIKPILEKMDGTEELLVKLNREDLLRKQRTFDNGSIPHQIHLGELHAILRRQEDFYPFLKDNREKIEKILTFRIPYYVGPLARGNSRFAWMTRKSEETITPWNFEEVVDKGASAQSFIERMTNFDKNLPNEKVLPKHSLLYEYFTVYNELTKVKYVTEGMRKPAFLSGEQKKAIVDLLFKTNRKVTVKQLKEDYFKKIECFDSVEISGVEDRFNASLGTYHDLLKIIKDKDFLDNEENEDILEDIVLTLTLFEDREMIEERLKTYAHLFDDKVMKQLKRRRYTGWGRLSRKLINGIRDKQSGKTILDFLKSDGFANRNFMQLIHDDSLTFKEDIQKAQVSGQGDSLHEHIANLAGSPAIKKGILQTVKVVDELVKVMGRHKPENIVIEMARENQTTQKGQKNSRERMKRIEEGIKELGSQILKEHPVENTQLQNEKLYLYYLQNGRDMYVDQELDINRLSDYDVDHIVPQSFLKDDSIDNKVLTRSDKARGKSDNVPSEEVVKKMKNYWRQLLNAKLITQRKFDNLTKAERGGLSELDKAGFIKRQLVETRQITKHVAQILDSRMNTKYDENDKLIREVKVITLKSKLVSDFRKDFQFYKVREINNYHHAHDAYLNAVVGTALIKKYPKLESEFVYGDYKVYDVRKMIAKSEQEIGKATAKYFFYSNIMNFFKTEITLANGEIRKRPLIETNGETGEIVWDKGRDFATVRKVLSMPQVNIVKKTEVQTGGFSKESILPKRNSDKLIARKKDWDPKKYGGFDSPTVAYSVLVVAKVEKGKSKKLKSVKELLGITIMERSSFEKNPIDFLEAKGYKEVKKDLIIKLPKYSLFELENGRKRMLASAGELQKGNELALPSKYVNFLYLASHYEKLKGSPEDNEQKQLFVEQHKHYLDEIIEQISEFSKRVILADANLDKVLSAYNKHRDKPIREQAENIIHLFTLTNLGAPAAFKYFDTTIDRKRYTSTKEVLDATLIHQSITGLYETRIDLSQLGGDGGGGGGSGGGGSGGGGSGGGGSGGGGSGGTVSLQDEHRLFDIPVTTSLPDVWLQDFPQAWAETGGLGRAKCQAPIIIDLKPTAVPVSIKQYPMSLEAHMGIRQHIIKFLELGVLRPCRSPWNTPLLPVKKPGTQDYRPVQDLREINKRTVDIHPTVPNPYNLLSTLKPDYSWYTVLDLKDAFFCLPLAPQSQELFAFEWKDPERGISGQLTWTRLPQGFKNSPTLFNEALHRDLTDFRTQHPEVTLLQYVDDLLLAAPTKKACTQGTRHLLQELGEKGYRASAKKAQICQTKVTYLGYILSEGKRWLTPGRIETVARIPPPRNPREVREFLGKAGFCRLFIPGFAELAAPLYALTKPSTPFTWQTEHQLAFEALKKALLSAPALGLPDTSKPFTLFLDERQGIAKGVLTQKLGPWKRPVAYLSKKLDPVAAGWPPCLRIMAATAMLVKDSAKLTLGQPLTVITPHTLEAIVRQPPDRWITNARLTHYQALLLDTDRVQFGPPVTLNPATLLPVPENQPSPHDCRQVLAETHGTREDLKDQELPDADHTWYTDGSSYLDSGTRRAGAAVVDGHNTIWAQSLPPGTSAQKAELIALTKALELSKGKKANIYTDSRYAFATAHTHGSIYERRGWLTSEGKEIKNKAEIIALLKALFLPQEVAIIHCPGHQKGQDPVAVGNRQADRVARQAAMAEVLTLATEPDNTSHITAGKRTADGSEFEKRTADGSEFESPKKKAKVE

SEQ ID NO: 1945 - protein, 2096 aa, synthetic construct
MPAAKRVKLDGGDKKYSIGLDIGTNSVGWAVITDEYKVPSKKFKVLGNTDRHSIKKNLIGALLFDSGETAEATRLKRTARRRYTRRKNRICYLQEIFSNEMAKVDDSFFHRLEESFLVEEDKKHERHPIFGNIVDEVAYHEKYPTIYHLRKKLVDSTDKADLRLIYLALAHMIKFRGHFLIEGDLNPDNSDVDKLFIQLVQTYNQLFEENPINASGVDAKAILSARLSKSRRLENLIAQLPGEKKNGLFGNLIALSLGLTPNFKSNFDLAEDAKLQLSKDTYDDDLDNLLAQIGDQYADLFLAAKNLSDAILLSDILRVNTEITKAPLSASMIKRYDEHHQDLTLLKALVRQQLPEKYKEIFFDQSKNGYAGYIDGGASQEEFYKFIKPILEKMDGTEELLVKLNREDLLRKQRTFDNGSIPHQIHLGELHAILRRQEDFYPFLKDNREKIEKILTFRIPYYVGPLARGNSRFAWMTRKSEETITPWNFEEVVDKGASAQSFIERMTNFDKNLPNEKVLPKHSLLYEYFTVYNELTKVKYVTEGMRKPAFLSGEQKKAIVDLLFKTNRKVTVKQLKEDYFKKIECFDSVEISGVEDRFNASLGTYHDLLKIIKDKDFLDNEENEDILEDIVLTLTLFEDREMIEERLKTYAHLFDDKVMKQLKRRRYTGWGRLSRKLINGIRDKQSGKTILDFLKSDGFANRNFMQLIHDDSLTFKEDIQKAQVSGQGDSLHEHIANLAGSPAIKKGILQTVKVVDELVKVMGRHKPENIVIEMARENQTTQKGQKNSRERMKRIEEGIKELGSQILKEHPVENTQLQNEKLYLYYLQNGRDMYVDQELDINRLSDYDVDHIVPQSFLKDDSIDNKVLTRSDKARGKSDNVPSEEVVKKMKNYWRQLLNAKLITQRKFDNLTKAERGGLSELDKAGFIKRQLVETRQITKHVAQILDSRMNTKYDENDKLIREVKVITLKSKLVSDFRKDFQFYKVREINNYHHAHDAYLNAVVGTALIKKYPKLESEFVYGDYKVYDVRKMIAKSEQEIGKATAKYFFYSNIMNFFKTEITLANGEIRKRPLIETNGETGEIVWDKGRDFATVRKVLSMPQVNIVKKTEVQTGGFSKESILPKRNSDKLIARKKDWDPKKYGGFDSPTVAYSVLVVAKVEKGKSKKLKSVKELLGITIMERSSFEKNPIDFLEAKGYKEVKKDLIIKLPKYSLFELENGRKRMLASAGELQKGNELALPSKYVNFLYLASHYEKLKGSPEDNEQKQLFVEQHKHYLDEIIEQISEFSKRVILADANLDKVLSAYNKHRDKPIREQAENIIHLFTLTNLGAPAAFKYFDTTIDRKRYTSTKEVLDATLIHQSITGLYETRIDLSQLGGDGGPAPAPGGTVSLQDEHRLFDIPVTTSLPDVWLQDFPQAWAETGGLGRAKCQAPIIIDLKPTAVPVSIKQYPMSLEAHMGIRQHIIKFLELGVLRPCRSPWNTPLLPVKKPGTQDYRPVQDLREINKRTVDIHPTVPNPYNLLSTLKPDYSWYTVLDLKDAFFCLPLAPQSQELFAFEWKDPERGISGQLTWTRLPQGFKNSPTLFNEALHRDLTDFRTQHPEVTLLQYVDDLLLAAPTKKACTQGTRHLLQELGEKGYRASAKKAQICQTKVTYLGYILSEGKRWLTPGRIETVARIPPPRNPREVREFLGKAGFCRLFIPGFAELAAPLYALTKPSTPFTWQTEHQLAFEALKKALLSAPALGLPDTSKPFTLFLDERQGIAKGVLTQKLGPWKRPVAYLSKKLDPVAAGWPPCLRIMAATAMLVKDSAKLTLGQPLTVITPHTLEAIVRQPPDRWITNARLTHYQALLLDTDRVQFGPPVTLNPATLLPVPENQPSPHDCRQVLAETHGTREDLKDQELPDADHTWYTDGSSYLDSGTRRAGAAVVDGHNTIWAQSLPPGTSAQKAELIALTKALELSKGKKANIYTDSRYAFATAHTHGSIYERRGWLTSEGKEIKNKAEIIALLKALFLPQEVAIIHCPGHQKGQDPVAVGNRQADRVARQAAMAEVLTLATEPDNTSHITAGKRTADGSEFEKRTADGSEFESPKKKAKVE

SEQ ID NO: 1946 - protein, 2116 aa, synthetic construct
MPAAKRVKLDGGDKKYSIGLDIGTNSVGWAVITDEYKVPSKKFKVLGNTDRHSIKKNLIGALLFDSGETAEATRLKRTARRRYTRRKNRICYLQEIFSNEMAKVDDSFFHRLEESFLVEEDKKHERHPIFGNIVDEVAYHEKYPTIYHLRKKLVDSTDKADLRLIYLALAHMIKFRGHFLIEGDLNPDNSDVDKLFIQLVQTYNQLFEENPINASGVDAKAILSARLSKSRRLENLIAQLPGEKKNGLFGNLIALSLGLTPNFKSNFDLAEDAKLQLSKDTYDDDLDNLLAQIGDQYADLFLAAKNLSDAILLSDILRVNTEITKAPLSASMIKRYDEHHQDLTLLKALVRQQLPEKYKEIFFDQSKNGYAGYIDGGASQEEFYKFIKPILEKMDGTEELLVKLNREDLLRKQRTFDNGSIPHQIHLGELHAILRRQEDFYPFLKDNREKIEKILTFRIPYYVGPLARGNSRFAWMTRKSEETITPWNFEEVVDKGASAQSFIERMTNFDKNLPNEKVLPKHSLLYEYFTVYNELTKVKYVTEGMRKPAFLSGEQKKAIVDLLFKTNRKVTVKQLKEDYFKKIECFDSVEISGVEDRFNASLGTYHDLLKIIKDKDFLDNEENEDILEDIVLTLTLFEDREMIEERLKTYAHLFDDKVMKQLKRRRYTGWGRLSRKLINGIRDKQSGKTILDFLKSDGFANRNFMQLIHDDSLTFKEDIQKAQVSGQGDSLHEHIANLAGSPAIKKGILQTVKVVDELVKVMGRHKPENIVIEMARENQTTQKGQKNSRERMKRIEEGIKELGSQILKEHPVENTQLQNEKLYLYYLQNGRDMYVDQELDINRLSDYDVDHIVPQSFLKDDSIDNKVLTRSDKARGKSDNVPSEEVVKKMKNYWRQLLNAKLITQRKFDNLTKAERGGLSELDKAGFIKRQLVETRQITKHVAQILDSRMNTKYDENDKLIREVKVITLKSKLVSDFRKDFQFYKVREINNYHHAHDAYLNAVVGTALIKKYPKLESEFVYGDYKVYDVRKMIAKSEQEIGKATAKYFFYSNIMNFFKTEITLANGEIRKRPLIETNGETGEIVWDKGRDFATVRKVLSMPQVNIVKKTEVQTGGFSKESILPKRNSDKLIARKKDWDPKKYGGFDSPTVAYSVLVVAKVEKGKSKKLKSVKELLGITIMERSSFEKNPIDFLEAKGYKEVKKDLIIKLPKYSLFELENGRKRMLASAGELQKGNELALPSKYVNFLYLASHYEKLKGSPEDNEQKQLFVEQHKHYLDEIIEQISEFSKRVILADANLDKVLSAYNKHRDKPIREQAENIIHLFTLTNLGAPAAFKYFDTTIDRKRYTSTKEVLDATLIHQSITGLYETRIDLSQLGGDGGEAAAKEAAAKEAAAKEAAAKEAAAKGGTVSLQDEHRLFDIPVTTSLPDVWLQDFPQAWAETGGLGRAKCQAPIIIDLKPTAVPVSIKQYPMSLEAHMGIRQHIIKFLELGVLRPCRSPWNTPLLPVKKPGTQDYRPVQDLREINKRTVDIHPTVPNPYNLLSTLKPDYSWYTVLDLKDAFFCLPLAPQSQELFAFEWKDPERGISGQLTWTRLPQGFKNSPTLFNEALHRDLTDFRTQHPEVTLLQYVDDLLLAAPTKKACTQGTRHLLQELGEKGYRASAKKAQICQTKVTYLGYILSEGKRWLTPGRIETVARIPPPRNPREVREFLGKAGFCRLFIPGFAELAAPLYALTKPSTPFTWQTEHQLAFEALKKALLSAPALGLPDTSKPFTLFLDERQGIAKGVLTQKLGPWKRPVAYLSKKLDPVAAGWPPCLRIMAATAMLVKDSAKLTLGQPLTVITPHTLEAIVRQPPDRWITNARLTHYQALLLDTDRVQFGPPVTLNPATLLPVPENQPSPHDCRQVLAETHGTREDLKDQELPDADHTWYTDGSSYLDSGTRRAGAAVVDGHNTIWAQSLPPGTSAQKAELIALTKALELSKGKKANIYTDSRYAFATAHTHGSIYERRGWLTSEGKEIKNKAEIIALLKALFLPQEVAIIHCPGHQKGQDPVAVGNRQADRVARQAAMAEVLTLATEPDNTSHITAGKRTADGSEFEKRTADGSEFESPKKKAKVE

SEQ ID NO: 1947 - protein, 2106 aa, synthetic construct
MPAAKRVKLDGGDKKYSIGLDIGTNSVGWAVITDEYKVPSKKFKVLGNTDRHSIKKNLIGALLFDSGETAEATRLKRTARRRYTRRKNRICYLQEIFSNEMAKVDDSFFHRLEESFLVEEDKKHERHPIFGNIVDEVAYHEKYPTIYHLRKKLVDSTDKADLRLIYLALAHMIKFRGHFLIEGDLNPDNSDVDKLFIQLVQTYNQLFEENPINASGVDAKAILSARLSKSRRLENLIAQLPGEKKNGLFGNLIALSLGLTPNFKSNFDLAEDAKLQLSKDTYDDDLDNLLAQIGDQYADLFLAAKNLSDAILLSDILRVNTEITKAPLSASMIKRYDEHHQDLTLLKALVRQQLPEKYKEIFFDQSKNGYAGYIDGGASQEEFYKFIKPILEKMDGTEELLVKLNREDLLRKQRTFDNGSIPHQIHLGELHAILRRQEDFYPFLKDNREKIEKILTFRIPYYVGPLARGNSRFAWMTRKSEETITPWNFEEVVDKGASAQSFIERMTNFDKNLPNEKVLPKHSLLYEYFTVYNELTKVKYVTEGMRKPAFLSGEQKKAIVDLLFKTNRKVTVKQLKEDYFKKIECFDSVEISGVEDRFNASLGTYHDLLKIIKDKDFLDNEENEDILEDIVLTLTLFEDREMIEERLKTYAHLFDDKVMKQLKRRRYTGWGRLSRKLINGIRDKQSGKTILDFLKSDGFANRNFMQLIHDDSLTFKEDIQKAQVSGQGDSLHEHIANLAGSPAIKKGILQTVKVVDELVKVMGRHKPENIVIEMARENQTTQKGQKNSRERMKRIEEGIKELGSQILKEHPVENTQLQNEKLYLYYLQNGRDMYVDQELDINRLSDYDVDHIVPQSFLKDDSIDNKVLTRSDKARGKSDNVPSEEVVKKMKNYWRQLLNAKLITQRKFDNLTKAERGGLSELDKAGFIKRQLVETRQITKHVAQILDSRMNTKYDENDKLIREVKVITLKSKLVSDFRKDFQFYKVREINNYHHAHDAYLNAVVGTALIKKYPKLESEFVYGDYKVYDVRKMIAKSEQEIGKATAKYFFYSNIMNFFKTEITLANGEIRKRPLIETNGETGEIVWDKGRDFATVRKVLSMPQVNIVKKTEVQTGGFSKESILPKRNSDKLIARKKDWDPKKYGGFDSPTVAYSVLVVAKVEKGKSKKLKSVKELLGITIMERSSFEKNPIDFLEAKGYKEVKKDLIIKLPKYSLFELENGRKRMLASAGELQKGNELALPSKYVNFLYLASHYEKLKGSPEDNEQKQLFVEQHKHYLDEIIEQISEFSKRVILADANLDKVLSAYNKHRDKPIREQAENIIHLFTLTNLGAPAAFKYFDTTIDRKRYTSTKEVLDATLIHQSITGLYETRIDLSQLGGDGGEAAAKGGGGSEAAAKGGTVSLQDEHRLFDIPVTTSLPDVWLQDFPQAWAETGGLGRAKCQAPIIIDLKPTAVPVSIKQYPMSLEAHMGIRQHIIKFLELGVLRPCRSPWNTPLLPVKKPGTQDYRPVQDLREINKRTVDIHPTVPNPYNLLSTLKPDYSWYTVLDLKDAFFCLPLAPQSQELFAFEWKDPERGISGQLTWTRLPQGFKNSPTLFNEALHRDLTDFRTQHPEVTLLQYVDDLLLAAPTKKACTQGTRHLLQELGEKGYRASAKKAQICQTKVTYLGYILSEGKRWLTPGRIETVARIPPPRNPREVREFLGKAGFCRLFIPGFAELAAPLYALTKPSTPFTWQTEHQLAFEALKKALLSAPALGLPDTSKPFTLFLDERQGIAKGVLTQKLGPWKRPVAYLSKKLDPVAAGWPPCLRIMAATAMLVKDSAKLTLGQPLTVITPHTLEAIVRQPPDRWITNARLTHYQALLLDTDRVQFGPPVTLNPATLLPVPENQPSPHDCRQVLAETHGTREDLKDQELPDADHTWYTDGSSYLDSGTRRAGAAVVDGHNTIWAQSLPPGTSAQKAELIALTKALELSKGKKANIYTDSRYAFATAHTHGSIYERRGWLTSEGKEIKNKAEIIALLKALFLPQEVAIIHCPGHQKGQDPVAVGNRQADRVARQAAMAEVLTLATEPDNTSHITAGKRTADGSEFEKRTADGSEFESPKKKAKVE

SEQ ID NO: 1948 - protein, 2106 aa, synthetic construct
MPAAKRVKLDGGDKKYSIGLDIGTNSVGWAVITDEYKVPSKKFKVLGNTDRHSIKKNLIGALLFDSGETAEATRLKRTARRRYTRRKNRICYLQEIFSNEMAKVDDSFFHRLEESFLVEEDKKHERHPIFGNIVDEVAYHEKYPTIYHLRKKLVDSTDKADLRLIYLALAHMIKFRGHFLIEGDLNPDNSDVDKLFIQLVQTYNQLFEENPINASGVDAKAILSARLSKSRRLENLIAQLPGEKKNGLFGNLIALSLGLTPNFKSNFDLAEDAKLQLSKDTYDDDLDNLLAQIGDQYADLFLAAKNLSDAILLSDILRVNTEITKAPLSASMIKRYDEHHQDLTLLKALVRQQLPEKYKEIFFDQSKNGYAGYIDGGASQEEFYKFIKPILEKMDGTEELLVKLNREDLLRKQRTFDNGSIPHQIHLGELHAILRRQEDFYPFLKDNREKIEKILTFRIPYYVGPLARGNSRFAWMTRKSEETITPWNFEEVVDKGASAQSFIERMTNFDKNLPNEKVLPKHSLLYEYFTVYNELTKVKYVTEGMRKPAFLSGEQKKAIVDLLFKTNRKVTVKQLKEDYFKKIECFDSVEISGVEDRFNASLGTYHDLLKIIKDKDFLDNEENEDILEDIVLTLTLFEDREMIEERLKTYAHLFDDKVMKQLKRRRYTGWGRLSRKLINGIRDKQSGKTILDFLKSDGFANRNFMQLIHDDSLTFKEDIQKAQVSGQGDSLHEHIANLAGSPAIKKGILQTVKVVDELVKVMGRHKPENIVIEMARENQTTQKGQKNSRERMKRIEEGIKELGSQILKEHPVENTQLQNEKLYLYYLQNGRDMYVDQELDINRLSDYDVDHIVPQSFLKDDSIDNKVLTRSDKARGKSDNVPSEEVVKKMKNYWRQLLNAKLITQRKFDNLTKAERGGLSELDKAGFIKRQLVETRQITKHVAQILDSRMNTKYDENDKLIREVKVITLKSKLVSDFRKDFQFYKVREINNYHHAHDAYLNAVVGTALIKKYPKLESEFVYGDYKVYDVRKMIAKSEQEIGKATAKYFFYSNIMNFFKTEITLANGEIRKRPLIETNGETGEIVWDKGRDFATVRKVLSMPQVNIVKKTEVQTGGFSKESILPKRNSDKLIARKKDWDPKKYGGFDSPTVAYSVLVVAKVEKGKSKKLKSVKELLGITIMERSSFEKNPIDFLEAKGYKEVKKDLIIKLPKYSLFELENGRKRMLASAGELQKGNELALPSKYVNFLYLASHYEKLKGSPEDNEQKQLFVEQHKHYLDEIIEQISEFSKRVILADANLDKVLSAYNKHRDKPIREQAENIIHLFTLTNLGAPAAFKYFDTTIDRKRYTSTKEVLDATLIHQSITGLYETRIDLSQLGGDGGGSSGSSGSSGSSGSSGGTVSLQDEHRLFDIPVTTSLPDVWLQDFPQAWAETGGLGRAKCQAPIIIDLKPTAVPVSIKQYPMSLEAHMGIRQHIIKFLELGVLRPCRSPWNTPLLPVKKPGTQDYRPVQDLREINKRTVDIHPTVPNPYNLLSTLKPDYSWYTVLDLKDAFFCLPLAPQSQELFAFEWKDPERGISGQLTWTRLPQGFKNSPTLFNEALHRDLTDFRTQHPEVTLLQYVDDLLLAAPTKKACTQGTRHLLQELGEKGYRASAKKAQICQTKVTYLGYILSEGKRWLTPGRIETVARIPPPRNPREVREFLGKAGFCRLFIPGFAELAAPLYALTKPSTPFTWQTEHQLAFEALKKALLSAPALGLPDTSKPFTLFLDERQGIAKGVLTQKLGPWKRPVAYLSKKLDPVAAGWPPCLRIMAATAMLVKDSAKLTLGQPLTVITPHTLEAIVRQPPDRWITNARLTHYQALLLDTDRVQFGPPVTLNPATLLPVPENQPSPHDCRQVLAETHGTREDLKDQELPDADHTWYTDGSSYLDSGTRRAGAAVVDGHNTIWAQSLPPGTSAQKAELIALTKALELSKGKKANIYTDSRYAFATAHTHGSIYERRGWLTSEGKEIKNKAEIIALLKALFLPQEVAIIHCPGHQKGQDPVAVGNRQADRVARQAAMAEVLTLATEPDNTSHITAGKRTADGSEFEKRTADGSEFESPKKKAKVE

SEQ ID NO: 1949 - protein, 2106 aa, synthetic construct
MPAAKRVKLDGGDKKYSIGLDIGTNSVGWAVITDEYKVPSKKFKVLGNTDRHSIKKNLIGALLFDSGETAEATRLKRTARRRYTRRKNRICYLQEIFSNEMAKVDDSFFHRLEESFLVEEDKKHERHPIFGNIVDEVAYHEKYPTIYHLRKKLVDSTDKADLRLIYLALAHMIKFRGHFLIEGDLNPDNSDVDKLFIQLVQTYNQLFEENPINASGVDAKAILSARLSKSRRLENLIAQLPGEKKNGLFGNLIALSLGLTPNFKSNFDLAEDAKLQLSKDTYDDDLDNLLAQIGDQYADLFLAAKNLSDAILLSDILRVNTEITKAPLSASMIKRYDEHHQDLTLLKALVRQQLPEKYKEIFFDQSKNGYAGYIDGGASQEEFYKFIKPILEKMDGTEELLVKLNREDLLRKQRTFDNGSIPHQIHLGELHAILRRQEDFYPFLKDNREKIEKILTFRIPYYVGPLARGNSRFAWMTRKSEETITPWNFEEVVDKGASAQSFIERMTNFDKNLPNEKVLPKHSLLYEYFTVYNELTKVKYVTEGMRKPAFLSGEQKKAIVDLLFKTNRKVTVKQLKEDYFKKIECFDSVEISGVEDRFNASLGTYHDLLKIIKDKDFLDNEENEDILEDIVLTLTLFEDREMIEERLKTYAHLFDDKVMKQLKRRRYTGWGRLSRKLINGIRDKQSGKTILDFLKSDGFANRNFMQLIHDDSLTFKEDIQKAQVSGQGDSLHEHIANLAGSPAIKKGILQTVKVVDELVKVMGRHKPENIVIEMARENQTTQKGQKNSRERMKRIEEGIKELGSQILKEHPVENTQLQNEKLYLYYLQNGRDMYVDQELDINRLSDYDVDHIVPQSFLKDDSIDNKVLTRSDKARGKSDNVPSEEVVKKMKNYWRQLLNAKLITQRKFDNLTKAERGGLSELDKAGFIKRQLVETRQITKHVAQILDSRMNTKYDENDKLIREVKVITLKSKLVSDFRKDFQFYKVREINNYHHAHDAYLNAVVGTALIKKYPKLESEFVYGDYKVYDVRKMIAKSEQEIGKATAKYFFYSNIMNFFKTEITLANGEIRKRPLIETNGETGEIVWDKGRDFATVRKVLSMPQVNIVKKTEVQTGGFSKESILPKRNSDKLIARKKDWDPKKYGGFDSPTVAYSVLVVAKVEKGKSKKLKSVKELLGITIMERSSFEKNPIDFLEAKGYKEVKKDLIIKLPKYSLFELENGRKRMLASAGELQKGNELALPSKYVNFLYLASHYEKLKGSPEDNEQKQLFVEQHKHYLDEIIEQISEFSKRVILADANLDKVLSAYNKHRDKPIREQAENIIHLFTLTNLGAPAAFKYFDTTIDRKRYTSTKEVLDATLIHQSITGLYETRIDLSQLGGDGGGGGGSEAAAKGGGGSGGTVSLQDEHRLFDIPVTTSLPDVWLQDFPQAWAETGGLGRAKCQAPIIIDLKPTAVPVSIKQYPMSLEAHMGIRQHIIKFLELGVLRPCRSPWNTPLLPVKKPGTQDYRPVQDLREINKRTVDIHPTVPNPYNLLSTLKPDYSWYTVLDLKDAFFCLPLAPQSQELFAFEWKDPERGISGQLTWTRLPQGFKNSPTLFNEALHRDLTDFRTQHPEVTLLQYVDDLLLAAPTKKACTQGTRHLLQELGEKGYRASAKKAQICQTKVTYLGYILSEGKRWLTPGRIETVARIPPPRNPREVREFLGKAGFCRLFIPGFAELAAPLYALTKPSTPFTWQTEHQLAFEALKKALLSAPALGLPDTSKPFTLFLDERQGIAKGVLTQKLGPWKRPVAYLSKKLDPVAAGWPPCLRIMAATAMLVKDSAKLTLGQPLTVITPHTLEAIVRQPPDRWITNARLTHYQALLLDTDRVQFGPPVTLNPATLLPVPENQPSPHDCRQVLAETHGTREDLKDQELPDADHTWYTDGSSYLDSGTRRAGAAVVDGHNTIWAQSLPPGTSAQKAELIALTKALELSKGKKANIYTDSRYAFATAHTHGSIYERRGWLTSEGKEIKNKAEIIALLKALFLPQEVAIIHCPGHQKGQDPVAVGNRQADRVARQAAMAEVLTLATEPDNTSHITAGKRTADGSEFEKRTADGSEFESPKKKAKVE

SEQ ID NO: 1950 - protein, 2097 aa, synthetic construct
MPAAKRVKLDGGDKKYSIGLDIGTNSVGWAVITDEYKVPSKKFKVLGNTDRHSIKKNLIGALLFDSGETAEATRLKRTARRRYTRRKNRICYLQEIFSNEMAKVDDSFFHRLEESFLVEEDKKHERHPIFGNIVDEVAYHEKYPTIYHLRKKLVDSTDKADLRLIYLALAHMIKFRGHFLIEGDLNPDNSDVDKLFIQLVQTYNQLFEENPINASGVDAKAILSARLSKSRRLENLIAQLPGEKKNGLFGNLIALSLGLTPNFKSNFDLAEDAKLQLSKDTYDDDLDNLLAQIGDQYADLFLAAKNLSDAILLSDILRVNTEITKAPLSASMIKRYDEHHQDLTLLKALVRQQLPEKYKEIFFDQSKNGYAGYIDGGASQEEFYKFIKPILEKMDGTEELLVKLNREDLLRKQRTFDNGSIPHQIHLGELHAILRRQEDFYPFLKDNREKIEKILTFRIPYYVGPLARGNSRFAWMTRKSEETITPWNFEEVVDKGASAQSFIERMTNFDKNLPNEKVLPKHSLLYEYFTVYNELTKVKYVTEGMRKPAFLSGEQKKAIVDLLFKTNRKVTVKQLKEDYFKKIECFDSVEISGVEDRFNASLGTYHDLLKIIKDKDFLDNEENEDILEDIVLTLTLFEDREMIEERLKTYAHLFDDKVMKQLKRRRYTGWGRLSRKLINGIRDKQSGKTILDFLKSDGFANRNFMQLIHDDSLTFKEDIQKAQVSGQGDSLHEHIANLAGSPAIKKGILQTVKVVDELVKVMGRHKPENIVIEMARENQTTQKGQKNSRERMKRIEEGIKELGSQILKEHPVENTQLQNEKLYLYYLQNGRDMYVDQELDINRLSDYDVDHIVPQSFLKDDSIDNKVLTRSDKARGKSDNVPSEEVVKKMKNYWRQLLNAKLITQRKFDNLTKAERGGLSELDKAGFIKRQLVETRQITKHVAQILDSRMNTKYDENDKLIREVKVITLKSKLVSDFRKDFQFYKVREINNYHHAHDAYLNAVVGTALIKKYPKLESEFVYGDYKVYDVRKMIAKSEQEIGKATAKYFFYSNIMNFFKTEITLANGEIRKRPLIETNGETGEIVWDKGRDFATVRKVLSMPQVNIVKKTEVQTGGFSKESILPKRNSDKLIARKKDWDPKKYGGFDSPTVAYSVLVVAKVEKGKSKKLKSVKELLGITIMERSSFEKNPIDFLEAKGYKEVKKDLIIKLPKYSLFELENGRKRMLASAGELQKGNELALPSKYVNFLYLASHYEKLKGSPEDNEQKQLFVEQHKHYLDEIIEQISEFSKRVILADANLDKVLSAYNKHRDKPIREQAENIIHLFTLTNLGAPAAFKYFDTTIDRKRYTSTKEVLDATLIHQSITGLYETRIDLSQLGGDGGGGGGSSGGTVSLQDEHRLFDIPVTTSLPDVWLQDFPQAWAETGGLGRAKCQAPIIIDLKPTAVPVSIKQYPMSLEAHMGIRQHIIKFLELGVLRPCRSPWNTPLLPVKKPGTQDYRPVQDLREINKRTVDIHPTVPNPYNLLSTLKPDYSWYTVLDLKDAFFCLPLAPQSQELFAFEWKDPERGISGQLTWTRLPQGFKNSPTLFNEALHRDLTDFRTQHPEVTLLQYVDDLLLAAPTKKACTQGTRHLLQELGEKGYRASAKKAQICQTKVTYLGYILSEGKRWLTPGRIETVARIPPPRNPREVREFLGKAGFCRLFIPGFAELAAPLYALTKPSTPFTWQTEHQLAFEALKKALLSAPALGLPDTSKPFTLFLDERQGIAKGVLTQKLGPWKRPVAYLSKKLDPVAAGWPPCLRIMAATAMLVKDSAKLTLGQPLTVITPHTLEAIVRQPPDRWITNARLTHYQALLLDTDRVQFGPPVTLNPATLLPVPENQPSPHDCRQVLAETHGTREDLKDQELPDADHTWYTDGSSYLDSGTRRAGAAVVDGHNTIWAQSLPPGTSAQKAELIALTKALELSKGKKANIYTDSRYAFATAHTHGSIYERRGWLTSEGKEIKNKAEIIALLKALFLPQEVAIIHCPGHQKGQDPVAVGNRQADRVARQAAMAEVLTLATEPDNTSHITAGKRTADGSEFEKRTADGSEFESPKKKAKVE

SEQ ID NO: 1951 - protein, 2102 aa, synthetic construct
MPAAKRVKLDGGDKKYSIGLDIGTNSVGWAVITDEYKVPSKKFKVLGNTDRHSIKKNLIGALLFDSGETAEATRLKRTARRRYTRRKNRICYLQEIFSNEMAKVDDSFFHRLEESFLVEEDKKHERHPIFGNIVDEVAYHEKYPTIYHLRKKLVDSTDKADLRLIYLALAHMIKFRGHFLIEGDLNPDNSDVDKLFIQLVQTYNQLFEENPINASGVDAKAILSARLSKSRRLENLIAQLPGEKKNGLFGNLIALSLGLTPNFKSNFDLAEDAKLQLSKDTYDDDLDNLLAQIGDQYADLFLAAKNLSDAILLSDILRVNTEITKAPLSASMIKRYDEHHQDLTLLKALVRQQLPEKYKEIFFDQSKNGYAGYIDGGASQEEFYKFIKPILEKMDGTEELLVKLNREDLLRKQRTFDNGSIPHQIHLGELHAILRRQEDFYPFLKDNREKIEKILTFRIPYYVGPLARGNSRFAWMTRKSEETITPWNFEEVVDKGASAQSFIERMTNFDKNLPNEKVLPKHSLLYEYFTVYNELTKVKYVTEGMRKPAFLSGEQKKAIVDLLFKTNRKVTVKQLKEDYFKKIECFDSVEISGVEDRFNASLGTYHDLLKIIKDKDFLDNEENEDILEDIVLTLTLFEDREMIEERLKTYAHLFDDKVMKQLKRRRYTGWGRLSRKLINGIRDKQSGKTILDFLKSDGFANRNFMQLIHDDSLTFKEDIQKAQVSGQGDSLHEHIANLAGSPAIKKGILQTVKVVDELVKVMGRHKPENIVIEMARENQTTQKGQKNSRERMKRIEEGIKELGSQILKEHPVENTQLQNEKLYLYYLQNGRDMYVDQELDINRLSDYDVDHIVPQSFLKDDSIDNKVLTRSDKARGKSDNVPSEEVVKKMKNYWRQLLNAKLITQRKFDNLTKAERGGLSELDKAGFIKRQLVETRQITKHVAQILDSRMNTKYDENDKLIREVKVITLKSKLVSDFRKDFQFYKVREINNYHHAHDAYLNAVVGTALIKKYPKLESEFVYGDYKVYDVRKMIAKSEQEIGKATAKYFFYSNIMNFFKTEITLANGEIRKRPLIETNGETGEIVWDKGRDFATVRKVLSMPQVNIVKKTEVQTGGFSKESILPKRNSDKLIARKKDWDPKKYGGFDSPTVAYSVLVVAKVEKGKSKKLKSVKELLGITIMERSSFEKNPIDFLEAKGYKEVKKDLIIKLPKYSLFELENGRKRMLASAGELQKGNELALPSKYVNFLYLASHYEKLKGSPEDNEQKQLFVEQHKHYLDEIIEQISEFSKRVILADANLDKVLSAYNKHRDKPIREQAENIIHLFTLTNLGAPAAFKYFDTTIDRKRYTSTKEVLDATLIHQSITGLYETRIDLSQLGGDGGGGSGSSEAAAKGGTVSLQDEHRLFDIPVTTSLPDVWLQDFPQAWAETGGLGRAKCQAPIIIDLKPTAVPVSIKQYPMSLEAHMGIRQHIIKFLELGVLRPCRSPWNTPLLPVKKPGTQDYRPVQDLREINKRTVDIHPTVPNPYNLLSTLKPDYSWYTVLDLKDAFFCLPLAPQSQELFAFEWKDPERGISGQLTWTRLPQGFKNSPTLFNEALHRDLTDFRTQHPEVTLLQYVDDLLLAAPTKKACTQGTRHLLQELGEKGYRASAKKAQICQTKVTYLGYILSEGKRWLTPGRIETVARIPPPRNPREVREFLGKAGFCRLFIPGFAELAAPLYALTKPSTPFTWQTEHQLAFEALKKALLSAPALGLPDTSKPFTLFLDERQGIAKGVLTQKLGPWKRPVAYLSKKLDPVAAGWPPCLRIMAATAMLVKDSAKLTLGQPLTVITPHTLEAIVRQPPDRWITNARLTHYQALLLDTDRVQFGPPVTLNPATLLPVPENQPSPHDCRQVLAETHGTREDLKDQELPDADHTWYTDGSSYLDSGTRRAGAAVVDGHNTIWAQSLPPGTSAQKAELIALTKALELSKGKKANIYTDSRYAFATAHTHGSIYERRGWLTSEGKEIKNKAEIIALLKALFLPQEVAIIHCPGHQKGQDPVAVGNRQADRVARQAAMAEVLTLATEPDNTSHITAGKRTADGSEFEKRTADGSEFESPKKKAKVE

SEQ ID NO: 1952 - protein, 2102 aa, synthetic construct
MPAAKRVKLDGGDKKYSIGLDIGTNSVGWAVITDEYKVPSKKFKVLGNTDRHSIKKNLIGALLFDSGETAEATRLKRTARRRYTRRKNRICYLQEIFSNEMAKVDDSFFHRLEESFLVEEDKKHERHPIFGNIVDEVAYHEKYPTIYHLRKKLVDSTDKADLRLIYLALAHMIKFRGHFLIEGDLNPDNSDVDKLFIQLVQTYNQLFEENPINASGVDAKAILSARLSKSRRLENLIAQLPGEKKNGLFGNLIALSLGLTPNFKSNFDLAEDAKLQLSKDTYDDDLDNLLAQIGDQYADLFLAAKNLSDAILLSDILRVNTEITKAPLSASMIKRYDEHHQDLTLLKALVRQQLPEKYKEIFFDQSKNGYAGYIDGGASQEEFYKFIKPILEKMDGTEELLVKLNREDLLRKQRTFDNGSIPHQIHLGELHAILRRQEDFYPFLKDNREKIEKILTFRIPYYVGPLARGNSRFAWMTRKSEETITPWNFEEVVDKGASAQSFIERMTNFDKNLPNEKVLPKHSLLYEYFTVYNELTKVKYVTEGMRKPAFLSGEQKKAIVDLLFKTNRKVTVKQLKEDYFKKIECFDSVEISGVEDRFNASLGTYHDLLKIIKDKDFLDNEENEDILEDIVLTLTLFEDREMIEERLKTYAHLFDDKVMKQLKRRRYTGWGRLSRKLINGIRDKQSGKTILDFLKSDGFANRNFMQLIHDDSLTFKEDIQKAQVSGQGDSLHEHIANLAGSPAIKKGILQTVKVVDELVKVMGRHKPENIVIEMARENQTTQKGQKNSRERMKRIEEGIKELGSQILKEHPVENTQLQNEKLYLYYLQNGRDMYVDQELDINRLSDYDVDHIVPQSFLKDDSIDNKVLTRSDKARGKSDNVPSEEVVKKMKNYWRQLLNAKLITQRKFDNLTKAERGGLSELDKAGFIKRQLVETRQITKHVAQILDSRMNTKYDENDKLIREVKVITLKSKLVSDFRKDFQFYKVREINNYHHAHDAYLNAVVGTALIKKYPKLESEFVYGDYKVYDVRKMIAKSEQEIGKATAKYFFYSNIMNFFKTEITLANGEIRKRPLIETNGETGEIVWDKGRDFATVRKVLSMPQVNIVKKTEVQTGGFSKESILPKRNSDKLIARKKDWDPKKYGGFDSPTVAYSVLVVAKVEKGKSKKLKSVKELLGITIMERSSFEKNPIDFLEAKGYKEVKKDLIIKLPKYSLFELENGRKRMLASAGELQKGNELALPSKYVNFLYLASHYEKLKGSPEDNEQKQLFVEQHKHYLDEIIEQISEFSKRVILADANLDKVLSAYNKHRDKPIREQAENIIHLFTLTNLGAPAAFKYFDTTIDRKRYTSTKEVLDATLIHQSITGLYETRIDLSQLGGDGGGSSGGGEAAAKGGTVSLQDEHRLFDIPVTTSLPDVWLQDFPQAWAETGGLGRAKCQAPIIIDLKPTAVPVSIKQYPMSLEAHMGIRQHIIKFLELGVLRPCRSPWNTPLLPVKKPGTQDYRPVQDLREINKRTVDIHPTVPNPYNLLSTLKPDYSWYTVLDLKDAFFCLPLAPQSQELFAFEWKDPERGISGQLTWTRLPQGFKNSPTLFNEALHRDLTDFRTQHPEVTLLQYVDDLLLAAPTKKACTQGTRHLLQELGEKGYRASAKKAQICQTKVTYLGYILSEGKRWLTPGRIETVARIPPPRNPREVREFLGKAGFCRLFIPGFAELAAPLYALTKPSTPFTWQTEHQLAFEALKKALLSAPALGLPDTSKPFTLFLDERQGIAKGVLTQKLGPWKRPVAYLSKKLDPVAAGWPPCLRIMAATAMLVKDSAKLTLGQPLTVITPHTLEAIVRQPPDRWITNARLTHYQALLLDTDRVQFGPPVTLNPATLLPVPENQPSPHDCRQVLAETHGTREDLKDQELPDADHTWYTDGSSYLDSGTRRAGAAVVDGHNTIWAQSLPPGTSAQKAELIALTKALELSKGKKANIYTDSRYAFATAHTHGSIYERRGWLTSEGKEIKNKAEIIALLKALFLPQEVAIIHCPGHQKGQDPVAVGNRQADRVARQAAMAEVLTLATEPDNTSHITAGKRTADGSEFEKRTADGSEFESPKKKAKVE

SEQ ID NO: 1953 - protein, 2098 aa, synthetic construct
MPAAKRVKLDGGDKKYSIGLDIGTNSVGWAVITDEYKVPSKKFKVLGNTDRHSIKKNLIGALLFDSGETAEATRLKRTARRRYTRRKNRICYLQEIFSNEMAKVDDSFFHRLEESFLVEEDKKHERHPIFGNIVDEVAYHEKYPTIYHLRKKLVDSTDKADLRLIYLALAHMIKFRGHFLIEGDLNPDNSDVDKLFIQLVQTYNQLFEENPINASGVDAKAILSARLSKSRRLENLIAQLPGEKKNGLFGNLIALSLGLTPNFKSNFDLAEDAKLQLSKDTYDDDLDNLLAQIGDQYADLFLAAKNLSDAILLSDILRVNTEITKAPLSASMIKRYDEHHQDLTLLKALVRQQLPEKYKEIFFDQSKNGYAGYIDGGASQEEFYKFIKPILEKMDGTEELLVKLNREDLLRKQRTFDNGSIPHQIHLGELHAILRRQEDFYPFLKDNREKIEKILTFRIPYYVGPLARGNSRFAWMTRKSEETITPWNFEEVVDKGASAQSFIERMTNFDKNLPNEKVLPKHSLLYEYFTVYNELTKVKYVTEGMRKPAFLSGEQKKAIVDLLFKTNRKVTVKQLKEDYFKKIECFDSVEISGVEDRFNASLGTYHDLLKIIKDKDFLDNEENEDILEDIVLTLTLFEDREMIEERLKTYAHLFDDKVMKQLKRRRYTGWGRLSRKLINGIRDKQSGKTILDFLKSDGFANRNFMQLIHDDSLTFKEDIQKAQVSGQGDSLHEHIANLAGSPAIKKGILQTVKVVDELVKVMGRHKPENIVIEMARENQTTQKGQKNSRERMKRIEEGIKELGSQILKEHPVENTQLQNEKLYLYYLQNGRDMYVDQELDINRLSDYDVDHIVPQSFLKDDSIDNKVLTRSDKARGKSDNVPSEEVVKKMKNYWRQLLNAKLITQRKFDNLTKAERGGLSELDKAGFIKRQLVETRQITKHVAQILDSRMNTKYDENDKLIREVKVITLKSKLVSDFRKDFQFYKVREINNYHHAHDAYLNAVVGTALIKKYPKLESEFVYGDYKVYDVRKMIAKSEQEIGKATAKYFFYSNIMNFFKTEITLANGEIRKRPLIETNGETGEIVWDKGRDFATVRKVLSMPQVNIVKKTEVQTGGFSKESILPKRNSDKLIARKKDWDPKKYGGFDSPTVAYSVLVVAKVEKGKSKKLKSVKELLGITIMERSSFEKNPIDFLEAKGYKEVKKDLIIKLPKYSLFELENGRKRMLASAGELQKGNELALPSKYVNFLYLASHYEKLKGSPEDNEQKQLFVEQHKHYLDEIIEQISEFSKRVILADANLDKVLSAYNKHRDKPIREQAENIIHLFTLTNLGAPAAFKYFDTTIDRKRYTSTKEVLDATLIHQSITGLYETRIDLSQLGGDGGPAPAPAPGGTVSLQDEHRLFDIPVTTSLPDVWLQDFPQAWAETGGLGRAKCQAPIIIDLKPTAVPVSIKQYPMSLEAHMGIRQHIIKFLELGVLRPCRSPWNTPLLPVKKPGTQDYRPVQDLREINKRTVDIHPTVPNPYNLLSTLKPDYSWYTVLDLKDAFFCLPLAPQSQELFAFEWKDPERGISGQLTWTRLPQGFKNSPTLFNEALHRDLTDFRTQHPEVTLLQYVDDLLLAAPTKKACTQGTRHLLQELGEKGYRASAKKAQICQTKVTYLGYILSEGKRWLTPGRIETVARIPPPRNPREVREFLGKAGFCRLFIPGFAELAAPLYALTKPSTPFTWQTEHQLAFEALKKALLSAPALGLPDTSKPFTLFLDERQGIAKGVLTQKLGPWKRPVAYLSKKLDPVAAGWPPCLRIMAATAMLVKDSAKLTLGQPLTVITPHTLEAIVRQPPDRWITNARLTHYQALLLDTDRVQFGPPVTLNPATLLPVPENQPSPHDCRQVLAETHGTREDLKDQELPDADHTWYTDGSSYLDSGTRRAGAAVVDGHNTIWAQSLPPGTSAQKAELIALTKALELSKGKKANIYTDSRYAFATAHTHGSIYERRGWLTSEGKEIKNKAEIIALLKALFLPQEVAIIHCPGHQKGQDPVAVGNRQADRVARQAAMAEVLTLATEPDNTSHITAGKRTADGSEFEKRTADGSEFESPKKKAKVE

SEQ ID NO: 1954 - protein, 2102 aa, synthetic construct
MPAAKRVKLDGGDKKYSIGLDIGTNSVGWAVITDEYKVPSKKFKVLGNTDRHSIKKNLIGALLFDSGETAEATRLKRTARRRYTRRKNRICYLQEIFSNEMAKVDDSFFHRLEESFLVEEDKKHERHPIFGNIVDEVAYHEKYPTIYHLRKKLVDSTDKADLRLIYLALAHMIKFRGHFLIEGDLNPDNSDVDKLFIQLVQTYNQLFEENPINASGVDAKAILSARLSKSRRLENLIAQLPGEKKNGLFGNLIALSLGLTPNFKSNFDLAEDAKLQLSKDTYDDDLDNLLAQIGDQYADLFLAAKNLSDAILLSDILRVNTEITKAPLSASMIKRYDEHHQDLTLLKALVRQQLPEKYKEIFFDQSKNGYAGYIDGGASQEEFYKFIKPILEKMDGTEELLVKLNREDLLRKQRTFDNGSIPHQIHLGELHAILRRQEDFYPFLKDNREKIEKILTFRIPYYVGPLARGNSRFAWMTRKSEETITPWNFEEVVDKGASAQSFIERMTNFDKNLPNEKVLPKHSLLYEYFTVYNELTKVKYVTEGMRKPAFLSGEQKKAIVDLLFKTNRKVTVKQLKEDYFKKIECFDSVEISGVEDRFNASLGTYHDLLKIIKDKDFLDNEENEDILEDIVLTLTLFEDREMIEERLKTYAHLFDDKVMKQLKRRRYTGWGRLSRKLINGIRDKQSGKTILDFLKSDGFANRNFMQLIHDDSLTFKEDIQKAQVSGQGDSLHEHIANLAGSPAIKKGILQTVKVVDELVKVMGRHKPENIVIEMARENQTTQKGQKNSRERMKRIEEGIKELGSQILKEHPVENTQLQNEKLYLYYLQNGRDMYVDQELDINRLSDYDVDHIVPQSFLKDDSIDNKVLTRSDKARGKSDNVPSEEVVKKMKNYWRQLLNAKLITQRKFDNLTKAERGGLSELDKAGFIKRQLVETRQITKHVAQILDSRMNTKYDENDKLIREVKVITLKSKLVSDFRKDFQFYKVREINNYHHAHDAYLNAVVGTALIKKYPKLESEFVYGDYKVYDVRKMIAKSEQEIGKATAKYFFYSNIMNFFKTEITLANGEIRKRPLIETNGETGEIVWDKGRDFATVRKVLSMPQVNIVKKTEVQTGGFSKESILPKRNSDKLIARKKDWDPKKYGGFDSPTVAYSVLVVAKVEKGKSKKLKSVKELLGITIMERSSFEKNPIDFLEAKGYKEVKKDLIIKLPKYSLFELENGRKRMLASAGELQKGNELALPSKYVNFLYLASHYEKLKGSPEDNEQKQLFVEQHKHYLDEIIEQISEFSKRVILADANLDKVLSAYNKHRDKPIREQAENIIHLFTLTNLGAPAAFKYFDTTIDRKRYTSTKEVLDATLIHQSITGLYETRIDLSQLGGDGGGGSPAPEAAAKGGTVSLQDEHRLFDIPVTTSLPDVWLQDFPQAWAETGGLGRAKCQAPIIIDLKPTAVPVSIKQYPMSLEAHMGIRQHIIKFLELGVLRPCRSPWNTPLLPVKKPGTQDYRPVQDLREINKRTVDIHPTVPNPYNLLSTLKPDYSWYTVLDLKDAFFCLPLAPQSQELFAFEWKDPERGISGQLTWTRLPQGFKNSPTLFNEALHRDLTDFRTQHPEVTLLQYVDDLLLAAPTKKACTQGTRHLLQELGEKGYRASAKKAQICQTKVTYLGYILSEGKRWLTPGRIETVARIPPPRNPREVREFLGKAGFCRLFIPGFAELAAPLYALTKPSTPFTWQTEHQLAFEALKKALLSAPALGLPDTSKPFTLFLDERQGIAKGVLTQKLGPWKRPVAYLSKKLDPVAAGWPPCLRIMAATAMLVKDSAKLTLGQPLTVITPHTLEAIVRQPPDRWITNARLTHYQALLLDTDRVQFGPPVTLNPATLLPVPENQPSPHDCRQVLAETHGTREDLKDQELPDADHTWYTDGSSYLDSGTRRAGAAVVDGHNTIWAQSLPPGTSAQKAELIALTKALELSKGKKANIYTDSRYAFATAHTHGSIYERRGWLTSEGKEIKNKAEIIALLKALFLPQEVAIIHCPGHQKGQDPVAVGNRQADRVARQAAMAEVLTLATEPDNTSHITAGKRTADGSEFEKRTADGSEFESPKKKAKVE

SEQ ID NO: 1955 - protein, 2103 aa, synthetic construct
MPAAKRVKLDGGDKKYSIGLDIGTNSVGWAVITDEYKVPSKKFKVLGNTDRHSIKKNLIGALLFDSGETAEATRLKRTARRRYTRRKNRICYLQEIFSNEMAKVDDSFFHRLEESFLVEEDKKHERHPIFGNIVDEVAYHEKYPTIYHLRKKLVDSTDKADLRLIYLALAHMIKFRGHFLIEGDLNPDNSDVDKLFIQLVQTYNQLFEENPINASGVDAKAILSARLSKSRRLENLIAQLPGEKKNGLFGNLIALSLGLTPNFKSNFDLAEDAKLQLSKDTYDDDLDNLLAQIGDQYADLFLAAKNLSDAILLSDILRVNTEITKAPLSASMIKRYDEHHQDLTLLKALVRQQLPEKYKEIFFDQSKNGYAGYIDGGASQEEFYKFIKPILEKMDGTEELLVKLNREDLLRKQRTFDNGSIPHQIHLGELHAILRRQEDFYPFLKDNREKIEKILTFRIPYYVGPLARGNSRFAWMTRKSEETITPWNFEEVVDKGASAQSFIERMTNFDKNLPNEKVLPKHSLLYEYFTVYNELTKVKYVTEGMRKPAFLSGEQKKAIVDLLFKTNRKVTVKQLKEDYFKKIECFDSVEISGVEDRFNASLGTYHDLLKIIKDKDFLDNEENEDILEDIVLTLTLFEDREMIEERLKTYAHLFDDKVMKQLKRRRYTGWGRLSRKLINGIRDKQSGKTILDFLKSDGFANRNFMQLIHDDSLTFKEDIQKAQVSGQGDSLHEHIANLAGSPAIKKGILQTVKVVDELVKVMGRHKPENIVIEMARENQTTQKGQKNSRERMKRIEEGIKELGSQILKEHPVENTQLQNEKLYLYYLQNGRDMYVDQELDINRLSDYDVDHIVPQSFLKDDSIDNKVLTRSDKARGKSDNVPSEEVVKKMKNYWRQLLNAKLITQRKFDNLTKAERGGLSELDKAGFIKRQLVETRQITKHVAQILDSRMNTKYDENDKLIREVKVITLKSKLVSDFRKDFQFYKVREINNYHHAHDAYLNAVVGTALIKKYPKLESEFVYGDYKVYDVRKMIAKSEQEIGKATAKYFFYSNIMNFFKTEITLANGEIRKRPLIETNGETGEIVWDKGRDFATVRKVLSMPQVNIVKKTEVQTGGFSKESILPKRNSDKLIARKKDWDPKKYGGFDSPTVAYSVLVVAKVEKGKSKKLKSVKELLGITIMERSSFEKNPIDFLEAKGYKEVKKDLIIKLPKYSLFELENGRKRMLASAGELQKGNELALPSKYVNFLYLASHYEKLKGSPEDNEQKQLFVEQHKHYLDEIIEQISEFSKRVILADANLDKVLSAYNKHRDKPIREQAENIIHLFTLTNLGAPAAFKYFDTTIDRKRYTSTKEVLDATLIHQSITGLYETRIDLSQLGGDGGGGSGGSGGSGGSGGTVSLQDEHRLFDIPVTTSLPDVWLQDFPQAWAETGGLGRAKCQAPIIIDLKPTAVPVSIKQYPMSLEAHMGIRQHIIKFLELGVLRPCRSPWNTPLLPVKKPGTQDYRPVQDLREINKRTVDIHPTVPNPYNLLSTLKPDYSWYTVLDLKDAFFCLPLAPQSQELFAFEWKDPERGISGQLTWTRLPQGFKNSPTLFNEALHRDLTDFRTQHPEVTLLQYVDDLLLAAPTKKACTQGTRHLLQELGEKGYRASAKKAQICQTKVTYLGYILSEGKRWLTPGRIETVARIPPPRNPREVREFLGKAGFCRLFIPGFAELAAPLYALTKPSTPFTWQTEHQLAFEALKKALLSAPALGLPDTSKPFTLFLDERQGIAKGVLTQKLGPWKRPVAYLSKKLDPVAAGWPPCLRIMAATAMLVKDSAKLTLGQPLTVITPHTLEAIVRQPPDRWITNARLTHYQALLLDTDRVQFGPPVTLNPATLLPVPENQPSPHDCRQVLAETHGTREDLKDQELPDADHTWYTDGSSYLDSGTRRAGAAVVDGHNTIWAQSLPPGTSAQKAELIALTKALELSKGKKANIYTDSRYAFATAHTHGSIYERRGWLTSEGKEIKNKAEIIALLKALFLPQEVAIIHCPGHQKGQDPVAVGNRQADRVARQAAMAEVLTLATEPDNTSHITAGKRTADGSEFEKRTADGSEFESPKKKAKVE

SEQ ID NO: 1956 - protein, 2097 aa, synthetic construct
MPAAKRVKLDGGDKKYSIGLDIGTNSVGWAVITDEYKVPSKKFKVLGNTDRHSIKKNLIGALLFDSGETAEATRLKRTARRRYTRRKNRICYLQEIFSNEMAKVDDSFFHRLEESFLVEEDKKHERHPIFGNIVDEVAYHEKYPTIYHLRKKLVDSTDKADLRLIYLALAHMIKFRGHFLIEGDLNPDNSDVDKLFIQLVQTYNQLFEENPINASGVDAKAILSARLSKSRRLENLIAQLPGEKKNGLFGNLIALSLGLTPNFKSNFDLAEDAKLQLSKDTYDDDLDNLLAQIGDQYADLFLAAKNLSDAILLSDILRVNTEITKAPLSASMIKRYDEHHQDLTLLKALVRQQLPEKYKEIFFDQSKNGYAGYIDGGASQEEFYKFIKPILEKMDGTEELLVKLNREDLLRKQRTFDNGSIPHQIHLGELHAILRRQEDFYPFLKDNREKIEKILTFRIPYYVGPLARGNSRFAWMTRKSEETITPWNFEEVVDKGASAQSFIERMTNFDKNLPNEKVLPKHSLLYEYFTVYNELTKVKYVTEGMRKPAFLSGEQKKAIVDLLFKTNRKVTVKQLKEDYFKKIECFDSVEISGVEDRFNASLGTYHDLLKIIKDKDFLDNEENEDILEDIVLTLTLFEDREMIEERLKTYAHLFDDKVMKQLKRRRYTGWGRLSRKLINGIRDKQSGKTILDFLKSDGFANRNFMQLIHDDSLTFKEDIQKAQVSGQGDSLHEHIANLAGSPAIKKGILQTVKVVDELVKVMGRHKPENIVIEMARENQTTQKGQKNSRERMKRIEEGIKELGSQILKEHPVENTQLQNEKLYLYYLQNGRDMYVDQELDINRLSDYDVDHIVPQSFLKDDSIDNKVLTRSDKARGKSDNVPSEEVVKKMKNYWRQLLNAKLITQRKFDNLTKAERGGLSELDKAGFIKRQLVETRQITKHVAQILDSRMNTKYDENDKLIREVKVITLKSKLVSDFRKDFQFYKVREINNYHHAHDAYLNAVVGTALIKKYPKLESEFVYGDYKVYDVRKMIAKSEQEIGKATAKYFFYSNIMNFFKTEITLANGEIRKRPLIETNGETGEIVWDKGRDFATVRKVLSMPQVNIVKKTEVQTGGFSKESILPKRNSDKLIARKKDWDPKKYGGFDSPTVAYSVLVVAKVEKGKSKKLKSVKELLGITIMERSSFEKNPIDFLEAKGYKEVKKDLIIKLPKYSLFELENGRKRMLASAGELQKGNELALPSKYVNFLYLASHYEKLKGSPEDNEQKQLFVEQHKHYLDEIIEQISEFSKRVILADANLDKVLSAYNKHRDKPIREQAENIIHLFTLTNLGAPAAFKYFDTTIDRKRYTSTKEVLDATLIHQSITGLYETRIDLSQLGGDGGGGGGGGGGTVSLQDEHRLFDIPVTTSLPDVWLQDFPQAWAETGGLGRAKCQAPIIIDLKPTAVPVSIKQYPMSLEAHMGIRQHIIKFLELGVLRPCRSPWNTPLLPVKKPGTQDYRPVQDLREINKRTVDIHPTVPNPYNLLSTLKPDYSWYTVLDLKDAFFCLPLAPQSQELFAFEWKDPERGISGQLTWTRLPQGFKNSPTLFNEALHRDLTDFRTQHPEVTLLQYVDDLLLAAPTKKACTQGTRHLLQELGEKGYRASAKKAQICQTKVTYLGYILSEGKRWLTPGRIETVARIPPPRNPREVREFLGKAGFCRLFIPGFAELAAPLYALTKPSTPFTWQTEHQLAFEALKKALLSAPALGLPDTSKPFTLFLDERQGIAKGVLTQKLGPWKRPVAYLSKKLDPVAAGWPPCLRIMAATAMLVKDSAKLTLGQPLTVITPHTLEAIVRQPPDRWITNARLTHYQALLLDTDRVQFGPPVTLNPATLLPVPENQPSPHDCRQVLAETHGTREDLKDQELPDADHTWYTDGSSYLDSGTRRAGAAVVDGHNTIWAQSLPPGTSAQKAELIALTKALELSKGKKANIYTDSRYAFATAHTHGSIYERRGWLTSEGKEIKNKAEIIALLKALFLPQEVAIIHCPGHQKGQDPVAVGNRQADRVARQAAMAEVLTLATEPDNTSHITAGKRTADGSEFEKRTADGSEFESPKKKAKVE

SEQ ID NO: 1957 - protein, 2109 aa, synthetic construct
MPAAKRVKLDGGDKKYSIGLDIGTNSVGWAVITDEYKVPSKKFKVLGNTDRHSIKKNLIGALLFDSGETAEATRLKRTARRRYTRRKNRICYLQEIFSNEMAKVDDSFFHRLEESFLVEEDKKHERHPIFGNIVDEVAYHEKYPTIYHLRKKLVDSTDKADLRLIYLALAHMIKFRGHFLIEGDLNPDNSDVDKLFIQLVQTYNQLFEENPINASGVDAKAILSARLSKSRRLENLIAQLPGEKKNGLFGNLIALSLGLTPNFKSNFDLAEDAKLQLSKDTYDDDLDNLLAQIGDQYADLFLAAKNLSDAILLSDILRVNTEITKAPLSASMIKRYDEHHQDLTLLKALVRQQLPEKYKEIFFDQSKNGYAGYIDGGASQEEFYKFIKPILEKMDGTEELLVKLNREDLLRKQRTFDNGSIPHQIHLGELHAILRRQEDFYPFLKDNREKIEKILTFRIPYYVGPLARGNSRFAWMTRKSEETITPWNFEEVVDKGASAQSFIERMTNFDKNLPNEKVLPKHSLLYEYFTVYNELTKVKYVTEGMRKPAFLSGEQKKAIVDLLFKTNRKVTVKQLKEDYFKKIECFDSVEISGVEDRFNASLGTYHDLLKIIKDKDFLDNEENEDILEDIVLTLTLFEDREMIEERLKTYAHLFDDKVMKQLKRRRYTGWGRLSRKLINGIRDKQSGKTILDFLKSDGFANRNFMQLIHDDSLTFKEDIQKAQVSGQGDSLHEHIANLAGSPAIKKGILQTVKVVDELVKVMGRHKPENIVIEMARENQTTQKGQKNSRERMKRIEEGIKELGSQILKEHPVENTQLQNEKLYLYYLQNGRDMYVDQELDINRLSDYDVDHIVPQSFLKDDSIDNKVLTRSDKARGKSDNVPSEEVVKKMKNYWRQLLNAKLITQRKFDNLTKAERGGLSELDKAGFIKRQLVETRQITKHVAQILDSRMNTKYDENDKLIREVKVITLKSKLVSDFRKDFQFYKVREINNYHHAHDAYLNAVVGTALIKKYPKLESEFVYGDYKVYDVRKMIAKSEQEIGKATAKYFFYSNIMNFFKTEITLANGEIRKRPLIETNGETGEIVWDKGRDFATVRKVLSMPQVNIVKKTEVQTGGFSKESILPKRNSDKLIARKKDWDPKKYGGFDSPTVAYSVLVVAKVEKGKSKKLKSVKELLGITIMERSSFEKNPIDFLEAKGYKEVKKDLIIKLPKYSLFELENGRKRMLASAGELQKGNELALPSKYVNFLYLASHYEKLKGSPEDNEQKQLFVEQHKHYLDEIIEQISEFSKRVILADANLDKVLSAYNKHRDKPIREQAENIIHLFTLTNLGAPAAFKYFDTTIDRKRYTSTKEVLDATLIHQSITGLYETRIDLSQLGGDGGGGSGGSGGSGGSGGSGGSGGTVSLQDEHRLFDIPVTTSLPDVWLQDFPQAWAETGGLGRAKCQAPIIIDLKPTAVPVSIKQYPMSLEAHMGIRQHIIKFLELGVLRPCRSPWNTPLLPVKKPGTQDYRPVQDLREINKRTVDIHPTVPNPYNLLSTLKPDYSWYTVLDLKDAFFCLPLAPQSQELFAFEWKDPERGISGQLTWTRLPQGFKNSPTLFNEALHRDLTDFRTQHPEVTLLQYVDDLLLAAPTKKACTQGTRHLLQELGEKGYRASAKKAQICQTKVTYLGYILSEGKRWLTPGRIETVARIPPPRNPREVREFLGKAGFCRLFIPGFAELAAPLYALTKPSTPFTWQTEHQLAFEALKKALLSAPALGLPDTSKPFTLFLDERQGIAKGVLTQKLGPWKRPVAYLSKKLDPVAAGWPPCLRIMAATAMLVKDSAKLTLGQPLTVITPHTLEAIVRQPPDRWITNARLTHYQALLLDTDRVQFGPPVTLNPATLLPVPENQPSPHDCRQVLAETHGTREDLKDQELPDADHTWYTDGSSYLDSGTRRAGAAVVDGHNTIWAQSLPPGTSAQKAELIALTKALELSKGKKANIYTDSRYAFATAHTHGSIYERRGWLTSEGKEIKNKAEIIALLKALFLPQEVAIIHCPGHQKGQDPVAVGNRQADRVARQAAMAEVLTLATEPDNTSHITAGKRTADGSEFEKRTADGSEFESPKKKAKVE

SEQ ID NO: 1958 - protein, 2100 aa, synthetic construct
MPAAKRVKLDGGDKKYSIGLDIGTNSVGWAVITDEYKVPSKKFKVLGNTDRHSIKKNLIGALLFDSGETAEATRLKRTARRRYTRRKNRICYLQEIFSNEMAKVDDSFFHRLEESFLVEEDKKHERHPIFGNIVDEVAYHEKYPTIYHLRKKLVDSTDKADLRLIYLALAHMIKFRGHFLIEGDLNPDNSDVDKLFIQLVQTYNQLFEENPINASGVDAKAILSARLSKSRRLENLIAQLPGEKKNGLFGNLIALSLGLTPNFKSNFDLAEDAKLQLSKDTYDDDLDNLLAQIGDQYADLFLAAKNLSDAILLSDILRVNTEITKAPLSASMIKRYDEHHQDLTLLKALVRQQLPEKYKEIFFDQSKNGYAGYIDGGASQEEFYKFIKPILEKMDGTEELLVKLNREDLLRKQRTFDNGSIPHQIHLGELHAILRRQEDFYPFLKDNREKIEKILTFRIPYYVGPLARGNSRFAWMTRKSEETITPWNFEEVVDKGASAQSFIERMTNFDKNLPNEKVLPKHSLLYEYFTVYNELTKVKYVTEGMRKPAFLSGEQKKAIVDLLFKTNRKVTVKQLKEDYFKKIECFDSVEISGVEDRFNASLGTYHDLLKIIKDKDFLDNEENEDILEDIVLTLTLFEDREMIEERLKTYAHLFDDKVMKQLKRRRYTGWGRLSRKLINGIRDKQSGKTILDFLKSDGFANRNFMQLIHDDSLTFKEDIQKAQVSGQGDSLHEHIANLAGSPAIKKGILQTVKVVDELVKVMGRHKPENIVIEMARENQTTQKGQKNSRERMKRIEEGIKELGSQILKEHPVENTQLQNEKLYLYYLQNGRDMYVDQELDINRLSDYDVDHIVPQSFLKDDSIDNKVLTRSDKARGKSDNVPSEEVVKKMKNYWRQLLNAKLITQRKFDNLTKAERGGLSELDKAGFIKRQLVETRQITKHVAQILDSRMNTKYDENDKLIREVKVITLKSKLVSDFRKDFQFYKVREINNYHHAHDAYLNAVVGTALIKKYPKLESEFVYGDYKVYDVRKMIAKSEQEIGKATAKYFFYSNIMNFFKTEITLANGEIRKRPLIETNGETGEIVWDKGRDFATVRKVLSMPQVNIVKKTEVQTGGFSKESILPKRNSDKLIARKKDWDPKKYGGFDSPTVAYSVLVVAKVEKGKSKKLKSVKELLGITIMERSSFEKNPIDFLEAKGYKEVKKDLIIKLPKYSLFELENGRKRMLASAGELQKGNELALPSKYVNFLYLASHYEKLKGSPEDNEQKQLFVEQHKHYLDEIIEQISEFSKRVILADANLDKVLSAYNKHRDKPIREQAENIIHLFTLTNLGAPAAFKYFDTTIDRKRYTSTKEVLDATLIHQSITGLYETRIDLSQLGGDGGGGSGSSPAPGGTVSLQDEHRLFDIPVTTSLPDVWLQDFPQAWAETGGLGRAKCQAPIIIDLKPTAVPVSIKQYPMSLEAHMGIRQHIIKFLELGVLRPCRSPWNTPLLPVKKPGTQDYRPVQDLREINKRTVDIHPTVPNPYNLLSTLKPDYSWYTVLDLKDAFFCLPLAPQSQELFAFEWKDPERGISGQLTWTRLPQGFKNSPTLFNEALHRDLTDFRTQHPEVTLLQYVDDLLLAAPTKKACTQGTRHLLQELGEKGYRASAKKAQICQTKVTYLGYILSEGKRWLTPGRIETVARIPPPRNPREVREFLGKAGFCRLFIPGFAELAAPLYALTKPSTPFTWQTEHQLAFEALKKALLSAPALGLPDTSKPFTLFLDERQGIAKGVLTQKLGPWKRPVAYLSKKLDPVAAGWPPCLRIMAATAMLVKDSAKLTLGQPLTVITPHTLEAIVRQPPDRWITNARLTHYQALLLDTDRVQFGPPVTLNPATLLPVPENQPSPHDCRQVLAETHGTREDLKDQELPDADHTWYTDGSSYLDSGTRRAGAAVVDGHNTIWAQSLPPGTSAQKAELIALTKALELSKGKKANIYTDSRYAFATAHTHGSIYERRGWLTSEGKEIKNKAEIIALLKALFLPQEVAIIHCPGHQKGQDPVAVGNRQADRVARQAAMAEVLTLATEPDNTSHITAGKRTADGSEFEKRTADGSEFESPKKKAKVE

SEQ ID NO: 1959 - protein, 2102 aa, synthetic construct
MPAAKRVKLDGGDKKYSIGLDIGTNSVGWAVITDEYKVPSKKFKVLGNTDRHSIKKNLIGALLFDSGETAEATRLKRTARRRYTRRKNRICYLQEIFSNEMAKVDDSFFHRLEESFLVEEDKKHERHPIFGNIVDEVAYHEKYPTIYHLRKKLVDSTDKADLRLIYLALAHMIKFRGHFLIEGDLNPDNSDVDKLFIQLVQTYNQLFEENPINASGVDAKAILSARLSKSRRLENLIAQLPGEKKNGLFGNLIALSLGLTPNFKSNFDLAEDAKLQLSKDTYDDDLDNLLAQIGDQYADLFLAAKNLSDAILLSDILRVNTEITKAPLSASMIKRYDEHHQDLTLLKALVRQQLPEKYKEIFFDQSKNGYAGYIDGGASQEEFYKFIKPILEKMDGTEELLVKLNREDLLRKQRTFDNGSIPHQIHLGELHAILRRQEDFYPFLKDNREKIEKILTFRIPYYVGPLARGNSRFAWMTRKSEETITPWNFEEVVDKGASAQSFIERMTNFDKNLPNEKVLPKHSLLYEYFTVYNELTKVKYVTEGMRKPAFLSGEQKKAIVDLLFKTNRKVTVKQLKEDYFKKIECFDSVEISGVEDRFNASLGTYHDLLKIIKDKDFLDNEENEDILEDIVLTLTLFEDREMIEERLKTYAHLFDDKVMKQLKRRRYTGWGRLSRKLINGIRDKQSGKTILDFLKSDGFANRNFMQLIHDDSLTFKEDIQKAQVSGQGDSLHEHIANLAGSPAIKKGILQTVKVVDELVKVMGRHKPENIVIEMARENQTTQKGQKNSRERMKRIEEGIKELGSQILKEHPVENTQLQNEKLYLYYLQNGRDMYVDQELDINRLSDYDVDHIVPQSFLKDDSIDNKVLTRSDKARGKSDNVPSEEVVKKMKNYWRQLLNAKLITQRKFDNLTKAERGGLSELDKAGFIKRQLVETRQITKHVAQILDSRMNTKYDENDKLIREVKVITLKSKLVSDFRKDFQFYKVREINNYHHAHDAYLNAVVGTALIKKYPKLESEFVYGDYKVYDVRKMIAKSEQEIGKATAKYFFYSNIMNFFKTEITLANGEIRKRPLIETNGETGEIVWDKGRDFATVRKVLSMPQVNIVKKTEVQTGGFSKESILPKRNSDKLIARKKDWDPKKYGGFDSPTVAYSVLVVAKVEKGKSKKLKSVKELLGITIMERSSFEKNPIDFLEAKGYKEVKKDLIIKLPKYSLFELENGRKRMLASAGELQKGNELALPSKYVNFLYLASHYEKLKGSPEDNEQKQLFVEQHKHYLDEIIEQISEFSKRVILADANLDKVLSAYNKHRDKPIREQAENIIHLFTLTNLGAPAAFKYFDTTIDRKRYTSTKEVLDATLIHQSITGLYETRIDLSQLGGDGGGSSEAAAKGGSGGTVSLQDEHRLFDIPVTTSLPDVWLQDFPQAWAETGGLGRAKCQAPIIIDLKPTAVPVSIKQYPMSLEAHMGIRQHIIKFLELGVLRPCRSPWNTPLLPVKKPGTQDYRPVQDLREINKRTVDIHPTVPNPYNLLSTLKPDYSWYTVLDLKDAFFCLPLAPQSQELFAFEWKDPERGISGQLTWTRLPQGFKNSPTLFNEALHRDLTDFRTQHPEVTLLQYVDDLLLAAPTKKACTQGTRHLLQELGEKGYRASAKKAQICQTKVTYLGYILSEGKRWLTPGRIETVARIPPPRNPREVREFLGKAGFCRLFIPGFAELAAPLYALTKPSTPFTWQTEHQLAFEALKKALLSAPALGLPDTSKPFTLFLDERQGIAKGVLTQKLGPWKRPVAYLSKKLDPVAAGWPPCLRIMAATAMLVKDSAKLTLGQPLTVITPHTLEAIVRQPPDRWITNARLTHYQALLLDTDRVQFGPPVTLNPATLLPVPENQPSPHDCRQVLAETHGTREDLKDQELPDADHTWYTDGSSYLDSGTRRAGAAVVDGHNTIWAQSLPPGTSAQKAELIALTKALELSKGKKANIYTDSRYAFATAHTHGSIYERRGWLTSEGKEIKNKAEIIALLKALFLPQEVAIIHCPGHQKGQDPVAVGNRQADRVARQAAMAEVLTLATEPDNTSHITAGKRTADGSEFEKRTADGSEFESPKKKAKVE

SEQ ID NO: 1960 - protein, 2099 aa, synthetic construct
MPAAKRVKLDGGDKKYSIGLDIGTNSVGWAVITDEYKVPSKKFKVLGNTDRHSIKKNLIGALLFDSGETAEATRLKRTARRRYTRRKNRICYLQEIFSNEMAKVDDSFFHRLEESFLVEEDKKHERHPIFGNIVDEVAYHEKYPTIYHLRKKLVDSTDKADLRLIYLALAHMIKFRGHFLIEGDLNPDNSDVDKLFIQLVQTYNQLFEENPINASGVDAKAILSARLSKSRRLENLIAQLPGEKKNGLFGNLIALSLGLTPNFKSNFDLAEDAKLQLSKDTYDDDLDNLLAQIGDQYADLFLAAKNLSDAILLSDILRVNTEITKAPLSASMIKRYDEHHQDLTLLKALVRQQLPEKYKEIFFDQSKNGYAGYIDGGASQEEFYKFIKPILEKMDGTEELLVKLNREDLLRKQRTFDNGSIPHQIHLGELHAILRRQEDFYPFLKDNREKIEKILTFRIPYYVGPLARGNSRFAWMTRKSEETITPWNFEEVVDKGASAQSFIERMTNFDKNLPNEKVLPKHSLLYEYFTVYNELTKVKYVTEGMRKPAFLSGEQKKAIVDLLFKTNRKVTVKQLKEDYFKKIECFDSVEISGVEDRFNASLGTYHDLLKIIKDKDFLDNEENEDILEDIVLTLTLFEDREMIEERLKTYAHLFDDKVMKQLKRRRYTGWGRLSRKLINGIRDKQSGKTILDFLKSDGFANRNFMQLIHDDSLTFKEDIQKAQVSGQGDSLHEHIANLAGSPAIKKGILQTVKVVDELVKVMGRHKPENIVIEMARENQTTQKGQKNSRERMKRIEEGIKELGSQILKEHPVENTQLQNEKLYLYYLQNGRDMYVDQELDINRLSDYDVDHIVPQSFLKDDSIDNKVLTRSDKARGKSDNVPSEEVVKKMKNYWRQLLNAKLITQRKFDNLTKAERGGLSELDKAGFIKRQLVETRQITKHVAQILDSRMNTKYDENDKLIREVKVITLKSKLVSDFRKDFQFYKVREINNYHHAHDAYLNAVVGTALIKKYPKLESEFVYGDYKVYDVRKMIAKSEQEIGKATAKYFFYSNIMNFFKTEITLANGEIRKRPLIETNGETGEIVWDKGRDFATVRKVLSMPQVNIVKKTEVQTGGFSKESILPKRNSDKLIARKKDWDPKKYGGFDSPTVAYSVLVVAKVEKGKSKKLKSVKELLGITIMERSSFEKNPIDFLEAKGYKEVKKDLIIKLPKYSLFELENGRKRMLASAGELQKGNELALPSKYVNFLYLASHYEKLKGSPEDNEQKQLFVEQHKHYLDEIIEQISEFSKRVILADANLDKVLSAYNKHRDKPIREQAENIIHLFTLTNLGAPAAFKYFDTTIDRKRYTSTKEVLDATLIHQSITGLYETRIDLSQLGGDGGEAAAKPAPGGTVSLQDEHRLFDIPVTTSLPDVWLQDFPQAWAETGGLGRAKCQAPIIIDLKPTAVPVSIKQYPMSLEAHMGIRQHIIKFLELGVLRPCRSPWNTPLLPVKKPGTQDYRPVQDLREINKRTVDIHPTVPNPYNLLSTLKPDYSWYTVLDLKDAFFCLPLAPQSQELFAFEWKDPERGISGQLTWTRLPQGFKNSPTLFNEALHRDLTDFRTQHPEVTLLQYVDDLLLAAPTKKACTQGTRHLLQELGEKGYRASAKKAQICQTKVTYLGYILSEGKRWLTPGRIETVARIPPPRNPREVREFLGKAGFCRLFIPGFAELAAPLYALTKPSTPFTWQTEHQLAFEALKKALLSAPALGLPDTSKPFTLFLDERQGIAKGVLTQKLGPWKRPVAYLSKKLDPVAAGWPPCLRIMAATAMLVKDSAKLTLGQPLTVITPHTLEAIVRQPPDRWITNARLTHYQALLLDTDRVQFGPPVTLNPATLLPVPENQPSPHDCRQVLAETHGTREDLKDQELPDADHTWYTDGSSYLDSGTRRAGAAVVDGHNTIWAQSLPPGTSAQKAELIALTKALELSKGKKANIYTDSRYAFATAHTHGSIYERRGWLTSEGKEIKNKAEIIALLKALFLPQEVAIIHCPGHQKGQDPVAVGNRQADRVARQAAMAEVLTLATEPDNTSHITAGKRTADGSEFEKRTADGSEFESPKKKAKVE

SEQ ID NO: 1961 - protein, 2100 aa, synthetic construct
MPAAKRVKLDGGDKKYSIGLDIGTNSVGWAVITDEYKVPSKKFKVLGNTDRHSIKKNLIGALLFDSGETAEATRLKRTARRRYTRRKNRICYLQEIFSNEMAKVDDSFFHRLEESFLVEEDKKHERHPIFGNIVDEVAYHEKYPTIYHLRKKLVDSTDKADLRLIYLALAHMIKFRGHFLIEGDLNPDNSDVDKLFIQLVQTYNQLFEENPINASGVDAKAILSARLSKSRRLENLIAQLPGEKKNGLFGNLIALSLGLTPNFKSNFDLAEDAKLQLSKDTYDDDLDNLLAQIGDQYADLFLAAKNLSDAILLSDILRVNTEITKAPLSASMIKRYDEHHQDLTLLKALVRQQLPEKYKEIFFDQSKNGYAGYIDGGASQEEFYKFIKPILEKMDGTEELLVKLNREDLLRKQRTFDNGSIPHQIHLGELHAILRRQEDFYPFLKDNREKIEKILTFRIPYYVGPLARGNSRFAWMTRKSEETITPWNFEEVVDKGASAQSFIERMTNFDKNLPNEKVLPKHSLLYEYFTVYNELTKVKYVTEGMRKPAFLSGEQKKAIVDLLFKTNRKVTVKQLKEDYFKKIECFDSVEISGVEDRFNASLGTYHDLLKIIKDKDFLDNEENEDILEDIVLTLTLFEDREMIEERLKTYAHLFDDKVMKQLKRRRYTGWGRLSRKLINGIRDKQSGKTILDFLKSDGFANRNFMQLIHDDSLTFKEDIQKAQVSGQGDSLHEHIANLAGSPAIKKGILQTVKVVDELVKVMGRHKPENIVIEMARENQTTQKGQKNSRERMKRIEEGIKELGSQILKEHPVENTQLQNEKLYLYYLQNGRDMYVDQELDINRLSDYDVDHIVPQSFLKDDSIDNKVLTRSDKARGKSDNVPSEEVVKKMKNYWRQLLNAKLITQRKFDNLTKAERGGLSELDKAGFIKRQLVETRQITKHVAQILDSRMNTKYDENDKLIREVKVITLKSKLVSDFRKDFQFYKVREINNYHHAHDAYLNAVVGTALIKKYPKLESEFVYGDYKVYDVRKMIAKSEQEIGKATAKYFFYSNIMNFFKTEITLANGEIRKRPLIETNGETGEIVWDKGRDFATVRKVLSMPQVNIVKKTEVQTGGFSKESILPKRNSDKLIARKKDWDPKKYGGFDSPTVAYSVLVVAKVEKGKSKKLKSVKELLGITIMERSSFEKNPIDFLEAKGYKEVKKDLIIKLPKYSLFELENGRKRMLASAGELQKGNELALPSKYVNFLYLASHYEKLKGSPEDNEQKQLFVEQHKHYLDEIIEQISEFSKRVILADANLDKVLSAYNKHRDKPIREQAENIIHLFTLTNLGAPAAFKYFDTTIDRKRYTSTKEVLDATLIHQSITGLYETRIDLSQLGGDGGPAPGSSGGSGGTVSLQDEHRLFDIPVTTSLPDVWLQDFPQAWAETGGLGRAKCQAPIIIDLKPTAVPVSIKQYPMSLEAHMGIRQHIIKFLELGVLRPCRSPWNTPLLPVKKPGTQDYRPVQDLREINKRTVDIHPTVPNPYNLLSTLKPDYSWYTVLDLKDAFFCLPLAPQSQELFAFEWKDPERGISGQLTWTRLPQGFKNSPTLFNEALHRDLTDFRTQHPEVTLLQYVDDLLLAAPTKKACTQGTRHLLQELGEKGYRASAKKAQICQTKVTYLGYILSEGKRWLTPGRIETVARIPPPRNPREVREFLGKAGFCRLFIPGFAELAAPLYALTKPSTPFTWQTEHQLAFEALKKALLSAPALGLPDTSKPFTLFLDERQGIAKGVLTQKLGPWKRPVAYLSKKLDPVAAGWPPCLRIMAATAMLVKDSAKLTLGQPLTVITPHTLEAIVRQPPDRWITNARLTHYQALLLDTDRVQFGPPVTLNPATLLPVPENQPSPHDCRQVLAETHGTREDLKDQELPDADHTWYTDGSSYLDSGTRRAGAAVVDGHNTIWAQSLPPGTSAQKAELIALTKALELSKGKKANIYTDSRYAFATAHTHGSIYERRGWLTSEGKEIKNKAEIIALLKALFLPQEVAIIHCPGHQKGQDPVAVGNRQADRVARQAAMAEVLTLATEPDNTSHITAGKRTADGSEFEKRTADGSEFESPKKKAKVE

SEQ ID NO: 1962 - protein, 2100 aa, synthetic construct
MPAAKRVKLDGGDKKYSIGLDIGTNSVGWAVITDEYKVPSKKFKVLGNTDRHSIKKNLIGALLFDSGETAEATRLKRTARRRYTRRKNRICYLQEIFSNEMAKVDDSFFHRLEESFLVEEDKKHERHPIFGNIVDEVAYHEKYPTIYHLRKKLVDSTDKADLRLIYLALAHMIKFRGHFLIEGDLNPDNSDVDKLFIQLVQTYNQLFEENPINASGVDAKAILSARLSKSRRLENLIAQLPGEKKNGLFGNLIALSLGLTPNFKSNFDLAEDAKLQLSKDTYDDDLDNLLAQIGDQYADLFLAAKNLSDAILLSDILRVNTEITKAPLSASMIKRYDEHHQDLTLLKALVRQQLPEKYKEIFFDQSKNGYAGYIDGGASQEEFYKFIKPILEKMDGTEELLVKLNREDLLRKQRTFDNGSIPHQIHLGELHAILRRQEDFYPFLKDNREKIEKILTFRIPYYVGPLARGNSRFAWMTRKSEETITPWNFEEVVDKGASAQSFIERMTNFDKNLPNEKVLPKHSLLYEYFTVYNELTKVKYVTEGMRKPAFLSGEQKKAIVDLLFKTNRKVTVKQLKEDYFKKIECFDSVEISGVEDRFNASLGTYHDLLKIIKDKDFLDNEENEDILEDIVLTLTLFEDREMIEERLKTYAHLFDDKVMKQLKRRRYTGWGRLSRKLINGIRDKQSGKTILDFLKSDGFANRNFMQLIHDDSLTFKEDIQKAQVSGQGDSLHEHIANLAGSPAIKKGILQTVKVVDELVKVMGRHKPENIVIEMARENQTTQKGQKNSRERMKRIEEGIKELGSQILKEHPVENTQLQNEKLYLYYLQNGRDMYVDQELDINRLSDYDVDHIVPQSFLKDDSIDNKVLTRSDKARGKSDNVPSEEVVKKMKNYWRQLLNAKLITQRKFDNLTKAERGGLSELDKAGFIKRQLVETRQITKHVAQILDSRMNTKYDENDKLIREVKVITLKSKLVSDFRKDFQFYKVREINNYHHAHDAYLNAVVGTALIKKYPKLESEFVYGDYKVYDVRKMIAKSEQEIGKATAKYFFYSNIMNFFKTEITLANGEIRKRPLIETNGETGEIVWDKGRDFATVRKVLSMPQVNIVKKTEVQTGGFSKESILPKRNSDKLIARKKDWDPKKYGGFDSPTVAYSVLVVAKVEKGKSKKLKSVKELLGITIMERSSFEKNPIDFLEAKGYKEVKKDLIIKLPKYSLFELENGRKRMLASAGELQKGNELALPSKYVNFLYLASHYEKLKGSPEDNEQKQLFVEQHKHYLDEIIEQISEFSKRVILADANLDKVLSAYNKHRDKPIREQAENIIHLFTLTNLGAPAAFKYFDTTIDRKRYTSTKEVLDATLIHQSITGLYETRIDLSQLGGDGGGSSPAPGGGGGTVSLQDEHRLFDIPVTTSLPDVWLQDFPQAWAETGGLGRAKCQAPIIIDLKPTAVPVSIKQYPMSLEAHMGIRQHIIKFLELGVLRPCRSPWNTPLLPVKKPGTQDYRPVQDLREINKRTVDIHPTVPNPYNLLSTLKPDYSWYTVLDLKDAFFCLPLAPQSQELFAFEWKDPERGISGQLTWTRLPQGFKNSPTLFNEALHRDLTDFRTQHPEVTLLQYVDDLLLAAPTKKACTQGTRHLLQELGEKGYRASAKKAQICQTKVTYLGYILSEGKRWLTPGRIETVARIPPPRNPREVREFLGKAGFCRLFIPGFAELAAPLYALTKPSTPFTWQTEHQLAFEALKKALLSAPALGLPDTSKPFTLFLDERQGIAKGVLTQKLGPWKRPVAYLSKKLDPVAAGWPPCLRIMAATAMLVKDSAKLTLGQPLTVITPHTLEAIVRQPPDRWITNARLTHYQALLLDTDRVQFGPPVTLNPATLLPVPENQPSPHDCRQVLAETHGTREDLKDQELPDADHTWYTDGSSYLDSGTRRAGAAVVDGHNTIWAQSLPPGTSAQKAELIALTKALELSKGKKANIYTDSRYAFATAHTHGSIYERRGWLTSEGKEIKNKAEIIALLKALFLPQEVAIIHCPGHQKGQDPVAVGNRQADRVARQAAMAEVLTLATEPDNTSHITAGKRTADGSEFEKRTADGSEFESPKKKAKVE

SEQ ID NO: 1963 - protein, 2101 aa, synthetic construct
MPAAKRVKLDGGDKKYSIGLDIGTNSVGWAVITDEYKVPSKKFKVLGNTDRHSIKKNLIGALLFDSGETAEATRLKRTARRRYTRRKNRICYLQEIFSNEMAKVDDSFFHRLEESFLVEEDKKHERHPIFGNIVDEVAYHEKYPTIYHLRKKLVDSTDKADLRLIYLALAHMIKFRGHFLIEGDLNPDNSDVDKLFIQLVQTYNQLFEENPINASGVDAKAILSARLSKSRRLENLIAQLPGEKKNGLFGNLIALSLGLTPNFKSNFDLAEDAKLQLSKDTYDDDLDNLLAQIGDQYADLFLAAKNLSDAILLSDILRVNTEITKAPLSASMIKRYDEHHQDLTLLKALVRQQLPEKYKEIFFDQSKNGYAGYIDGGASQEEFYKFIKPILEKMDGTEELLVKLNREDLLRKQRTFDNGSIPHQIHLGELHAILRRQEDFYPFLKDNREKIEKILTFRIPYYVGPLARGNSRFAWMTRKSEETITPWNFEEVVDKGASAQSFIERMTNFDKNLPNEKVLPKHSLLYEYFTVYNELTKVKYVTEGMRKPAFLSGEQKKAIVDLLFKTNRKVTVKQLKEDYFKKIECFDSVEISGVEDRFNASLGTYHDLLKIIKDKDFLDNEENEDILEDIVLTLTLFEDREMIEERLKTYAHLFDDKVMKQLKRRRYTGWGRLSRKLINGIRDKQSGKTILDFLKSDGFANRNFMQLIHDDSLTFKEDIQKAQVSGQGDSLHEHIANLAGSPAIKKGILQTVKVVDELVKVMGRHKPENIVIEMARENQTTQKGQKNSRERMKRIEEGIKELGSQILKEHPVENTQLQNEKLYLYYLQNGRDMYVDQELDINRLSDYDVDHIVPQSFLKDDSIDNKVLTRSDKARGKSDNVPSEEVVKKMKNYWRQLLNAKLITQRKFDNLTKAERGGLSELDKAGFIKRQLVETRQITKHVAQILDSRMNTKYDENDKLIREVKVITLKSKLVSDFRKDFQFYKVREINNYHHAHDAYLNAVVGTALIKKYPKLESEFVYGDYKVYDVRKMIAKSEQEIGKATAKYFFYSNIMNFFKTEITLANGEIRKRPLIETNGETGEIVWDKGRDFATVRKVLSMPQVNIVKKTEVQTGGFSKESILPKRNSDKLIARKKDWDPKKYGGFDSPTVAYSVLVVAKVEKGKSKKLKSVKELLGITIMERSSFEKNPIDFLEAKGYKEVKKDLIIKLPKYSLFELENGRKRMLASAGELQKGNELALPSKYVNFLYLASHYEKLKGSPEDNEQKQLFVEQHKHYLDEIIEQISEFSKRVILADANLDKVLSAYNKHRDKPIREQAENIIHLFTLTNLGAPAAFKYFDTTIDRKRYTSTKEVLDATLIHQSITGLYETRIDLSQLGGDGGEAAAKEAAAKGGTVSLQDEHRLFDIPVTTSLPDVWLQDFPQAWAETGGLGRAKCQAPIIIDLKPTAVPVSIKQYPMSLEAHMGIRQHIIKFLELGVLRPCRSPWNTPLLPVKKPGTQDYRPVQDLREINKRTVDIHPTVPNPYNLLSTLKPDYSWYTVLDLKDAFFCLPLAPQSQELFAFEWKDPERGISGQLTWTRLPQGFKNSPTLFNEALHRDLTDFRTQHPEVTLLQYVDDLLLAAPTKKACTQGTRHLLQELGEKGYRASAKKAQICQTKVTYLGYILSEGKRWLTPGRIETVARIPPPRNPREVREFLGKAGFCRLFIPGFAELAAPLYALTKPSTPFTWQTEHQLAFEALKKALLSAPALGLPDTSKPFTLFLDERQGIAKGVLTQKLGPWKRPVAYLSKKLDPVAAGWPPCLRIMAATAMLVKDSAKLTLGQPLTVITPHTLEAIVRQPPDRWITNARLTHYQALLLDTDRVQFGPPVTLNPATLLPVPENQPSPHDCRQVLAETHGTREDLKDQELPDADHTWYTDGSSYLDSGTRRAGAAVVDGHNTIWAQSLPPGTSAQKAELIALTKALELSKGKKANIYTDSRYAFATAHTHGSIYERRGWLTSEGKEIKNKAEIIALLKALFLPQEVAIIHCPGHQKGQDPVAVGNRQADRVARQAAMAEVLTLATEPDNTSHITAGKRTADGSEFEKRTADGSEFESPKKKAKVE

SEQ ID NO: 1964 - protein, 2100 aa, synthetic construct
MPAAKRVKLDGGDKKYSIGLDIGTNSVGWAVITDEYKVPSKKFKVLGNTDRHSIKKNLIGALLFDSGETAEATRLKRTARRRYTRRKNRICYLQEIFSNEMAKVDDSFFHRLEESFLVEEDKKHERHPIFGNIVDEVAYHEKYPTIYHLRKKLVDSTDKADLRLIYLALAHMIKFRGHFLIEGDLNPDNSDVDKLFIQLVQTYNQLFEENPINASGVDAKAILSARLSKSRRLENLIAQLPGEKKNGLFGNLIALSLGLTPNFKSNFDLAEDAKLQLSKDTYDDDLDNLLAQIGDQYADLFLAAKNLSDAILLSDILRVNTEITKAPLSASMIKRYDEHHQDLTLLKALVRQQLPEKYKEIFFDQSKNGYAGYIDGGASQEEFYKFIKPILEKMDGTEELLVKLNREDLLRKQRTFDNGSIPHQIHLGELHAILRRQEDFYPFLKDNREKIEKILTFRIPYYVGPLARGNSRFAWMTRKSEETITPWNFEEVVDKGASAQSFIERMTNFDKNLPNEKVLPKHSLLYEYFTVYNELTKVKYVTEGMRKPAFLSGEQKKAIVDLLFKTNRKVTVKQLKEDYFKKIECFDSVEISGVEDRFNASLGTYHDLLKIIKDKDFLDNEENEDILEDIVLTLTLFEDREMIEERLKTYAHLFDDKVMKQLKRRRYTGWGRLSRKLINGIRDKQSGKTILDFLKSDGFANRNFMQLIHDDSLTFKEDIQKAQVSGQGDSLHEHIANLAGSPAIKKGILQTVKVVDELVKVMGRHKPENIVIEMARENQTTQKGQKNSRERMKRIEEGIKELGSQILKEHPVENTQLQNEKLYLYYLQNGRDMYVDQELDINRLSDYDVDHIVPQSFLKDDSIDNKVLTRSDKARGKSDNVPSEEVVKKMKNYWRQLLNAKLITQRKFDNLTKAERGGLSELDKAGFIKRQLVETRQITKHVAQILDSRMNTKYDENDKLIREVKVITLKSKLVSDFRKDFQFYKVREINNYHHAHDAYLNAVVGTALIKKYPKLESEFVYGDYKVYDVRKMIAKSEQEIGKATAKYFFYSNIMNFFKTEITLANGEIRKRPLIETNGETGEIVWDKGRDFATVRKVLSMPQVNIVKKTEVQTGGFSKESILPKRNSDKLIARKKDWDPKKYGGFDSPTVAYSVLVVAKVEKGKSKKLKSVKELLGITIMERSSFEKNPIDFLEAKGYKEVKKDLIIKLPKYSLFELENGRKRMLASAGELQKGNELALPSKYVNFLYLASHYEKLKGSPEDNEQKQLFVEQHKHYLDEIIEQISEFSKRVILADANLDKVLSAYNKHRDKPIREQAENIIHLFTLTNLGAPAAFKYFDTTIDRKRYTSTKEVLDATLIHQSITGLYETRIDLSQLGGDGGGGSPAPGSSGGTVSLQDEHRLFDIPVTTSLPDVWLQDFPQAWAETGGLGRAKCQAPIIIDLKPTAVPVSIKQYPMSLEAHMGIRQHIIKFLELGVLRPCRSPWNTPLLPVKKPGTQDYRPVQDLREINKRTVDIHPTVPNPYNLLSTLKPDYSWYTVLDLKDAFFCLPLAPQSQELFAFEWKDPERGISGQLTWTRLPQGFKNSPTLFNEALHRDLTDFRTQHPEVTLLQYVDDLLLAAPTKKACTQGTRHLLQELGEKGYRASAKKAQICQTKVTYLGYILSEGKRWLTPGRIETVARIPPPRNPREVREFLGKAGFCRLFIPGFAELAAPLYALTKPSTPFTWQTEHQLAFEALKKALLSAPALGLPDTSKPFTLFLDERQGIAKGVLTQKLGPWKRPVAYLSKKLDPVAAGWPPCLRIMAATAMLVKDSAKLTLGQPLTVITPHTLEAIVRQPPDRWITNARLTHYQALLLDTDRVQFGPPVTLNPATLLPVPENQPSPHDCRQVLAETHGTREDLKDQELPDADHTWYTDGSSYLDSGTRRAGAAVVDGHNTIWAQSLPPGTSAQKAELIALTKALELSKGKKANIYTDSRYAFATAHTHGSIYERRGWLTSEGKEIKNKAEIIALLKALFLPQEVAIIHCPGHQKGQDPVAVGNRQADRVARQAAMAEVLTLATEPDNTSHITAGKRTADGSEFEKRTADGSEFESPKKKAKVE

SEQ ID NO: 1965 - protein, 2099 aa, synthetic construct
MPAAKRVKLDGGDKKYSIGLDIGTNSVGWAVITDEYKVPSKKFKVLGNTDRHSIKKNLIGALLFDSGETAEATRLKRTARRRYTRRKNRICYLQEIFSNEMAKVDDSFFHRLEESFLVEEDKKHERHPIFGNIVDEVAYHEKYPTIYHLRKKLVDSTDKADLRLIYLALAHMIKFRGHFLIEGDLNPDNSDVDKLFIQLVQTYNQLFEENPINASGVDAKAILSARLSKSRRLENLIAQLPGEKKNGLFGNLIALSLGLTPNFKSNFDLAEDAKLQLSKDTYDDDLDNLLAQIGDQYADLFLAAKNLSDAILLSDILRVNTEITKAPLSASMIKRYDEHHQDLTLLKALVRQQLPEKYKEIFFDQSKNGYAGYIDGGASQEEFYKFIKPILEKMDGTEELLVKLNREDLLRKQRTFDNGSIPHQIHLGELHAILRRQEDFYPFLKDNREKIEKILTFRIPYYVGPLARGNSRFAWMTRKSEETITPWNFEEVVDKGASAQSFIERMTNFDKNLPNEKVLPKHSLLYEYFTVYNELTKVKYVTEGMRKPAFLSGEQKKAIVDLLFKTNRKVTVKQLKEDYFKKIECFDSVEISGVEDRFNASLGTYHDLLKIIKDKDFLDNEENEDILEDIVLTLTLFEDREMIEERLKTYAHLFDDKVMKQLKRRRYTGWGRLSRKLINGIRDKQSGKTILDFLKSDGFANRNFMQLIHDDSLTFKEDIQKAQVSGQGDSLHEHIANLAGSPAIKKGILQTVKVVDELVKVMGRHKPENIVIEMARENQTTQKGQKNSRERMKRIEEGIKELGSQILKEHPVENTQLQNEKLYLYYLQNGRDMYVDQELDINRLSDYDVDHIVPQSFLKDDSIDNKVLTRSDKARGKSDNVPSEEVVKKMKNYWRQLLNAKLITQRKFDNLTKAERGGLSELDKAGFIKRQLVETRQITKHVAQILDSRMNTKYDENDKLIREVKVITLKSKLVSDFRKDFQFYKVREINNYHHAHDAYLNAVVGTALIKKYPKLESEFVYGDYKVYDVRKMIAKSEQEIGKATAKYFFYSNIMNFFKTEITLANGEIRKRPLIETNGETGEIVWDKGRDFATVRKVLSMPQVNIVKKTEVQTGGFSKESILPKRNSDKLIARKKDWDPKKYGGFDSPTVAYSVLVVAKVEKGKSKKLKSVKELLGITIMERSSFEKNPIDFLEAKGYKEVKKDLIIKLPKYSLFELENGRKRMLASAGELQKGNELALPSKYVNFLYLASHYEKLKGSPEDNEQKQLFVEQHKHYLDEIIEQISEFSKRVILADANLDKVLSAYNKHRDKPIREQAENIIHLFTLTNLGAPAAFKYFDTTIDRKRYTSTKEVLDATLIHQSITGLYETRIDLSQLGGDGGGSSEAAAKGGTVSLQDEHRLFDIPVTTSLPDVWLQDFPQAWAETGGLGRAKCQAPIIIDLKPTAVPVSIKQYPMSLEAHMGIRQHIIKFLELGVLRPCRSPWNTPLLPVKKPGTQDYRPVQDLREINKRTVDIHPTVPNPYNLLSTLKPDYSWYTVLDLKDAFFCLPLAPQSQELFAFEWKDPERGISGQLTWTRLPQGFKNSPTLFNEALHRDLTDFRTQHPEVTLLQYVDDLLLAAPTKKACTQGTRHLLQELGEKGYRASAKKAQICQTKVTYLGYILSEGKRWLTPGRIETVARIPPPRNPREVREFLGKAGFCRLFIPGFAELAAPLYALTKPSTPFTWQTEHQLAFEALKKALLSAPALGLPDTSKPFTLFLDERQGIAKGVLTQKLGPWKRPVAYLSKKLDPVAAGWPPCLRIMAATAMLVKDSAKLTLGQPLTVITPHTLEAIVRQPPDRWITNARLTHYQALLLDTDRVQFGPPVTLNPATLLPVPENQPSPHDCRQVLAETHGTREDLKDQELPDADHTWYTDGSSYLDSGTRRAGAAVVDGHNTIWAQSLPPGTSAQKAELIALTKALELSKGKKANIYTDSRYAFATAHTHGSIYERRGWLTSEGKEIKNKAEIIALLKALFLPQEVAIIHCPGHQKGQDPVAVGNRQADRVARQAAMAEVLTLATEPDNTSHITAGKRTADGSEFEKRTADGSEFESPKKKAKVE

SEQ ID NO: 1966 - protein, 2111 aa, synthetic construct
MPAAKRVKLDGGDKKYSIGLDIGTNSVGWAVITDEYKVPSKKFKVLGNTDRHSIKKNLIGALLFDSGETAEATRLKRTARRRYTRRKNRICYLQEIFSNEMAKVDDSFFHRLEESFLVEEDKKHERHPIFGNIVDEVAYHEKYPTIYHLRKKLVDSTDKADLRLIYLALAHMIKFRGHFLIEGDLNPDNSDVDKLFIQLVQTYNQLFEENPINASGVDAKAILSARLSKSRRLENLIAQLPGEKKNGLFGNLIALSLGLTPNFKSNFDLAEDAKLQLSKDTYDDDLDNLLAQIGDQYADLFLAAKNLSDAILLSDILRVNTEITKAPLSASMIKRYDEHHQDLTLLKALVRQQLPEKYKEIFFDQSKNGYAGYIDGGASQEEFYKFIKPILEKMDGTEELLVKLNREDLLRKQRTFDNGSIPHQIHLGELHAILRRQEDFYPFLKDNREKIEKILTFRIPYYVGPLARGNSRFAWMTRKSEETITPWNFEEVVDKGASAQSFIERMTNFDKNLPNEKVLPKHSLLYEYFTVYNELTKVKYVTEGMRKPAFLSGEQKKAIVDLLFKTNRKVTVKQLKEDYFKKIECFDSVEISGVEDRFNASLGTYHDLLKIIKDKDFLDNEENEDILEDIVLTLTLFEDREMIEERLKTYAHLFDDKVMKQLKRRRYTGWGRLSRKLINGIRDKQSGKTILDFLKSDGFANRNFMQLIHDDSLTFKEDIQKAQVSGQGDSLHEHIANLAGSPAIKKGILQTVKVVDELVKVMGRHKPENIVIEMARENQTTQKGQKNSRERMKRIEEGIKELGSQILKEHPVENTQLQNEKLYLYYLQNGRDMYVDQELDINRLSDYDVDHIVPQSFLKDDSIDNKVLTRSDKARGKSDNVPSEEVVKKMKNYWRQLLNAKLITQRKFDNLTKAERGGLSELDKAGFIKRQLVETRQITKHVAQILDSRMNTKYDENDKLIREVKVITLKSKLVSDFRKDFQFYKVREINNYHHAHDAYLNAVVGTALIKKYPKLESEFVYGDYKVYDVRKMIAKSEQEIGKATAKYFFYSNIMNFFKTEITLANGEIRKRPLIETNGETGEIVWDKGRDFATVRKVLSMPQVNIVKKTEVQTGGFSKESILPKRNSDKLIARKKDWDPKKYGGFDSPTVAYSVLVVAKVEKGKSKKLKSVKELLGITIMERSSFEKNPIDFLEAKGYKEVKKDLIIKLPKYSLFELENGRKRMLASAGELQKGNELALPSKYVNFLYLASHYEKLKGSPEDNEQKQLFVEQHKHYLDEIIEQISEFSKRVILADANLDKVLSAYNKHRDKPIREQAENIIHLFTLTNLGAPAAFKYFDTTIDRKRYTSTKEVLDATLIHQSITGLYETRIDLSQLGGDGGGGGGSGGGGSGGGGSGGGGSGGTVSLQDEHRLFDIPVTTSLPDVWLQDFPQAWAETGGLGRAKCQAPIIIDLKPTAVPVSIKQYPMSLEAHMGIRQHIIKFLELGVLRPCRSPWNTPLLPVKKPGTQDYRPVQDLREINKRTVDIHPTVPNPYNLLSTLKPDYSWYTVLDLKDAFFCLPLAPQSQELFAFEWKDPERGISGQLTWTRLPQGFKNSPTLFNEALHRDLTDFRTQHPEVTLLQYVDDLLLAAPTKKACTQGTRHLLQELGEKGYRASAKKAQICQTKVTYLGYILSEGKRWLTPGRIETVARIPPPRNPREVREFLGKAGFCRLFIPGFAELAAPLYALTKPSTPFTWQTEHQLAFEALKKALLSAPALGLPDTSKPFTLFLDERQGIAKGVLTQKLGPWKRPVAYLSKKLDPVAAGWPPCLRIMAATAMLVKDSAKLTLGQPLTVITPHTLEAIVRQPPDRWITNARLTHYQALLLDTDRVQFGPPVTLNPATLLPVPENQPSPHDCRQVLAETHGTREDLKDQELPDADHTWYTDGSSYLDSGTRRAGAAVVDGHNTIWAQSLPPGTSAQKAELIALTKALELSKGKKANIYTDSRYAFATAHTHGSIYERRGWLTSEGKEIKNKAEIIALLKALFLPQEVAIIHCPGHQKGQDPVAVGNRQADRVARQAAMAEVLTLATEPDNTSHITAGKRTADGSEFEKRTADGSEFESPKKKAKVE

SEQ ID NO: 1967 - protein, 2137 aa, synthetic construct
MPAAKRVKLDGGDKKYSIGLDIGTNSVGWAVITDEYKVPSKKFKVLGNTDRHSIKKNLIGALLFDSGETAEATRLKRTARRRYTRRKNRICYLQEIFSNEMAKVDDSFFHRLEESFLVEEDKKHERHPIFGNIVDEVAYHEKYPTIYHLRKKLVDSTDKADLRLIYLALAHMIKFRGHFLIEGDLNPDNSDVDKLFIQLVQTYNQLFEENPINASGVDAKAILSARLSKSRRLENLIAQLPGEKKNGLFGNLIALSLGLTPNFKSNFDLAEDAKLQLSKDTYDDDLDNLLAQIGDQYADLFLAAKNLSDAILLSDILRVNTEITKAPLSASMIKRYDEHHQDLTLLKALVRQQLPEKYKEIFFDQSKNGYAGYIDGGASQEEFYKFIKPILEKMDGTEELLVKLNREDLLRKQRTFDNGSIPHQIHLGELHAILRRQEDFYPFLKDNREKIEKILTFRIPYYVGPLARGNSRFAWMTRKSEETITPWNFEEVVDKGASAQSFIERMTNFDKNLPNEKVLPKHSLLYEYFTVYNELTKVKYVTEGMRKPAFLSGEQKKAIVDLLFKTNRKVTVKQLKEDYFKKIECFDSVEISGVEDRFNASLGTYHDLLKIIKDKDFLDNEENEDILEDIVLTLTLFEDREMIEERLKTYAHLFDDKVMKQLKRRRYTGWGRLSRKLINGIRDKQSGKTILDFLKSDGFANRNFMQLIHDDSLTFKEDIQKAQVSGQGDSLHEHIANLAGSPAIKKGILQTVKVVDELVKVMGRHKPENIVIEMARENQTTQKGQKNSRERMKRIEEGIKELGSQILKEHPVENTQLQNEKLYLYYLQNGRDMYVDQELDINRLSDYDVDHIVPQSFLKDDSIDNKVLTRSDKARGKSDNVPSEEVVKKMKNYWRQLLNAKLITQRKFDNLTKAERGGLSELDKAGFIKRQLVETRQITKHVAQILDSRMNTKYDENDKLIREVKVITLKSKLVSDFRKDFQFYKVREINNYHHAHDAYLNAVVGTALIKKYPKLESEFVYGDYKVYDVRKMIAKSEQEIGKATAKYFFYSNIMNFFKTEITLANGEIRKRPLIETNGETGEIVWDKGRDFATVRKVLSMPQVNIVKKTEVQTGGFSKESILPKRNSDKLIARKKDWDPKKYGGFDSPTVAYSVLVVAKVEKGKSKKLKSVKELLGITIMERSSFEKNPIDFLEAKGYKEVKKDLIIKLPKYSLFELENGRKRMLASAGELQKGNELALPSKYVNFLYLASHYEKLKGSPEDNEQKQLFVEQHKHYLDEIIEQISEFSKRVILADANLDKVLSAYNKHRDKPIREQAENIIHLFTLTNLGAPAAFKYFDTTIDRKRYTSTKEVLDATLIHQSITGLYETRIDLSQLGGDGGAEAAAKEAAAKEAAAKEAAAKALEAEAAAKEAAAKEAAAKEAAAKAGGTVSLQDEHRLFDIPVTTSLPDVWLQDFPQAWAETGGLGRAKCQAPIIIDLKPTAVPVSIKQYPMSLEAHMGIRQHIIKFLELGVLRPCRSPWNTPLLPVKKPGTQDYRPVQDLREINKRTVDIHPTVPNPYNLLSTLKPDYSWYTVLDLKDAFFCLPLAPQSQELFAFEWKDPERGISGQLTWTRLPQGFKNSPTLFNEALHRDLTDFRTQHPEVTLLQYVDDLLLAAPTKKACTQGTRHLLQELGEKGYRASAKKAQICQTKVTYLGYILSEGKRWLTPGRIETVARIPPPRNPREVREFLGKAGFCRLFIPGFAELAAPLYALTKPSTPFTWQTEHQLAFEALKKALLSAPALGLPDTSKPFTLFLDERQGIAKGVLTQKLGPWKRPVAYLSKKLDPVAAGWPPCLRIMAATAMLVKDSAKLTLGQPLTVITPHTLEAIVRQPPDRWITNARLTHYQALLLDTDRVQFGPPVTLNPATLLPVPENQPSPHDCRQVLAETHGTREDLKDQELPDADHTWYTDGSSYLDSGTRRAGAAVVDGHNTIWAQSLPPGTSAQKAELIALTKALELSKGKKANIYTDSRYAFATAHTHGSIYERRGWLTSEGKEIKNKAEIIALLKALFLPQEVAIIHCPGHQKGQDPVAVGNRQADRVARQAAMAEVLTLATEPDNTSHITAGKRTADGSEFEKRTADGSEFESPKKKAKVE

SEQ ID NO: 1968 - protein, 2102 aa, synthetic construct
MPAAKRVKLDGGDKKYSIGLDIGTNSVGWAVITDEYKVPSKKFKVLGNTDRHSIKKNLIGALLFDSGETAEATRLKRTARRRYTRRKNRICYLQEIFSNEMAKVDDSFFHRLEESFLVEEDKKHERHPIFGNIVDEVAYHEKYPTIYHLRKKLVDSTDKADLRLIYLALAHMIKFRGHFLIEGDLNPDNSDVDKLFIQLVQTYNQLFEENPINASGVDAKAILSARLSKSRRLENLIAQLPGEKKNGLFGNLIALSLGLTPNFKSNFDLAEDAKLQLSKDTYDDDLDNLLAQIGDQYADLFLAAKNLSDAILLSDILRVNTEITKAPLSASMIKRYDEHHQDLTLLKALVRQQLPEKYKEIFFDQSKNGYAGYIDGGASQEEFYKFIKPILEKMDGTEELLVKLNREDLLRKQRTFDNGSIPHQIHLGELHAILRRQEDFYPFLKDNREKIEKILTFRIPYYVGPLARGNSRFAWMTRKSEETITPWNFEEVVDKGASAQSFIERMTNFDKNLPNEKVLPKHSLLYEYFTVYNELTKVKYVTEGMRKPAFLSGEQKKAIVDLLFKTNRKVTVKQLKEDYFKKIECFDSVEISGVEDRFNASLGTYHDLLKIIKDKDFLDNEENEDILEDIVLTLTLFEDREMIEERLKTYAHLFDDKVMKQLKRRRYTGWGRLSRKLINGIRDKQSGKTILDFLKSDGFANRNFMQLIHDDSLTFKEDIQKAQVSGQGDSLHEHIANLAGSPAIKKGILQTVKVVDELVKVMGRHKPENIVIEMARENQTTQKGQKNSRERMKRIEEGIKELGSQILKEHPVENTQLQNEKLYLYYLQNGRDMYVDQELDINRLSDYDVDHIVPQSFLKDDSIDNKVLTRSDKARGKSDNVPSEEVVKKMKNYWRQLLNAKLITQRKFDNLTKAERGGLSELDKAGFIKRQLVETRQITKHVAQILDSRMNTKYDENDKLIREVKVITLKSKLVSDFRKDFQFYKVREINNYHHAHDAYLNAVVGTALIKKYPKLESEFVYGDYKVYDVRKMIAKSEQEIGKATAKYFFYSNIMNFFKTEITLANGEIRKRPLIETNGETGEIVWDKGRDFATVRKVLSMPQVNIVKKTEVQTGGFSKESILPKRNSDKLIARKKDWDPKKYGGFDSPTVAYSVLVVAKVEKGKSKKLKSVKELLGITIMERSSFEKNPIDFLEAKGYKEVKKDLIIKLPKYSLFELENGRKRMLASAGELQKGNELALPSKYVNFLYLASHYEKLKGSPEDNEQKQLFVEQHKHYLDEIIEQISEFSKRVILADANLDKVLSAYNKHRDKPIREQAENIIHLFTLTNLGAPAAFKYFDTTIDRKRYTSTKEVLDATLIHQSITGLYETRIDLSQLGGDGGPAPGSSEAAAKGGTVSLQDEHRLFDIPVTTSLPDVWLQDFPQAWAETGGLGRAKCQAPIIIDLKPTAVPVSIKQYPMSLEAHMGIRQHIIKFLELGVLRPCRSPWNTPLLPVKKPGTQDYRPVQDLREINKRTVDIHPTVPNPYNLLSTLKPDYSWYTVLDLKDAFFCLPLAPQSQELFAFEWKDPERGISGQLTWTRLPQGFKNSPTLFNEALHRDLTDFRTQHPEVTLLQYVDDLLLAAPTKKACTQGTRHLLQELGEKGYRASAKKAQICQTKVTYLGYILSEGKRWLTPGRIETVARIPPPRNPREVREFLGKAGFCRLFIPGFAELAAPLYALTKPSTPFTWQTEHQLAFEALKKALLSAPALGLPDTSKPFTLFLDERQGIAKGVLTQKLGPWKRPVAYLSKKLDPVAAGWPPCLRIMAATAMLVKDSAKLTLGQPLTVITPHTLEAIVRQPPDRWITNARLTHYQALLLDTDRVQFGPPVTLNPATLLPVPENQPSPHDCRQVLAETHGTREDLKDQELPDADHTWYTDGSSYLDSGTRRAGAAVVDGHNTIWAQSLPPGTSAQKAELIALTKALELSKGKKANIYTDSRYAFATAHTHGSIYERRGWLTSEGKEIKNKAEIIALLKALFLPQEVAIIHCPGHQKGQDPVAVGNRQADRVARQAAMAEVLTLATEPDNTSHITAGKRTADGSEFEKRTADGSEFESPKKKAKVE

SEQ ID NO: 1969 - protein, 2102 aa, synthetic construct
MPAAKRVKLDGGDKKYSIGLDIGTNSVGWAVITDEYKVPSKKFKVLGNTDRHSIKKNLIGALLFDSGETAEATRLKRTARRRYTRRKNRICYLQEIFSNEMAKVDDSFFHRLEESFLVEEDKKHERHPIFGNIVDEVAYHEKYPTIYHLRKKLVDSTDKADLRLIYLALAHMIKFRGHFLIEGDLNPDNSDVDKLFIQLVQTYNQLFEENPINASGVDAKAILSARLSKSRRLENLIAQLPGEKKNGLFGNLIALSLGLTPNFKSNFDLAEDAKLQLSKDTYDDDLDNLLAQIGDQYADLFLAAKNLSDAILLSDILRVNTEITKAPLSASMIKRYDEHHQDLTLLKALVRQQLPEKYKEIFFDQSKNGYAGYIDGGASQEEFYKFIKPILEKMDGTEELLVKLNREDLLRKQRTFDNGSIPHQIHLGELHAILRRQEDFYPFLKDNREKIEKILTFRIPYYVGPLARGNSRFAWMTRKSEETITPWNFEEVVDKGASAQSFIERMTNFDKNLPNEKVLPKHSLLYEYFTVYNELTKVKYVTEGMRKPAFLSGEQKKAIVDLLFKTNRKVTVKQLKEDYFKKIECFDSVEISGVEDRFNASLGTYHDLLKIIKDKDFLDNEENEDILEDIVLTLTLFEDREMIEERLKTYAHLFDDKVMKQLKRRRYTGWGRLSRKLINGIRDKQSGKTILDFLKSDGFANRNFMQLIHDDSLTFKEDIQKAQVSGQGDSLHEHIANLAGSPAIKKGILQTVKVVDELVKVMGRHKPENIVIEMARENQTTQKGQKNSRERMKRIEEGIKELGSQILKEHPVENTQLQNEKLYLYYLQNGRDMYVDQELDINRLSDYDVDHIVPQSFLKDDSIDNKVLTRSDKARGKSDNVPSEEVVKKMKNYWRQLLNAKLITQRKFDNLTKAERGGLSELDKAGFIKRQLVETRQITKHVAQILDSRMNTKYDENDKLIREVKVITLKSKLVSDFRKDFQFYKVREINNYHHAHDAYLNAVVGTALIKKYPKLESEFVYGDYKVYDVRKMIAKSEQEIGKATAKYFFYSNIMNFFKTEITLANGEIRKRPLIETNGETGEIVWDKGRDFATVRKVLSMPQVNIVKKTEVQTGGFSKESILPKRNSDKLIARKKDWDPKKYGGFDSPTVAYSVLVVAKVEKGKSKKLKSVKELLGITIMERSSFEKNPIDFLEAKGYKEVKKDLIIKLPKYSLFELENGRKRMLASAGELQKGNELALPSKYVNFLYLASHYEKLKGSPEDNEQKQLFVEQHKHYLDEIIEQISEFSKRVILADANLDKVLSAYNKHRDKPIREQAENIIHLFTLTNLGAPAAFKYFDTTIDRKRYTSTKEVLDATLIHQSITGLYETRIDLSQLGGDGGGGGEAAAKPAPGGTVSLQDEHRLFDIPVTTSLPDVWLQDFPQAWAETGGLGRAKCQAPIIIDLKPTAVPVSIKQYPMSLEAHMGIRQHIIKFLELGVLRPCRSPWNTPLLPVKKPGTQDYRPVQDLREINKRTVDIHPTVPNPYNLLSTLKPDYSWYTVLDLKDAFFCLPLAPQSQELFAFEWKDPERGISGQLTWTRLPQGFKNSPTLFNEALHRDLTDFRTQHPEVTLLQYVDDLLLAAPTKKACTQGTRHLLQELGEKGYRASAKKAQICQTKVTYLGYILSEGKRWLTPGRIETVARIPPPRNPREVREFLGKAGFCRLFIPGFAELAAPLYALTKPSTPFTWQTEHQLAFEALKKALLSAPALGLPDTSKPFTLFLDERQGIAKGVLTQKLGPWKRPVAYLSKKLDPVAAGWPPCLRIMAATAMLVKDSAKLTLGQPLTVITPHTLEAIVRQPPDRWITNARLTHYQALLLDTDRVQFGPPVTLNPATLLPVPENQPSPHDCRQVLAETHGTREDLKDQELPDADHTWYTDGSSYLDSGTRRAGAAVVDGHNTIWAQSLPPGTSAQKAELIALTKALELSKGKKANIYTDSRYAFATAHTHGSIYERRGWLTSEGKEIKNKAEIIALLKALFLPQEVAIIHCPGHQKGQDPVAVGNRQADRVARQAAMAEVLTLATEPDNTSHITAGKRTADGSEFEKRTADGSEFESPKKKAKVE

SEQ ID NO: 1970 - protein, 2097 aa, synthetic construct
MPAAKRVKLDGGDKKYSIGLDIGTNSVGWAVITDEYKVPSKKFKVLGNTDRHSIKKNLIGALLFDSGETAEATRLKRTARRRYTRRKNRICYLQEIFSNEMAKVDDSFFHRLEESFLVEEDKKHERHPIFGNIVDEVAYHEKYPTIYHLRKKLVDSTDKADLRLIYLALAHMIKFRGHFLIEGDLNPDNSDVDKLFIQLVQTYNQLFEENPINASGVDAKAILSARLSKSRRLENLIAQLPGEKKNGLFGNLIALSLGLTPNFKSNFDLAEDAKLQLSKDTYDDDLDNLLAQIGDQYADLFLAAKNLSDAILLSDILRVNTEITKAPLSASMIKRYDEHHQDLTLLKALVRQQLPEKYKEIFFDQSKNGYAGYIDGGASQEEFYKFIKPILEKMDGTEELLVKLNREDLLRKQRTFDNGSIPHQIHLGELHAILRRQEDFYPFLKDNREKIEKILTFRIPYYVGPLARGNSRFAWMTRKSEETITPWNFEEVVDKGASAQSFIERMTNFDKNLPNEKVLPKHSLLYEYFTVYNELTKVKYVTEGMRKPAFLSGEQKKAIVDLLFKTNRKVTVKQLKEDYFKKIECFDSVEISGVEDRFNASLGTYHDLLKIIKDKDFLDNEENEDILEDIVLTLTLFEDREMIEERLKTYAHLFDDKVMKQLKRRRYTGWGRLSRKLINGIRDKQSGKTILDFLKSDGFANRNFMQLIHDDSLTFKEDIQKAQVSGQGDSLHEHIANLAGSPAIKKGILQTVKVVDELVKVMGRHKPENIVIEMARENQTTQKGQKNSRERMKRIEEGIKELGSQILKEHPVENTQLQNEKLYLYYLQNGRDMYVDQELDINRLSDYDVDHIVPQSFLKDDSIDNKVLTRSDKARGKSDNVPSEEVVKKMKNYWRQLLNAKLITQRKFDNLTKAERGGLSELDKAGFIKRQLVETRQITKHVAQILDSRMNTKYDENDKLIREVKVITLKSKLVSDFRKDFQFYKVREINNYHHAHDAYLNAVVGTALIKKYPKLESEFVYGDYKVYDVRKMIAKSEQEIGKATAKYFFYSNIMNFFKTEITLANGEIRKRPLIETNGETGEIVWDKGRDFATVRKVLSMPQVNIVKKTEVQTGGFSKESILPKRNSDKLIARKKDWDPKKYGGFDSPTVAYSVLVVAKVEKGKSKKLKSVKELLGITIMERSSFEKNPIDFLEAKGYKEVKKDLIIKLPKYSLFELENGRKRMLASAGELQKGNELALPSKYVNFLYLASHYEKLKGSPEDNEQKQLFVEQHKHYLDEIIEQISEFSKRVILADANLDKVLSAYNKHRDKPIREQAENIIHLFTLTNLGAPAAFKYFDTTIDRKRYTSTKEVLDATLIHQSITGLYETRIDLSQLGGDGGGSSGSSGGTVSLQDEHRLFDIPVTTSLPDVWLQDFPQAWAETGGLGRAKCQAPIIIDLKPTAVPVSIKQYPMSLEAHMGIRQHIIKFLELGVLRPCRSPWNTPLLPVKKPGTQDYRPVQDLREINKRTVDIHPTVPNPYNLLSTLKPDYSWYTVLDLKDAFFCLPLAPQSQELFAFEWKDPERGISGQLTWTRLPQGFKNSPTLFNEALHRDLTDFRTQHPEVTLLQYVDDLLLAAPTKKACTQGTRHLLQELGEKGYRASAKKAQICQTKVTYLGYILSEGKRWLTPGRIETVARIPPPRNPREVREFLGKAGFCRLFIPGFAELAAPLYALTKPSTPFTWQTEHQLAFEALKKALLSAPALGLPDTSKPFTLFLDERQGIAKGVLTQKLGPWKRPVAYLSKKLDPVAAGWPPCLRIMAATAMLVKDSAKLTLGQPLTVITPHTLEAIVRQPPDRWITNARLTHYQALLLDTDRVQFGPPVTLNPATLLPVPENQPSPHDCRQVLAETHGTREDLKDQELPDADHTWYTDGSSYLDSGTRRAGAAVVDGHNTIWAQSLPPGTSAQKAELIALTKALELSKGKKANIYTDSRYAFATAHTHGSIYERRGWLTSEGKEIKNKAEIIALLKALFLPQEVAIIHCPGHQKGQDPVAVGNRQADRVARQAAMAEVLTLATEPDNTSHITAGKRTADGSEFEKRTADGSEFESPKKKAKVE

SEQ ID NO: 1971 - protein, 2099 aa, synthetic construct
MPAAKRVKLDGGDKKYSIGLDIGTNSVGWAVITDEYKVPSKKFKVLGNTDRHSIKKNLIGALLFDSGETAEATRLKRTARRRYTRRKNRICYLQEIFSNEMAKVDDSFFHRLEESFLVEEDKKHERHPIFGNIVDEVAYHEKYPTIYHLRKKLVDSTDKADLRLIYLALAHMIKFRGHFLIEGDLNPDNSDVDKLFIQLVQTYNQLFEENPINASGVDAKAILSARLSKSRRLENLIAQLPGEKKNGLFGNLIALSLGLTPNFKSNFDLAEDAKLQLSKDTYDDDLDNLLAQIGDQYADLFLAAKNLSDAILLSDILRVNTEITKAPLSASMIKRYDEHHQDLTLLKALVRQQLPEKYKEIFFDQSKNGYAGYIDGGASQEEFYKFIKPILEKMDGTEELLVKLNREDLLRKQRTFDNGSIPHQIHLGELHAILRRQEDFYPFLKDNREKIEKILTFRIPYYVGPLARGNSRFAWMTRKSEETITPWNFEEVVDKGASAQSFIERMTNFDKNLPNEKVLPKHSLLYEYFTVYNELTKVKYVTEGMRKPAFLSGEQKKAIVDLLFKTNRKVTVKQLKEDYFKKIECFDSVEISGVEDRFNASLGTYHDLLKIIKDKDFLDNEENEDILEDIVLTLTLFEDREMIEERLKTYAHLFDDKVMKQLKRRRYTGWGRLSRKLINGIRDKQSGKTILDFLKSDGFANRNFMQLIHDDSLTFKEDIQKAQVSGQGDSLHEHIANLAGSPAIKKGILQTVKVVDELVKVMGRHKPENIVIEMARENQTTQKGQKNSRERMKRIEEGIKELGSQILKEHPVENTQLQNEKLYLYYLQNGRDMYVDQELDINRLSDYDVDHIVPQSFLKDDSIDNKVLTRSDKARGKSDNVPSEEVVKKMKNYWRQLLNAKLITQRKFDNLTKAERGGLSELDKAGFIKRQLVETRQITKHVAQILDSRMNTKYDENDKLIREVKVITLKSKLVSDFRKDFQFYKVREINNYHHAHDAYLNAVVGTALIKKYPKLESEFVYGDYKVYDVRKMIAKSEQEIGKATAKYFFYSNIMNFFKTEITLANGEIRKRPLIETNGETGEIVWDKGRDFATVRKVLSMPQVNIVKKTEVQTGGFSKESILPKRNSDKLIARKKDWDPKKYGGFDSPTVAYSVLVVAKVEKGKSKKLKSVKELLGITIMERSSFEKNPIDFLEAKGYKEVKKDLIIKLPKYSLFELENGRKRMLASAGELQKGNELALPSKYVNFLYLASHYEKLKGSPEDNEQKQLFVEQHKHYLDEIIEQISEFSKRVILADANLDKVLSAYNKHRDKPIREQAENIIHLFTLTNLGAPAAFKYFDTTIDRKRYTSTKEVLDATLIHQSITGLYETRIDLSQLGGDGGEAAAKGSSGGTVSLQDEHRLFDIPVTTSLPDVWLQDFPQAWAETGGLGRAKCQAPIIIDLKPTAVPVSIKQYPMSLEAHMGIRQHIIKFLELGVLRPCRSPWNTPLLPVKKPGTQDYRPVQDLREINKRTVDIHPTVPNPYNLLSTLKPDYSWYTVLDLKDAFFCLPLAPQSQELFAFEWKDPERGISGQLTWTRLPQGFKNSPTLFNEALHRDLTDFRTQHPEVTLLQYVDDLLLAAPTKKACTQGTRHLLQELGEKGYRASAKKAQICQTKVTYLGYILSEGKRWLTPGRIETVARIPPPRNPREVREFLGKAGFCRLFIPGFAELAAPLYALTKPSTPFTWQTEHQLAFEALKKALLSAPALGLPDTSKPFTLFLDERQGIAKGVLTQKLGPWKRPVAYLSKKLDPVAAGWPPCLRIMAATAMLVKDSAKLTLGQPLTVITPHTLEAIVRQPPDRWITNARLTHYQALLLDTDRVQFGPPVTLNPATLLPVPENQPSPHDCRQVLAETHGTREDLKDQELPDADHTWYTDGSSYLDSGTRRAGAAVVDGHNTIWAQSLPPGTSAQKAELIALTKALELSKGKKANIYTDSRYAFATAHTHGSIYERRGWLTSEGKEIKNKAEIIALLKALFLPQEVAIIHCPGHQKGQDPVAVGNRQADRVARQAAMAEVLTLATEPDNTSHITAGKRTADGSEFEKRTADGSEFESPKKKAKVE

SEQ ID NO: 1972 - protein, 2102 aa, synthetic construct
MPAAKRVKLDGGDKKYSIGLDIGTNSVGWAVITDEYKVPSKKFKVLGNTDRHSIKKNLIGALLFDSGETAEATRLKRTARRRYTRRKNRICYLQEIFSNEMAKVDDSFFHRLEESFLVEEDKKHERHPIFGNIVDEVAYHEKYPTIYHLRKKLVDSTDKADLRLIYLALAHMIKFRGHFLIEGDLNPDNSDVDKLFIQLVQTYNQLFEENPINASGVDAKAILSARLSKSRRLENLIAQLPGEKKNGLFGNLIALSLGLTPNFKSNFDLAEDAKLQLSKDTYDDDLDNLLAQIGDQYADLFLAAKNLSDAILLSDILRVNTEITKAPLSASMIKRYDEHHQDLTLLKALVRQQLPEKYKEIFFDQSKNGYAGYIDGGASQEEFYKFIKPILEKMDGTEELLVKLNREDLLRKQRTFDNGSIPHQIHLGELHAILRRQEDFYPFLKDNREKIEKILTFRIPYYVGPLARGNSRFAWMTRKSEETITPWNFEEVVDKGASAQSFIERMTNFDKNLPNEKVLPKHSLLYEYFTVYNELTKVKYVTEGMRKPAFLSGEQKKAIVDLLFKTNRKVTVKQLKEDYFKKIECFDSVEISGVEDRFNASLGTYHDLLKIIKDKDFLDNEENEDILEDIVLTLTLFEDREMIEERLKTYAHLFDDKVMKQLKRRRYTGWGRLSRKLINGIRDKQSGKTILDFLKSDGFANRNFMQLIHDDSLTFKEDIQKAQVSGQGDSLHEHIANLAGSPAIKKGILQTVKVVDELVKVMGRHKPENIVIEMARENQTTQKGQKNSRERMKRIEEGIKELGSQILKEHPVENTQLQNEKLYLYYLQNGRDMYVDQELDINRLSDYDVDHIVPQSFLKDDSIDNKVLTRSDKARGKSDNVPSEEVVKKMKNYWRQLLNAKLITQRKFDNLTKAERGGLSELDKAGFIKRQLVETRQITKHVAQILDSRMNTKYDENDKLIREVKVITLKSKLVSDFRKDFQFYKVREINNYHHAHDAYLNAVVGTALIKKYPKLESEFVYGDYKVYDVRKMIAKSEQEIGKATAKYFFYSNIMNFFKTEITLANGEIRKRPLIETNGETGEIVWDKGRDFATVRKVLSMPQVNIVKKTEVQTGGFSKESILPKRNSDKLIARKKDWDPKKYGGFDSPTVAYSVLVVAKVEKGKSKKLKSVKELLGITIMERSSFEKNPIDFLEAKGYKEVKKDLIIKLPKYSLFELENGRKRMLASAGELQKGNELALPSKYVNFLYLASHYEKLKGSPEDNEQKQLFVEQHKHYLDEIIEQISEFSKRVILADANLDKVLSAYNKHRDKPIREQAENIIHLFTLTNLGAPAAFKYFDTTIDRKRYTSTKEVLDATLIHQSITGLYETRIDLSQLGGDGGGSSEAAAKGGGGGTVSLQDEHRLFDIPVTTSLPDVWLQDFPQAWAETGGLGRAKCQAPIIIDLKPTAVPVSIKQYPMSLEAHMGIRQHIIKFLELGVLRPCRSPWNTPLLPVKKPGTQDYRPVQDLREINKRTVDIHPTVPNPYNLLSTLKPDYSWYTVLDLKDAFFCLPLAPQSQELFAFEWKDPERGISGQLTWTRLPQGFKNSPTLFNEALHRDLTDFRTQHPEVTLLQYVDDLLLAAPTKKACTQGTRHLLQELGEKGYRASAKKAQICQTKVTYLGYILSEGKRWLTPGRIETVARIPPPRNPREVREFLGKAGFCRLFIPGFAELAAPLYALTKPSTPFTWQTEHQLAFEALKKALLSAPALGLPDTSKPFTLFLDERQGIAKGVLTQKLGPWKRPVAYLSKKLDPVAAGWPPCLRIMAATAMLVKDSAKLTLGQPLTVITPHTLEAIVRQPPDRWITNARLTHYQALLLDTDRVQFGPPVTLNPATLLPVPENQPSPHDCRQVLAETHGTREDLKDQELPDADHTWYTDGSSYLDSGTRRAGAAVVDGHNTIWAQSLPPGTSAQKAELIALTKALELSKGKKANIYTDSRYAFATAHTHGSIYERRGWLTSEGKEIKNKAEIIALLKALFLPQEVAIIHCPGHQKGQDPVAVGNRQADRVARQAAMAEVLTLATEPDNTSHITAGKRTADGSEFEKRTADGSEFESPKKKAKVE

SEQ ID NO: 1973 - protein, 2102 aa, synthetic construct
MPAAKRVKLDGGDKKYSIGLDIGTNSVGWAVITDEYKVPSKKFKVLGNTDRHSIKKNLIGALLFDSGETAEATRLKRTARRRYTRRKNRICYLQEIFSNEMAKVDDSFFHRLEESFLVEEDKKHERHPIFGNIVDEVAYHEKYPTIYHLRKKLVDSTDKADLRLIYLALAHMIKFRGHFLIEGDLNPDNSDVDKLFIQLVQTYNQLFEENPINASGVDAKAILSARLSKSRRLENLIAQLPGEKKNGLFGNLIALSLGLTPNFKSNFDLAEDAKLQLSKDTYDDDLDNLLAQIGDQYADLFLAAKNLSDAILLSDILRVNTEITKAPLSASMIKRYDEHHQDLTLLKALVRQQLPEKYKEIFFDQSKNGYAGYIDGGASQEEFYKFIKPILEKMDGTEELLVKLNREDLLRKQRTFDNGSIPHQIHLGELHAILRRQEDFYPFLKDNREKIEKILTFRIPYYVGPLARGNSRFAWMTRKSEETITPWNFEEVVDKGASAQSFIERMTNFDKNLPNEKVLPKHSLLYEYFTVYNELTKVKYVTEGMRKPAFLSGEQKKAIVDLLFKTNRKVTVKQLKEDYFKKIECFDSVEISGVEDRFNASLGTYHDLLKIIKDKDFLDNEENEDILEDIVLTLTLFEDREMIEERLKTYAHLFDDKVMKQLKRRRYTGWGRLSRKLINGIRDKQSGKTILDFLKSDGFANRNFMQLIHDDSLTFKEDIQKAQVSGQGDSLHEHIANLAGSPAIKKGILQTVKVVDELVKVMGRHKPENIVIEMARENQTTQKGQKNSRERMKRIEEGIKELGSQILKEHPVENTQLQNEKLYLYYLQNGRDMYVDQELDINRLSDYDVDHIVPQSFLKDDSIDNKVLTRSDKARGKSDNVPSEEVVKKMKNYWRQLLNAKLITQRKFDNLTKAERGGLSELDKAGFIKRQLVETRQITKHVAQILDSRMNTKYDENDKLIREVKVITLKSKLVSDFRKDFQFYKVREINNYHHAHDAYLNAVVGTALIKKYPKLESEFVYGDYKVYDVRKMIAKSEQEIGKATAKYFFYSNIMNFFKTEITLANGEIRKRPLIETNGETGEIVWDKGRDFATVRKVLSMPQVNIVKKTEVQTGGFSKESILPKRNSDKLIARKKDWDPKKYGGFDSPTVAYSVLVVAKVEKGKSKKLKSVKELLGITIMERSSFEKNPIDFLEAKGYKEVKKDLIIKLPKYSLFELENGRKRMLASAGELQKGNELALPSKYVNFLYLASHYEKLKGSPEDNEQKQLFVEQHKHYLDEIIEQISEFSKRVILADANLDKVLSAYNKHRDKPIREQAENIIHLFTLTNLGAPAAFKYFDTTIDRKRYTSTKEVLDATLIHQSITGLYETRIDLSQLGGDGGPAPEAAAKGGGGGTVSLQDEHRLFDIPVTTSLPDVWLQDFPQAWAETGGLGRAKCQAPIIIDLKPTAVPVSIKQYPMSLEAHMGIRQHIIKFLELGVLRPCRSPWNTPLLPVKKPGTQDYRPVQDLREINKRTVDIHPTVPNPYNLLSTLKPDYSWYTVLDLKDAFFCLPLAPQSQELFAFEWKDPERGISGQLTWTRLPQGFKNSPTLFNEALHRDLTDFRTQHPEVTLLQYVDDLLLAAPTKKACTQGTRHLLQELGEKGYRASAKKAQICQTKVTYLGYILSEGKRWLTPGRIETVARIPPPRNPREVREFLGKAGFCRLFIPGFAELAAPLYALTKPSTPFTWQTEHQLAFEALKKALLSAPALGLPDTSKPFTLFLDERQGIAKGVLTQKLGPWKRPVAYLSKKLDPVAAGWPPCLRIMAATAMLVKDSAKLTLGQPLTVITPHTLEAIVRQPPDRWITNARLTHYQALLLDTDRVQFGPPVTLNPATLLPVPENQPSPHDCRQVLAETHGTREDLKDQELPDADHTWYTDGSSYLDSGTRRAGAAVVDGHNTIWAQSLPPGTSAQKAELIALTKALELSKGKKANIYTDSRYAFATAHTHGSIYERRGWLTSEGKEIKNKAEIIALLKALFLPQEVAIIHCPGHQKGQDPVAVGNRQADRVARQAAMAEVLTLATEPDNTSHITAGKRTADGSEFEKRTADGSEFESPKKKAKVE

SEQ ID NO: 1974 - protein, 2100 aa, synthetic construct
MPAAKRVKLDGGDKKYSIGLDIGTNSVGWAVITDEYKVPSKKFKVLGNTDRHSIKKNLIGALLFDSGETAEATRLKRTARRRYTRRKNRICYLQEIFSNEMAKVDDSFFHRLEESFLVEEDKKHERHPIFGNIVDEVAYHEKYPTIYHLRKKLVDSTDKADLRLIYLALAHMIKFRGHFLIEGDLNPDNSDVDKLFIQLVQTYNQLFEENPINASGVDAKAILSARLSKSRRLENLIAQLPGEKKNGLFGNLIALSLGLTPNFKSNFDLAEDAKLQLSKDTYDDDLDNLLAQIGDQYADLFLAAKNLSDAILLSDILRVNTEITKAPLSASMIKRYDEHHQDLTLLKALVRQQLPEKYKEIFFDQSKNGYAGYIDGGASQEEFYKFIKPILEKMDGTEELLVKLNREDLLRKQRTFDNGSIPHQIHLGELHAILRRQEDFYPFLKDNREKIEKILTFRIPYYVGPLARGNSRFAWMTRKSEETITPWNFEEVVDKGASAQSFIERMTNFDKNLPNEKVLPKHSLLYEYFTVYNELTKVKYVTEGMRKPAFLSGEQKKAIVDLLFKTNRKVTVKQLKEDYFKKIECFDSVEISGVEDRFNASLGTYHDLLKIIKDKDFLDNEENEDILEDIVLTLTLFEDREMIEERLKTYAHLFDDKVMKQLKRRRYTGWGRLSRKLINGIRDKQSGKTILDFLKSDGFANRNFMQLIHDDSLTFKEDIQKAQVSGQGDSLHEHIANLAGSPAIKKGILQTVKVVDELVKVMGRHKPENIVIEMARENQTTQKGQKNSRERMKRIEEGIKELGSQILKEHPVENTQLQNEKLYLYYLQNGRDMYVDQELDINRLSDYDVDHIVPQSFLKDDSIDNKVLTRSDKARGKSDNVPSEEVVKKMKNYWRQLLNAKLITQRKFDNLTKAERGGLSELDKAGFIKRQLVETRQITKHVAQILDSRMNTKYDENDKLIREVKVITLKSKLVSDFRKDFQFYKVREINNYHHAHDAYLNAVVGTALIKKYPKLESEFVYGDYKVYDVRKMIAKSEQEIGKATAKYFFYSNIMNFFKTEITLANGEIRKRPLIETNGETGEIVWDKGRDFATVRKVLSMPQVNIVKKTEVQTGGFSKESILPKRNSDKLIARKKDWDPKKYGGFDSPTVAYSVLVVAKVEKGKSKKLKSVKELLGITIMERSSFEKNPIDFLEAKGYKEVKKDLIIKLPKYSLFELENGRKRMLASAGELQKGNELALPSKYVNFLYLASHYEKLKGSPEDNEQKQLFVEQHKHYLDEIIEQISEFSKRVILADANLDKVLSAYNKHRDKPIREQAENIIHLFTLTNLGAPAAFKYFDTTIDRKRYTSTKEVLDATLIHQSITGLYETRIDLSQLGGDGGGGSGSSGGGGGTVSLQDEHRLFDIPVTTSLPDVWLQDFPQAWAETGGLGRAKCQAPIIIDLKPTAVPVSIKQYPMSLEAHMGIRQHIIKFLELGVLRPCRSPWNTPLLPVKKPGTQDYRPVQDLREINKRTVDIHPTVPNPYNLLSTLKPDYSWYTVLDLKDAFFCLPLAPQSQELFAFEWKDPERGISGQLTWTRLPQGFKNSPTLFNEALHRDLTDFRTQHPEVTLLQYVDDLLLAAPTKKACTQGTRHLLQELGEKGYRASAKKAQICQTKVTYLGYILSEGKRWLTPGRIETVARIPPPRNPREVREFLGKAGFCRLFIPGFAELAAPLYALTKPSTPFTWQTEHQLAFEALKKALLSAPALGLPDTSKPFTLFLDERQGIAKGVLTQKLGPWKRPVAYLSKKLDPVAAGWPPCLRIMAATAMLVKDSAKLTLGQPLTVITPHTLEAIVRQPPDRWITNARLTHYQALLLDTDRVQFGPPVTLNPATLLPVPENQPSPHDCRQVLAETHGTREDLKDQELPDADHTWYTDGSSYLDSGTRRAGAAVVDGHNTIWAQSLPPGTSAQKAELIALTKALELSKGKKANIYTDSRYAFATAHTHGSIYERRGWLTSEGKEIKNKAEIIALLKALFLPQEVAIIHCPGHQKGQDPVAVGNRQADRVARQAAMAEVLTLATEPDNTSHITAGKRTADGSEFEKRTADGSEFESPKKKAKVE

SEQ ID NO: 1975 - protein, 2102 aa, synthetic construct
MPAAKRVKLDGGDKKYSIGLDIGTNSVGWAVITDEYKVPSKKFKVLGNTDRHSIKKNLIGALLFDSGETAEATRLKRTARRRYTRRKNRICYLQEIFSNEMAKVDDSFFHRLEESFLVEEDKKHERHPIFGNIVDEVAYHEKYPTIYHLRKKLVDSTDKADLRLIYLALAHMIKFRGHFLIEGDLNPDNSDVDKLFIQLVQTYNQLFEENPINASGVDAKAILSARLSKSRRLENLIAQLPGEKKNGLFGNLIALSLGLTPNFKSNFDLAEDAKLQLSKDTYDDDLDNLLAQIGDQYADLFLAAKNLSDAILLSDILRVNTEITKAPLSASMIKRYDEHHQDLTLLKALVRQQLPEKYKEIFFDQSKNGYAGYIDGGASQEEFYKFIKPILEKMDGTEELLVKLNREDLLRKQRTFDNGSIPHQIHLGELHAILRRQEDFYPFLKDNREKIEKILTFRIPYYVGPLARGNSRFAWMTRKSEETITPWNFEEVVDKGASAQSFIERMTNFDKNLPNEKVLPKHSLLYEYFTVYNELTKVKYVTEGMRKPAFLSGEQKKAIVDLLFKTNRKVTVKQLKEDYFKKIECFDSVEISGVEDRFNASLGTYHDLLKIIKDKDFLDNEENEDILEDIVLTLTLFEDREMIEERLKTYAHLFDDKVMKQLKRRRYTGWGRLSRKLINGIRDKQSGKTILDFLKSDGFANRNFMQLIHDDSLTFKEDIQKAQVSGQGDSLHEHIANLAGSPAIKKGILQTVKVVDELVKVMGRHKPENIVIEMARENQTTQKGQKNSRERMKRIEEGIKELGSQILKEHPVENTQLQNEKLYLYYLQNGRDMYVDQELDINRLSDYDVDHIVPQSFLKDDSIDNKVLTRSDKARGKSDNVPSEEVVKKMKNYWRQLLNAKLITQRKFDNLTKAERGGLSELDKAGFIKRQLVETRQITKHVAQILDSRMNTKYDENDKLIREVKVITLKSKLVSDFRKDFQFYKVREINNYHHAHDAYLNAVVGTALIKKYPKLESEFVYGDYKVYDVRKMIAKSEQEIGKATAKYFFYSNIMNFFKTEITLANGEIRKRPLIETNGETGEIVWDKGRDFATVRKVLSMPQVNIVKKTEVQTGGFSKESILPKRNSDKLIARKKDWDPKKYGGFDSPTVAYSVLVVAKVEKGKSKKLKSVKELLGITIMERSSFEKNPIDFLEAKGYKEVKKDLIIKLPKYSLFELENGRKRMLASAGELQKGNELALPSKYVNFLYLASHYEKLKGSPEDNEQKQLFVEQHKHYLDEIIEQISEFSKRVILADANLDKVLSAYNKHRDKPIREQAENIIHLFTLTNLGAPAAFKYFDTTIDRKRYTSTKEVLDATLIHQSITGLYETRIDLSQLGGDGGGGGGSSEAAAKGGTVSLQDEHRLFDIPVTTSLPDVWLQDFPQAWAETGGLGRAKCQAPIIIDLKPTAVPVSIKQYPMSLEAHMGIRQHIIKFLELGVLRPCRSPWNTPLLPVKKPGTQDYRPVQDLREINKRTVDIHPTVPNPYNLLSTLKPDYSWYTVLDLKDAFFCLPLAPQSQELFAFEWKDPERGISGQLTWTRLPQGFKNSPTLFNEALHRDLTDFRTQHPEVTLLQYVDDLLLAAPTKKACTQGTRHLLQELGEKGYRASAKKAQICQTKVTYLGYILSEGKRWLTPGRIETVARIPPPRNPREVREFLGKAGFCRLFIPGFAELAAPLYALTKPSTPFTWQTEHQLAFEALKKALLSAPALGLPDTSKPFTLFLDERQGIAKGVLTQKLGPWKRPVAYLSKKLDPVAAGWPPCLRIMAATAMLVKDSAKLTLGQPLTVITPHTLEAIVRQPPDRWITNARLTHYQALLLDTDRVQFGPPVTLNPATLLPVPENQPSPHDCRQVLAETHGTREDLKDQELPDADHTWYTDGSSYLDSGTRRAGAAVVDGHNTIWAQSLPPGTSAQKAELIALTKALELSKGKKANIYTDSRYAFATAHTHGSIYERRGWLTSEGKEIKNKAEIIALLKALFLPQEVAIIHCPGHQKGQDPVAVGNRQADRVARQAAMAEVLTLATEPDNTSHITAGKRTADGSEFEKRTADGSEFESPKKKAKVE

SEQ ID NO: 1976 - protein, 2100 aa, synthetic construct
MPAAKRVKLDGGDKKYSIGLDIGTNSVGWAVITDEYKVPSKKFKVLGNTDRHSIKKNLIGALLFDSGETAEATRLKRTARRRYTRRKNRICYLQEIFSNEMAKVDDSFFHRLEESFLVEEDKKHERHPIFGNIVDEVAYHEKYPTIYHLRKKLVDSTDKADLRLIYLALAHMIKFRGHFLIEGDLNPDNSDVDKLFIQLVQTYNQLFEENPINASGVDAKAILSARLSKSRRLENLIAQLPGEKKNGLFGNLIALSLGLTPNFKSNFDLAEDAKLQLSKDTYDDDLDNLLAQIGDQYADLFLAAKNLSDAILLSDILRVNTEITKAPLSASMIKRYDEHHQDLTLLKALVRQQLPEKYKEIFFDQSKNGYAGYIDGGASQEEFYKFIKPILEKMDGTEELLVKLNREDLLRKQRTFDNGSIPHQIHLGELHAILRRQEDFYPFLKDNREKIEKILTFRIPYYVGPLARGNSRFAWMTRKSEETITPWNFEEVVDKGASAQSFIERMTNFDKNLPNEKVLPKHSLLYEYFTVYNELTKVKYVTEGMRKPAFLSGEQKKAIVDLLFKTNRKVTVKQLKEDYFKKIECFDSVEISGVEDRFNASLGTYHDLLKIIKDKDFLDNEENEDILEDIVLTLTLFEDREMIEERLKTYAHLFDDKVMKQLKRRRYTGWGRLSRKLINGIRDKQSGKTILDFLKSDGFANRNFMQLIHDDSLTFKEDIQKAQVSGQGDSLHEHIANLAGSPAIKKGILQTVKVVDELVKVMGRHKPENIVIEMARENQTTQKGQKNSRERMKRIEEGIKELGSQILKEHPVENTQLQNEKLYLYYLQNGRDMYVDQELDINRLSDYDVDHIVPQSFLKDDSIDNKVLTRSDKARGKSDNVPSEEVVKKMKNYWRQLLNAKLITQRKFDNLTKAERGGLSELDKAGFIKRQLVETRQITKHVAQILDSRMNTKYDENDKLIREVKVITLKSKLVSDFRKDFQFYKVREINNYHHAHDAYLNAVVGTALIKKYPKLESEFVYGDYKVYDVRKMIAKSEQEIGKATAKYFFYSNIMNFFKTEITLANGEIRKRPLIETNGETGEIVWDKGRDFATVRKVLSMPQVNIVKKTEVQTGGFSKESILPKRNSDKLIARKKDWDPKKYGGFDSPTVAYSVLVVAKVEKGKSKKLKSVKELLGITIMERSSFEKNPIDFLEAKGYKEVKKDLIIKLPKYSLFELENGRKRMLASAGELQKGNELALPSKYVNFLYLASHYEKLKGSPEDNEQKQLFVEQHKHYLDEIIEQISEFSKRVILADANLDKVLSAYNKHRDKPIREQAENIIHLFTLTNLGAPAAFKYFDTTIDRKRYTSTKEVLDATLIHQSITGLYETRIDLSQLGGDGGGGSPAPGGGGGTVSLQDEHRLFDIPVTTSLPDVWLQDFPQAWAETGGLGRAKCQAPIIIDLKPTAVPVSIKQYPMSLEAHMGIRQHIIKFLELGVLRPCRSPWNTPLLPVKKPGTQDYRPVQDLREINKRTVDIHPTVPNPYNLLSTLKPDYSWYTVLDLKDAFFCLPLAPQSQELFAFEWKDPERGISGQLTWTRLPQGFKNSPTLFNEALHRDLTDFRTQHPEVTLLQYVDDLLLAAPTKKACTQGTRHLLQELGEKGYRASAKKAQICQTKVTYLGYILSEGKRWLTPGRIETVARIPPPRNPREVREFLGKAGFCRLFIPGFAELAAPLYALTKPSTPFTWQTEHQLAFEALKKALLSAPALGLPDTSKPFTLFLDERQGIAKGVLTQKLGPWKRPVAYLSKKLDPVAAGWPPCLRIMAATAMLVKDSAKLTLGQPLTVITPHTLEAIVRQPPDRWITNARLTHYQALLLDTDRVQFGPPVTLNPATLLPVPENQPSPHDCRQVLAETHGTREDLKDQELPDADHTWYTDGSSYLDSGTRRAGAAVVDGHNTIWAQSLPPGTSAQKAELIALTKALELSKGKKANIYTDSRYAFATAHTHGSIYERRGWLTSEGKEIKNKAEIIALLKALFLPQEVAIIHCPGHQKGQDPVAVGNRQADRVARQAAMAEVLTLATEPDNTSHITAGKRTADGSEFEKRTADGSEFESPKKKAKVE

SEQ ID NO: 1977 - protein, 2102 aa, synthetic construct
MPAAKRVKLDGGDKKYSIGLDIGTNSVGWAVITDEYKVPSKKFKVLGNTDRHSIKKNLIGALLFDSGETAEATRLKRTARRRYTRRKNRICYLQEIFSNEMAKVDDSFFHRLEESFLVEEDKKHERHPIFGNIVDEVAYHEKYPTIYHLRKKLVDSTDKADLRLIYLALAHMIKFRGHFLIEGDLNPDNSDVDKLFIQLVQTYNQLFEENPINASGVDAKAILSARLSKSRRLENLIAQLPGEKKNGLFGNLIALSLGLTPNFKSNFDLAEDAKLQLSKDTYDDDLDNLLAQIGDQYADLFLAAKNLSDAILLSDILRVNTEITKAPLSASMIKRYDEHHQDLTLLKALVRQQLPEKYKEIFFDQSKNGYAGYIDGGASQEEFYKFIKPILEKMDGTEELLVKLNREDLLRKQRTFDNGSIPHQIHLGELHAILRRQEDFYPFLKDNREKIEKILTFRIPYYVGPLARGNSRFAWMTRKSEETITPWNFEEVVDKGASAQSFIERMTNFDKNLPNEKVLPKHSLLYEYFTVYNELTKVKYVTEGMRKPAFLSGEQKKAIVDLLFKTNRKVTVKQLKEDYFKKIECFDSVEISGVEDRFNASLGTYHDLLKIIKDKDFLDNEENEDILEDIVLTLTLFEDREMIEERLKTYAHLFDDKVMKQLKRRRYTGWGRLSRKLINGIRDKQSGKTILDFLKSDGFANRNFMQLIHDDSLTFKEDIQKAQVSGQGDSLHEHIANLAGSPAIKKGILQTVKVVDELVKVMGRHKPENIVIEMARENQTTQKGQKNSRERMKRIEEGIKELGSQILKEHPVENTQLQNEKLYLYYLQNGRDMYVDQELDINRLSDYDVDHIVPQSFLKDDSIDNKVLTRSDKARGKSDNVPSEEVVKKMKNYWRQLLNAKLITQRKFDNLTKAERGGLSELDKAGFIKRQLVETRQITKHVAQILDSRMNTKYDENDKLIREVKVITLKSKLVSDFRKDFQFYKVREINNYHHAHDAYLNAVVGTALIKKYPKLESEFVYGDYKVYDVRKMIAKSEQEIGKATAKYFFYSNIMNFFKTEITLANGEIRKRPLIETNGETGEIVWDKGRDFATVRKVLSMPQVNIVKKTEVQTGGFSKESILPKRNSDKLIARKKDWDPKKYGGFDSPTVAYSVLVVAKVEKGKSKKLKSVKELLGITIMERSSFEKNPIDFLEAKGYKEVKKDLIIKLPKYSLFELENGRKRMLASAGELQKGNELALPSKYVNFLYLASHYEKLKGSPEDNEQKQLFVEQHKHYLDEIIEQISEFSKRVILADANLDKVLSAYNKHRDKPIREQAENIIHLFTLTNLGAPAAFKYFDTTIDRKRYTSTKEVLDATLIHQSITGLYETRIDLSQLGGDGGPAPGGGEAAAKGGTVSLQDEHRLFDIPVTTSLPDVWLQDFPQAWAETGGLGRAKCQAPIIIDLKPTAVPVSIKQYPMSLEAHMGIRQHIIKFLELGVLRPCRSPWNTPLLPVKKPGTQDYRPVQDLREINKRTVDIHPTVPNPYNLLSTLKPDYSWYTVLDLKDAFFCLPLAPQSQELFAFEWKDPERGISGQLTWTRLPQGFKNSPTLFNEALHRDLTDFRTQHPEVTLLQYVDDLLLAAPTKKACTQGTRHLLQELGEKGYRASAKKAQICQTKVTYLGYILSEGKRWLTPGRIETVARIPPPRNPREVREFLGKAGFCRLFIPGFAELAAPLYALTKPSTPFTWQTEHQLAFEALKKALLSAPALGLPDTSKPFTLFLDERQGIAKGVLTQKLGPWKRPVAYLSKKLDPVAAGWPPCLRIMAATAMLVKDSAKLTLGQPLTVITPHTLEAIVRQPPDRWITNARLTHYQALLLDTDRVQFGPPVTLNPATLLPVPENQPSPHDCRQVLAETHGTREDLKDQELPDADHTWYTDGSSYLDSGTRRAGAAVVDGHNTIWAQSLPPGTSAQKAELIALTKALELSKGKKANIYTDSRYAFATAHTHGSIYERRGWLTSEGKEIKNKAEIIALLKALFLPQEVAIIHCPGHQKGQDPVAVGNRQADRVARQAAMAEVLTLATEPDNTSHITAGKRTADGSEFEKRTADGSEFESPKKKAKVE

SEQ ID NO: 1978 - protein, 2100 aa, synthetic construct
MPAAKRVKLDGGDKKYSIGLDIGTNSVGWAVITDEYKVPSKKFKVLGNTDRHSIKKNLIGALLFDSGETAEATRLKRTARRRYTRRKNRICYLQEIFSNEMAKVDDSFFHRLEESFLVEEDKKHERHPIFGNIVDEVAYHEKYPTIYHLRKKLVDSTDKADLRLIYLALAHMIKFRGHFLIEGDLNPDNSDVDKLFIQLVQTYNQLFEENPINASGVDAKAILSARLSKSRRLENLIAQLPGEKKNGLFGNLIALSLGLTPNFKSNFDLAEDAKLQLSKDTYDDDLDNLLAQIGDQYADLFLAAKNLSDAILLSDILRVNTEITKAPLSASMIKRYDEHHQDLTLLKALVRQQLPEKYKEIFFDQSKNGYAGYIDGGASQEEFYKFIKPILEKMDGTEELLVKLNREDLLRKQRTFDNGSIPHQIHLGELHAILRRQEDFYPFLKDNREKIEKILTFRIPYYVGPLARGNSRFAWMTRKSEETITPWNFEEVVDKGASAQSFIERMTNFDKNLPNEKVLPKHSLLYEYFTVYNELTKVKYVTEGMRKPAFLSGEQKKAIVDLLFKTNRKVTVKQLKEDYFKKIECFDSVEISGVEDRFNASLGTYHDLLKIIKDKDFLDNEENEDILEDIVLTLTLFEDREMIEERLKTYAHLFDDKVMKQLKRRRYTGWGRLSRKLINGIRDKQSGKTILDFLKSDGFANRNFMQLIHDDSLTFKEDIQKAQVSGQGDSLHEHIANLAGSPAIKKGILQTVKVVDELVKVMGRHKPENIVIEMARENQTTQKGQKNSRERMKRIEEGIKELGSQILKEHPVENTQLQNEKLYLYYLQNGRDMYVDQELDINRLSDYDVDHIVPQSFLKDDSIDNKVLTRSDKARGKSDNVPSEEVVKKMKNYWRQLLNAKLITQRKFDNLTKAERGGLSELDKAGFIKRQLVETRQITKHVAQILDSRMNTKYDENDKLIREVKVITLKSKLVSDFRKDFQFYKVREINNYHHAHDAYLNAVVGTALIKKYPKLESEFVYGDYKVYDVRKMIAKSEQEIGKATAKYFFYSNIMNFFKTEITLANGEIRKRPLIETNGETGEIVWDKGRDFATVRKVLSMPQVNIVKKTEVQTGGFSKESILPKRNSDKLIARKKDWDPKKYGGFDSPTVAYSVLVVAKVEKGKSKKLKSVKELLGITIMERSSFEKNPIDFLEAKGYKEVKKDLIIKLPKYSLFELENGRKRMLASAGELQKGNELALPSKYVNFLYLASHYEKLKGSPEDNEQKQLFVEQHKHYLDEIIEQISEFSKRVILADANLDKVLSAYNKHRDKPIREQAENIIHLFTLTNLGAPAAFKYFDTTIDRKRYTSTKEVLDATLIHQSITGLYETRIDLSQLGGDGGPAPAPAPAPGGTVSLQDEHRLFDIPVTTSLPDVWLQDFPQAWAETGGLGRAKCQAPIIIDLKPTAVPVSIKQYPMSLEAHMGIRQHIIKFLELGVLRPCRSPWNTPLLPVKKPGTQDYRPVQDLREINKRTVDIHPTVPNPYNLLSTLKPDYSWYTVLDLKDAFFCLPLAPQSQELFAFEWKDPERGISGQLTWTRLPQGFKNSPTLFNEALHRDLTDFRTQHPEVTLLQYVDDLLLAAPTKKACTQGTRHLLQELGEKGYRASAKKAQICQTKVTYLGYILSEGKRWLTPGRIETVARIPPPRNPREVREFLGKAGFCRLFIPGFAELAAPLYALTKPSTPFTWQTEHQLAFEALKKALLSAPALGLPDTSKPFTLFLDERQGIAKGVLTQKLGPWKRPVAYLSKKLDPVAAGWPPCLRIMAATAMLVKDSAKLTLGQPLTVITPHTLEAIVRQPPDRWITNARLTHYQALLLDTDRVQFGPPVTLNPATLLPVPENQPSPHDCRQVLAETHGTREDLKDQELPDADHTWYTDGSSYLDSGTRRAGAAVVDGHNTIWAQSLPPGTSAQKAELIALTKALELSKGKKANIYTDSRYAFATAHTHGSIYERRGWLTSEGKEIKNKAEIIALLKALFLPQEVAIIHCPGHQKGQDPVAVGNRQADRVARQAAMAEVLTLATEPDNTSHITAGKRTADGSEFEKRTADGSEFESPKKKAKVE

SEQ ID NO: 1979 - protein, 2099 aa, synthetic construct
MPAAKRVKLDGGDKKYSIGLDIGTNSVGWAVITDEYKVPSKKFKVLGNTDRHSIKKNLIGALLFDSGETAEATRLKRTARRRYTRRKNRICYLQEIFSNEMAKVDDSFFHRLEESFLVEEDKKHERHPIFGNIVDEVAYHEKYPTIYHLRKKLVDSTDKADLRLIYLALAHMIKFRGHFLIEGDLNPDNSDVDKLFIQLVQTYNQLFEENPINASGVDAKAILSARLSKSRRLENLIAQLPGEKKNGLFGNLIALSLGLTPNFKSNFDLAEDAKLQLSKDTYDDDLDNLLAQIGDQYADLFLAAKNLSDAILLSDILRVNTEITKAPLSASMIKRYDEHHQDLTLLKALVRQQLPEKYKEIFFDQSKNGYAGYIDGGASQEEFYKFIKPILEKMDGTEELLVKLNREDLLRKQRTFDNGSIPHQIHLGELHAILRRQEDFYPFLKDNREKIEKILTFRIPYYVGPLARGNSRFAWMTRKSEETITPWNFEEVVDKGASAQSFIERMTNFDKNLPNEKVLPKHSLLYEYFTVYNELTKVKYVTEGMRKPAFLSGEQKKAIVDLLFKTNRKVTVKQLKEDYFKKIECFDSVEISGVEDRFNASLGTYHDLLKIIKDKDFLDNEENEDILEDIVLTLTLFEDREMIEERLKTYAHLFDDKVMKQLKRRRYTGWGRLSRKLINGIRDKQSGKTILDFLKSDGFANRNFMQLIHDDSLTFKEDIQKAQVSGQGDSLHEHIANLAGSPAIKKGILQTVKVVDELVKVMGRHKPENIVIEMARENQTTQKGQKNSRERMKRIEEGIKELGSQILKEHPVENTQLQNEKLYLYYLQNGRDMYVDQELDINRLSDYDVDHIVPQSFLKDDSIDNKVLTRSDKARGKSDNVPSEEVVKKMKNYWRQLLNAKLITQRKFDNLTKAERGGLSELDKAGFIKRQLVETRQITKHVAQILDSRMNTKYDENDKLIREVKVITLKSKLVSDFRKDFQFYKVREINNYHHAHDAYLNAVVGTALIKKYPKLESEFVYGDYKVYDVRKMIAKSEQEIGKATAKYFFYSNIMNFFKTEITLANGEIRKRPLIETNGETGEIVWDKGRDFATVRKVLSMPQVNIVKKTEVQTGGFSKESILPKRNSDKLIARKKDWDPKKYGGFDSPTVAYSVLVVAKVEKGKSKKLKSVKELLGITIMERSSFEKNPIDFLEAKGYKEVKKDLIIKLPKYSLFELENGRKRMLASAGELQKGNELALPSKYVNFLYLASHYEKLKGSPEDNEQKQLFVEQHKHYLDEIIEQISEFSKRVILADANLDKVLSAYNKHRDKPIREQAENIIHLFTLTNLGAPAAFKYFDTTIDRKRYTSTKEVLDATLIHQSITGLYETRIDLSQLGGDGGGGGGGGGGGGTVSLQDEHRLFDIPVTTSLPDVWLQDFPQAWAETGGLGRAKCQAPIIIDLKPTAVPVSIKQYPMSLEAHMGIRQHIIKFLELGVLRPCRSPWNTPLLPVKKPGTQDYRPVQDLREINKRTVDIHPTVPNPYNLLSTLKPDYSWYTVLDLKDAFFCLPLAPQSQELFAFEWKDPERGISGQLTWTRLPQGFKNSPTLFNEALHRDLTDFRTQHPEVTLLQYVDDLLLAAPTKKACTQGTRHLLQELGEKGYRASAKKAQICQTKVTYLGYILSEGKRWLTPGRIETVARIPPPRNPREVREFLGKAGFCRLFIPGFAELAAPLYALTKPSTPFTWQTEHQLAFEALKKALLSAPALGLPDTSKPFTLFLDERQGIAKGVLTQKLGPWKRPVAYLSKKLDPVAAGWPPCLRIMAATAMLVKDSAKLTLGQPLTVITPHTLEAIVRQPPDRWITNARLTHYQALLLDTDRVQFGPPVTLNPATLLPVPENQPSPHDCRQVLAETHGTREDLKDQELPDADHTWYTDGSSYLDSGTRRAGAAVVDGHNTIWAQSLPPGTSAQKAELIALTKALELSKGKKANIYTDSRYAFATAHTHGSIYERRGWLTSEGKEIKNKAEIIALLKALFLPQEVAIIHCPGHQKGQDPVAVGNRQADRVARQAAMAEVLTLATEPDNTSHITAGKRTADGSEFEKRTADGSEFESPKKKAKVE

SEQ ID NO: 1980 - protein, 2107 aa, synthetic construct
MPAAKRVKLDGGDKKYSIGLDIGTNSVGWAVITDEYKVPSKKFKVLGNTDRHSIKKNLIGALLFDSGETAEATRLKRTARRRYTRRKNRICYLQEIFSNEMAKVDDSFFHRLEESFLVEEDKKHERHPIFGNIVDEVAYHEKYPTIYHLRKKLVDSTDKADLRLIYLALAHMIKFRGHFLIEGDLNPDNSDVDKLFIQLVQTYNQLFEENPINASGVDAKAILSARLSKSRRLENLIAQLPGEKKNGLFGNLIALSLGLTPNFKSNFDLAEDAKLQLSKDTYDDDLDNLLAQIGDQYADLFLAAKNLSDAILLSDILRVNTEITKAPLSASMIKRYDEHHQDLTLLKALVRQQLPEKYKEIFFDQSKNGYAGYIDGGASQEEFYKFIKPILEKMDGTEELLVKLNREDLLRKQRTFDNGSIPHQIHLGELHAILRRQEDFYPFLKDNREKIEKILTFRIPYYVGPLARGNSRFAWMTRKSEETITPWNFEEVVDKGASAQSFIERMTNFDKNLPNEKVLPKHSLLYEYFTVYNELTKVKYVTEGMRKPAFLSGEQKKAIVDLLFKTNRKVTVKQLKEDYFKKIECFDSVEISGVEDRFNASLGTYHDLLKIIKDKDFLDNEENEDILEDIVLTLTLFEDREMIEERLKTYAHLFDDKVMKQLKRRRYTGWGRLSRKLINGIRDKQSGKTILDFLKSDGFANRNFMQLIHDDSLTFKEDIQKAQVSGQGDSLHEHIANLAGSPAIKKGILQTVKVVDELVKVMGRHKPENIVIEMARENQTTQKGQKNSRERMKRIEEGIKELGSQILKEHPVENTQLQNEKLYLYYLQNGRDMYVDQELDINRLSDYDVDHIVPQSFLKDDSIDNKVLTRSDKARGKSDNVPSEEVVKKMKNYWRQLLNAKLITQRKFDNLTKAERGGLSELDKAGFIKRQLVETRQITKHVAQILDSRMNTKYDENDKLIREVKVITLKSKLVSDFRKDFQFYKVREINNYHHAHDAYLNAVVGTALIKKYPKLESEFVYGDYKVYDVRKMIAKSEQEIGKATAKYFFYSNIMNFFKTEITLANGEIRKRPLIETNGETGEIVWDKGRDFATVRKVLSMPQVNIVKKTEVQTGGFSKESILPKRNSDKLIARKKDWDPKKYGGFDSPTVAYSVLVVAKVEKGKSKKLKSVKELLGITIMERSSFEKNPIDFLEAKGYKEVKKDLIIKLPKYSLFELENGRKRMLASAGELQKGNELALPSKYVNFLYLASHYEKLKGSPEDNEQKQLFVEQHKHYLDEIIEQISEFSKRVILADANLDKVLSAYNKHRDKPIREQAENIIHLFTLTNLGAPAAFKYFDTTIDRKRYTSTKEVLDATLIHQSITGLYETRIDLSQLGGDGGSGSETPGTSESATPESGGTVSLQDEHRLFDIPVTTSLPDVWLQDFPQAWAETGGLGRAKCQAPIIIDLKPTAVPVSIKQYPMSLEAHMGIRQHIIKFLELGVLRPCRSPWNTPLLPVKKPGTQDYRPVQDLREINKRTVDIHPTVPNPYNLLSTLKPDYSWYTVLDLKDAFFCLPLAPQSQELFAFEWKDPERGISGQLTWTRLPQGFKNSPTLFNEALHRDLTDFRTQHPEVTLLQYVDDLLLAAPTKKACTQGTRHLLQELGEKGYRASAKKAQICQTKVTYLGYILSEGKRWLTPGRIETVARIPPPRNPREVREFLGKAGFCRLFIPGFAELAAPLYALTKPSTPFTWQTEHQLAFEALKKALLSAPALGLPDTSKPFTLFLDERQGIAKGVLTQKLGPWKRPVAYLSKKLDPVAAGWPPCLRIMAATAMLVKDSAKLTLGQPLTVITPHTLEAIVRQPPDRWITNARLTHYQALLLDTDRVQFGPPVTLNPATLLPVPENQPSPHDCRQVLAETHGTREDLKDQELPDADHTWYTDGSSYLDSGTRRAGAAVVDGHNTIWAQSLPPGTSAQKAELIALTKALELSKGKKANIYTDSRYAFATAHTHGSIYERRGWLTSEGKEIKNKAEIIALLKALFLPQEVAIIHCPGHQKGQDPVAVGNRQADRVARQAAMAEVLTLATEPDNTSHITAGKRTADGSEFEKRTADGSEFESPKKKAKVE

SEQ ID NO: 1981 - protein, 2102 aa, synthetic construct
MPAAKRVKLDGGDKKYSIGLDIGTNSVGWAVITDEYKVPSKKFKVLGNTDRHSIKKNLIGALLFDSGETAEATRLKRTARRRYTRRKNRICYLQEIFSNEMAKVDDSFFHRLEESFLVEEDKKHERHPIFGNIVDEVAYHEKYPTIYHLRKKLVDSTDKADLRLIYLALAHMIKFRGHFLIEGDLNPDNSDVDKLFIQLVQTYNQLFEENPINASGVDAKAILSARLSKSRRLENLIAQLPGEKKNGLFGNLIALSLGLTPNFKSNFDLAEDAKLQLSKDTYDDDLDNLLAQIGDQYADLFLAAKNLSDAILLSDILRVNTEITKAPLSASMIKRYDEHHQDLTLLKALVRQQLPEKYKEIFFDQSKNGYAGYIDGGASQEEFYKFIKPILEKMDGTEELLVKLNREDLLRKQRTFDNGSIPHQIHLGELHAILRRQEDFYPFLKDNREKIEKILTFRIPYYVGPLARGNSRFAWMTRKSEETITPWNFEEVVDKGASAQSFIERMTNFDKNLPNEKVLPKHSLLYEYFTVYNELTKVKYVTEGMRKPAFLSGEQKKAIVDLLFKTNRKVTVKQLKEDYFKKIECFDSVEISGVEDRFNASLGTYHDLLKIIKDKDFLDNEENEDILEDIVLTLTLFEDREMIEERLKTYAHLFDDKVMKQLKRRRYTGWGRLSRKLINGIRDKQSGKTILDFLKSDGFANRNFMQLIHDDSLTFKEDIQKAQVSGQGDSLHEHIANLAGSPAIKKGILQTVKVVDELVKVMGRHKPENIVIEMARENQTTQKGQKNSRERMKRIEEGIKELGSQILKEHPVENTQLQNEKLYLYYLQNGRDMYVDQELDINRLSDYDVDHIVPQSFLKDDSIDNKVLTRSDKARGKSDNVPSEEVVKKMKNYWRQLLNAKLITQRKFDNLTKAERGGLSELDKAGFIKRQLVETRQITKHVAQILDSRMNTKYDENDKLIREVKVITLKSKLVSDFRKDFQFYKVREINNYHHAHDAYLNAVVGTALIKKYPKLESEFVYGDYKVYDVRKMIAKSEQEIGKATAKYFFYSNIMNFFKTEITLANGEIRKRPLIETNGETGEIVWDKGRDFATVRKVLSMPQVNIVKKTEVQTGGFSKESILPKRNSDKLIARKKDWDPKKYGGFDSPTVAYSVLVVAKVEKGKSKKLKSVKELLGITIMERSSFEKNPIDFLEAKGYKEVKKDLIIKLPKYSLFELENGRKRMLASAGELQKGNELALPSKYVNFLYLASHYEKLKGSPEDNEQKQLFVEQHKHYLDEIIEQISEFSKRVILADANLDKVLSAYNKHRDKPIREQAENIIHLFTLTNLGAPAAFKYFDTTIDRKRYTSTKEVLDATLIHQSITGLYETRIDLSQLGGDGGGSSPAPEAAAKGGTVSLQDEHRLFDIPVTTSLPDVWLQDFPQAWAETGGLGRAKCQAPIIIDLKPTAVPVSIKQYPMSLEAHMGIRQHIIKFLELGVLRPCRSPWNTPLLPVKKPGTQDYRPVQDLREINKRTVDIHPTVPNPYNLLSTLKPDYSWYTVLDLKDAFFCLPLAPQSQELFAFEWKDPERGISGQLTWTRLPQGFKNSPTLFNEALHRDLTDFRTQHPEVTLLQYVDDLLLAAPTKKACTQGTRHLLQELGEKGYRASAKKAQICQTKVTYLGYILSEGKRWLTPGRIETVARIPPPRNPREVREFLGKAGFCRLFIPGFAELAAPLYALTKPSTPFTWQTEHQLAFEALKKALLSAPALGLPDTSKPFTLFLDERQGIAKGVLTQKLGPWKRPVAYLSKKLDPVAAGWPPCLRIMAATAMLVKDSAKLTLGQPLTVITPHTLEAIVRQPPDRWITNARLTHYQALLLDTDRVQFGPPVTLNPATLLPVPENQPSPHDCRQVLAETHGTREDLKDQELPDADHTWYTDGSSYLDSGTRRAGAAVVDGHNTIWAQSLPPGTSAQKAELIALTKALELSKGKKANIYTDSRYAFATAHTHGSIYERRGWLTSEGKEIKNKAEIIALLKALFLPQEVAIIHCPGHQKGQDPVAVGNRQADRVARQAAMAEVLTLATEPDNTSHITAGKRTADGSEFEKRTADGSEFESPKKKAKVE

SEQ ID NO: 1982 - protein, 2100 aa, synthetic construct
MPAAKRVKLDGGDKKYSIGLDIGTNSVGWAVITDEYKVPSKKFKVLGNTDRHSIKKNLIGALLFDSGETAEATRLKRTARRRYTRRKNRICYLQEIFSNEMAKVDDSFFHRLEESFLVEEDKKHERHPIFGNIVDEVAYHEKYPTIYHLRKKLVDSTDKADLRLIYLALAHMIKFRGHFLIEGDLNPDNSDVDKLFIQLVQTYNQLFEENPINASGVDAKAILSARLSKSRRLENLIAQLPGEKKNGLFGNLIALSLGLTPNFKSNFDLAEDAKLQLSKDTYDDDLDNLLAQIGDQYADLFLAAKNLSDAILLSDILRVNTEITKAPLSASMIKRYDEHHQDLTLLKALVRQQLPEKYKEIFFDQSKNGYAGYIDGGASQEEFYKFIKPILEKMDGTEELLVKLNREDLLRKQRTFDNGSIPHQIHLGELHAILRRQEDFYPFLKDNREKIEKILTFRIPYYVGPLARGNSRFAWMTRKSEETITPWNFEEVVDKGASAQSFIERMTNFDKNLPNEKVLPKHSLLYEYFTVYNELTKVKYVTEGMRKPAFLSGEQKKAIVDLLFKTNRKVTVKQLKEDYFKKIECFDSVEISGVEDRFNASLGTYHDLLKIIKDKDFLDNEENEDILEDIVLTLTLFEDREMIEERLKTYAHLFDDKVMKQLKRRRYTGWGRLSRKLINGIRDKQSGKTILDFLKSDGFANRNFMQLIHDDSLTFKEDIQKAQVSGQGDSLHEHIANLAGSPAIKKGILQTVKVVDELVKVMGRHKPENIVIEMARENQTTQKGQKNSRERMKRIEEGIKELGSQILKEHPVENTQLQNEKLYLYYLQNGRDMYVDQELDINRLSDYDVDHIVPQSFLKDDSIDNKVLTRSDKARGKSDNVPSEEVVKKMKNYWRQLLNAKLITQRKFDNLTKAERGGLSELDKAGFIKRQLVETRQITKHVAQILDSRMNTKYDENDKLIREVKVITLKSKLVSDFRKDFQFYKVREINNYHHAHDAYLNAVVGTALIKKYPKLESEFVYGDYKVYDVRKMIAKSEQEIGKATAKYFFYSNIMNFFKTEITLANGEIRKRPLIETNGETGEIVWDKGRDFATVRKVLSMPQVNIVKKTEVQTGGFSKESILPKRNSDKLIARKKDWDPKKYGGFDSPTVAYSVLVVAKVEKGKSKKLKSVKELLGITIMERSSFEKNPIDFLEAKGYKEVKKDLIIKLPKYSLFELENGRKRMLASAGELQKGNELALPSKYVNFLYLASHYEKLKGSPEDNEQKQLFVEQHKHYLDEIIEQISEFSKRVILADANLDKVLSAYNKHRDKPIREQAENIIHLFTLTNLGAPAAFKYFDTTIDRKRYTSTKEVLDATLIHQSITGLYETRIDLSQLGGDGGGSSGGGGGSGGTVSLQDEHRLFDIPVTTSLPDVWLQDFPQAWAETGGLGRAKCQAPIIIDLKPTAVPVSIKQYPMSLEAHMGIRQHIIKFLELGVLRPCRSPWNTPLLPVKKPGTQDYRPVQDLREINKRTVDIHPTVPNPYNLLSTLKPDYSWYTVLDLKDAFFCLPLAPQSQELFAFEWKDPERGISGQLTWTRLPQGFKNSPTLFNEALHRDLTDFRTQHPEVTLLQYVDDLLLAAPTKKACTQGTRHLLQELGEKGYRASAKKAQICQTKVTYLGYILSEGKRWLTPGRIETVARIPPPRNPREVREFLGKAGFCRLFIPGFAELAAPLYALTKPSTPFTWQTEHQLAFEALKKALLSAPALGLPDTSKPFTLFLDERQGIAKGVLTQKLGPWKRPVAYLSKKLDPVAAGWPPCLRIMAATAMLVKDSAKLTLGQPLTVITPHTLEAIVRQPPDRWITNARLTHYQALLLDTDRVQFGPPVTLNPATLLPVPENQPSPHDCRQVLAETHGTREDLKDQELPDADHTWYTDGSSYLDSGTRRAGAAVVDGHNTIWAQSLPPGTSAQKAELIALTKALELSKGKKANIYTDSRYAFATAHTHGSIYERRGWLTSEGKEIKNKAEIIALLKALFLPQEVAIIHCPGHQKGQDPVAVGNRQADRVARQAAMAEVLTLATEPDNTSHITAGKRTADGSEFEKRTADGSEFESPKKKAKVE

SEQ ID NO: 1983 - protein, 2097 aa, synthetic construct
MPAAKRVKLDGGDKKYSIGLDIGTNSVGWAVITDEYKVPSKKFKVLGNTDRHSIKKNLIGALLFDSGETAEATRLKRTARRRYTRRKNRICYLQEIFSNEMAKVDDSFFHRLEESFLVEEDKKHERHPIFGNIVDEVAYHEKYPTIYHLRKKLVDSTDKADLRLIYLALAHMIKFRGHFLIEGDLNPDNSDVDKLFIQLVQTYNQLFEENPINASGVDAKAILSARLSKSRRLENLIAQLPGEKKNGLFGNLIALSLGLTPNFKSNFDLAEDAKLQLSKDTYDDDLDNLLAQIGDQYADLFLAAKNLSDAILLSDILRVNTEITKAPLSASMIKRYDEHHQDLTLLKALVRQQLPEKYKEIFFDQSKNGYAGYIDGGASQEEFYKFIKPILEKMDGTEELLVKLNREDLLRKQRTFDNGSIPHQIHLGELHAILRRQEDFYPFLKDNREKIEKILTFRIPYYVGPLARGNSRFAWMTRKSEETITPWNFEEVVDKGASAQSFIERMTNFDKNLPNEKVLPKHSLLYEYFTVYNELTKVKYVTEGMRKPAFLSGEQKKAIVDLLFKTNRKVTVKQLKEDYFKKIECFDSVEISGVEDRFNASLGTYHDLLKIIKDKDFLDNEENEDILEDIVLTLTLFEDREMIEERLKTYAHLFDDKVMKQLKRRRYTGWGRLSRKLINGIRDKQSGKTILDFLKSDGFANRNFMQLIHDDSLTFKEDIQKAQVSGQGDSLHEHIANLAGSPAIKKGILQTVKVVDELVKVMGRHKPENIVIEMARENQTTQKGQKNSRERMKRIEEGIKELGSQILKEHPVENTQLQNEKLYLYYLQNGRDMYVDQELDINRLSDYDVDHIVPQSFLKDDSIDNKVLTRSDKARGKSDNVPSEEVVKKMKNYWRQLLNAKLITQRKFDNLTKAERGGLSELDKAGFIKRQLVETRQITKHVAQILDSRMNTKYDENDKLIREVKVITLKSKLVSDFRKDFQFYKVREINNYHHAHDAYLNAVVGTALIKKYPKLESEFVYGDYKVYDVRKMIAKSEQEIGKATAKYFFYSNIMNFFKTEITLANGEIRKRPLIETNGETGEIVWDKGRDFATVRKVLSMPQVNIVKKTEVQTGGFSKESILPKRNSDKLIARKKDWDPKKYGGFDSPTVAYSVLVVAKVEKGKSKKLKSVKELLGITIMERSSFEKNPIDFLEAKGYKEVKKDLIIKLPKYSLFELENGRKRMLASAGELQKGNELALPSKYVNFLYLASHYEKLKGSPEDNEQKQLFVEQHKHYLDEIIEQISEFSKRVILADANLDKVLSAYNKHRDKPIREQAENIIHLFTLTNLGAPAAFKYFDTTIDRKRYTSTKEVLDATLIHQSITGLYETRIDLSQLGGDGGPAPGGGGGTVSLQDEHRLFDIPVTTSLPDVWLQDFPQAWAETGGLGRAKCQAPIIIDLKPTAVPVSIKQYPMSLEAHMGIRQHIIKFLELGVLRPCRSPWNTPLLPVKKPGTQDYRPVQDLREINKRTVDIHPTVPNPYNLLSTLKPDYSWYTVLDLKDAFFCLPLAPQSQELFAFEWKDPERGISGQLTWTRLPQGFKNSPTLFNEALHRDLTDFRTQHPEVTLLQYVDDLLLAAPTKKACTQGTRHLLQELGEKGYRASAKKAQICQTKVTYLGYILSEGKRWLTPGRIETVARIPPPRNPREVREFLGKAGFCRLFIPGFAELAAPLYALTKPSTPFTWQTEHQLAFEALKKALLSAPALGLPDTSKPFTLFLDERQGIAKGVLTQKLGPWKRPVAYLSKKLDPVAAGWPPCLRIMAATAMLVKDSAKLTLGQPLTVITPHTLEAIVRQPPDRWITNARLTHYQALLLDTDRVQFGPPVTLNPATLLPVPENQPSPHDCRQVLAETHGTREDLKDQELPDADHTWYTDGSSYLDSGTRRAGAAVVDGHNTIWAQSLPPGTSAQKAELIALTKALELSKGKKANIYTDSRYAFATAHTHGSIYERRGWLTSEGKEIKNKAEIIALLKALFLPQEVAIIHCPGHQKGQDPVAVGNRQADRVARQAAMAEVLTLATEPDNTSHITAGKRTADGSEFEKRTADGSEFESPKKKAKVE

SEQ ID NO: 1984 - protein, 2102 aa, synthetic construct
MPAAKRVKLDGGDKKYSIGLDIGTNSVGWAVITDEYKVPSKKFKVLGNTDRHSIKKNLIGALLFDSGETAEATRLKRTARRRYTRRKNRICYLQEIFSNEMAKVDDSFFHRLEESFLVEEDKKHERHPIFGNIVDEVAYHEKYPTIYHLRKKLVDSTDKADLRLIYLALAHMIKFRGHFLIEGDLNPDNSDVDKLFIQLVQTYNQLFEENPINASGVDAKAILSARLSKSRRLENLIAQLPGEKKNGLFGNLIALSLGLTPNFKSNFDLAEDAKLQLSKDTYDDDLDNLLAQIGDQYADLFLAAKNLSDAILLSDILRVNTEITKAPLSASMIKRYDEHHQDLTLLKALVRQQLPEKYKEIFFDQSKNGYAGYIDGGASQEEFYKFIKPILEKMDGTEELLVKLNREDLLRKQRTFDNGSIPHQIHLGELHAILRRQEDFYPFLKDNREKIEKILTFRIPYYVGPLARGNSRFAWMTRKSEETITPWNFEEVVDKGASAQSFIERMTNFDKNLPNEKVLPKHSLLYEYFTVYNELTKVKYVTEGMRKPAFLSGEQKKAIVDLLFKTNRKVTVKQLKEDYFKKIECFDSVEISGVEDRFNASLGTYHDLLKIIKDKDFLDNEENEDILEDIVLTLTLFEDREMIEERLKTYAHLFDDKVMKQLKRRRYTGWGRLSRKLINGIRDKQSGKTILDFLKSDGFANRNFMQLIHDDSLTFKEDIQKAQVSGQGDSLHEHIANLAGSPAIKKGILQTVKVVDELVKVMGRHKPENIVIEMARENQTTQKGQKNSRERMKRIEEGIKELGSQILKEHPVENTQLQNEKLYLYYLQNGRDMYVDQELDINRLSDYDVDHIVPQSFLKDDSIDNKVLTRSDKARGKSDNVPSEEVVKKMKNYWRQLLNAKLITQRKFDNLTKAERGGLSELDKAGFIKRQLVETRQITKHVAQILDSRMNTKYDENDKLIREVKVITLKSKLVSDFRKDFQFYKVREINNYHHAHDAYLNAVVGTALIKKYPKLESEFVYGDYKVYDVRKMIAKSEQEIGKATAKYFFYSNIMNFFKTEITLANGEIRKRPLIETNGETGEIVWDKGRDFATVRKVLSMPQVNIVKKTEVQTGGFSKESILPKRNSDKLIARKKDWDPKKYGGFDSPTVAYSVLVVAKVEKGKSKKLKSVKELLGITIMERSSFEKNPIDFLEAKGYKEVKKDLIIKLPKYSLFELENGRKRMLASAGELQKGNELALPSKYVNFLYLASHYEKLKGSPEDNEQKQLFVEQHKHYLDEIIEQISEFSKRVILADANLDKVLSAYNKHRDKPIREQAENIIHLFTLTNLGAPAAFKYFDTTIDRKRYTSTKEVLDATLIHQSITGLYETRIDLSQLGGDGGGGSEAAAKGGGGGTVSLQDEHRLFDIPVTTSLPDVWLQDFPQAWAETGGLGRAKCQAPIIIDLKPTAVPVSIKQYPMSLEAHMGIRQHIIKFLELGVLRPCRSPWNTPLLPVKKPGTQDYRPVQDLREINKRTVDIHPTVPNPYNLLSTLKPDYSWYTVLDLKDAFFCLPLAPQSQELFAFEWKDPERGISGQLTWTRLPQGFKNSPTLFNEALHRDLTDFRTQHPEVTLLQYVDDLLLAAPTKKACTQGTRHLLQELGEKGYRASAKKAQICQTKVTYLGYILSEGKRWLTPGRIETVARIPPPRNPREVREFLGKAGFCRLFIPGFAELAAPLYALTKPSTPFTWQTEHQLAFEALKKALLSAPALGLPDTSKPFTLFLDERQGIAKGVLTQKLGPWKRPVAYLSKKLDPVAAGWPPCLRIMAATAMLVKDSAKLTLGQPLTVITPHTLEAIVRQPPDRWITNARLTHYQALLLDTDRVQFGPPVTLNPATLLPVPENQPSPHDCRQVLAETHGTREDLKDQELPDADHTWYTDGSSYLDSGTRRAGAAVVDGHNTIWAQSLPPGTSAQKAELIALTKALELSKGKKANIYTDSRYAFATAHTHGSIYERRGWLTSEGKEIKNKAEIIALLKALFLPQEVAIIHCPGHQKGQDPVAVGNRQADRVARQAAMAEVLTLATEPDNTSHITAGKRTADGSEFEKRTADGSEFESPKKKAKVE

SEQ ID NO: 1985 - protein, 2100 aa, synthetic construct
MPAAKRVKLDGGDKKYSIGLDIGTNSVGWAVITDEYKVPSKKFKVLGNTDRHSIKKNLIGALLFDSGETAEATRLKRTARRRYTRRKNRICYLQEIFSNEMAKVDDSFFHRLEESFLVEEDKKHERHPIFGNIVDEVAYHEKYPTIYHLRKKLVDSTDKADLRLIYLALAHMIKFRGHFLIEGDLNPDNSDVDKLFIQLVQTYNQLFEENPINASGVDAKAILSARLSKSRRLENLIAQLPGEKKNGLFGNLIALSLGLTPNFKSNFDLAEDAKLQLSKDTYDDDLDNLLAQIGDQYADLFLAAKNLSDAILLSDILRVNTEITKAPLSASMIKRYDEHHQDLTLLKALVRQQLPEKYKEIFFDQSKNGYAGYIDGGASQEEFYKFIKPILEKMDGTEELLVKLNREDLLRKQRTFDNGSIPHQIHLGELHAILRRQEDFYPFLKDNREKIEKILTFRIPYYVGPLARGNSRFAWMTRKSEETITPWNFEEVVDKGASAQSFIERMTNFDKNLPNEKVLPKHSLLYEYFTVYNELTKVKYVTEGMRKPAFLSGEQKKAIVDLLFKTNRKVTVKQLKEDYFKKIECFDSVEISGVEDRFNASLGTYHDLLKIIKDKDFLDNEENEDILEDIVLTLTLFEDREMIEERLKTYAHLFDDKVMKQLKRRRYTGWGRLSRKLINGIRDKQSGKTILDFLKSDGFANRNFMQLIHDDSLTFKEDIQKAQVSGQGDSLHEHIANLAGSPAIKKGILQTVKVVDELVKVMGRHKPENIVIEMARENQTTQKGQKNSRERMKRIEEGIKELGSQILKEHPVENTQLQNEKLYLYYLQNGRDMYVDQELDINRLSDYDVDHIVPQSFLKDDSIDNKVLTRSDKARGKSDNVPSEEVVKKMKNYWRQLLNAKLITQRKFDNLTKAERGGLSELDKAGFIKRQLVETRQITKHVAQILDSRMNTKYDENDKLIREVKVITLKSKLVSDFRKDFQFYKVREINNYHHAHDAYLNAVVGTALIKKYPKLESEFVYGDYKVYDVRKMIAKSEQEIGKATAKYFFYSNIMNFFKTEITLANGEIRKRPLIETNGETGEIVWDKGRDFATVRKVLSMPQVNIVKKTEVQTGGFSKESILPKRNSDKLIARKKDWDPKKYGGFDSPTVAYSVLVVAKVEKGKSKKLKSVKELLGITIMERSSFEKNPIDFLEAKGYKEVKKDLIIKLPKYSLFELENGRKRMLASAGELQKGNELALPSKYVNFLYLASHYEKLKGSPEDNEQKQLFVEQHKHYLDEIIEQISEFSKRVILADANLDKVLSAYNKHRDKPIREQAENIIHLFTLTNLGAPAAFKYFDTTIDRKRYTSTKEVLDATLIHQSITGLYETRIDLSQLGGDGGGSSPAPGGSGGTVSLQDEHRLFDIPVTTSLPDVWLQDFPQAWAETGGLGRAKCQAPIIIDLKPTAVPVSIKQYPMSLEAHMGIRQHIIKFLELGVLRPCRSPWNTPLLPVKKPGTQDYRPVQDLREINKRTVDIHPTVPNPYNLLSTLKPDYSWYTVLDLKDAFFCLPLAPQSQELFAFEWKDPERGISGQLTWTRLPQGFKNSPTLFNEALHRDLTDFRTQHPEVTLLQYVDDLLLAAPTKKACTQGTRHLLQELGEKGYRASAKKAQICQTKVTYLGYILSEGKRWLTPGRIETVARIPPPRNPREVREFLGKAGFCRLFIPGFAELAAPLYALTKPSTPFTWQTEHQLAFEALKKALLSAPALGLPDTSKPFTLFLDERQGIAKGVLTQKLGPWKRPVAYLSKKLDPVAAGWPPCLRIMAATAMLVKDSAKLTLGQPLTVITPHTLEAIVRQPPDRWITNARLTHYQALLLDTDRVQFGPPVTLNPATLLPVPENQPSPHDCRQVLAETHGTREDLKDQELPDADHTWYTDGSSYLDSGTRRAGAAVVDGHNTIWAQSLPPGTSAQKAELIALTKALELSKGKKANIYTDSRYAFATAHTHGSIYERRGWLTSEGKEIKNKAEIIALLKALFLPQEVAIIHCPGHQKGQDPVAVGNRQADRVARQAAMAEVLTLATEPDNTSHITAGKRTADGSEFEKRTADGSEFESPKKKAKVE

SEQ ID NO: 1986 - protein, 2099 aa, synthetic construct
MPAAKRVKLDGGDKKYSIGLDIGTNSVGWAVITDEYKVPSKKFKVLGNTDRHSIKKNLIGALLFDSGETAEATRLKRTARRRYTRRKNRICYLQEIFSNEMAKVDDSFFHRLEESFLVEEDKKHERHPIFGNIVDEVAYHEKYPTIYHLRKKLVDSTDKADLRLIYLALAHMIKFRGHFLIEGDLNPDNSDVDKLFIQLVQTYNQLFEENPINASGVDAKAILSARLSKSRRLENLIAQLPGEKKNGLFGNLIALSLGLTPNFKSNFDLAEDAKLQLSKDTYDDDLDNLLAQIGDQYADLFLAAKNLSDAILLSDILRVNTEITKAPLSASMIKRYDEHHQDLTLLKALVRQQLPEKYKEIFFDQSKNGYAGYIDGGASQEEFYKFIKPILEKMDGTEELLVKLNREDLLRKQRTFDNGSIPHQIHLGELHAILRRQEDFYPFLKDNREKIEKILTFRIPYYVGPLARGNSRFAWMTRKSEETITPWNFEEVVDKGASAQSFIERMTNFDKNLPNEKVLPKHSLLYEYFTVYNELTKVKYVTEGMRKPAFLSGEQKKAIVDLLFKTNRKVTVKQLKEDYFKKIECFDSVEISGVEDRFNASLGTYHDLLKIIKDKDFLDNEENEDILEDIVLTLTLFEDREMIEERLKTYAHLFDDKVMKQLKRRRYTGWGRLSRKLINGIRDKQSGKTILDFLKSDGFANRNFMQLIHDDSLTFKEDIQKAQVSGQGDSLHEHIANLAGSPAIKKGILQTVKVVDELVKVMGRHKPENIVIEMARENQTTQKGQKNSRERMKRIEEGIKELGSQILKEHPVENTQLQNEKLYLYYLQNGRDMYVDQELDINRLSDYDVDHIVPQSFLKDDSIDNKVLTRSDKARGKSDNVPSEEVVKKMKNYWRQLLNAKLITQRKFDNLTKAERGGLSELDKAGFIKRQLVETRQITKHVAQILDSRMNTKYDENDKLIREVKVITLKSKLVSDFRKDFQFYKVREINNYHHAHDAYLNAVVGTALIKKYPKLESEFVYGDYKVYDVRKMIAKSEQEIGKATAKYFFYSNIMNFFKTEITLANGEIRKRPLIETNGETGEIVWDKGRDFATVRKVLSMPQVNIVKKTEVQTGGFSKESILPKRNSDKLIARKKDWDPKKYGGFDSPTVAYSVLVVAKVEKGKSKKLKSVKELLGITIMERSSFEKNPIDFLEAKGYKEVKKDLIIKLPKYSLFELENGRKRMLASAGELQKGNELALPSKYVNFLYLASHYEKLKGSPEDNEQKQLFVEQHKHYLDEIIEQISEFSKRVILADANLDKVLSAYNKHRDKPIREQAENIIHLFTLTNLGAPAAFKYFDTTIDRKRYTSTKEVLDATLIHQSITGLYETRIDLSQLGGDGGEAAAKGGGGGTVSLQDEHRLFDIPVTTSLPDVWLQDFPQAWAETGGLGRAKCQAPIIIDLKPTAVPVSIKQYPMSLEAHMGIRQHIIKFLELGVLRPCRSPWNTPLLPVKKPGTQDYRPVQDLREINKRTVDIHPTVPNPYNLLSTLKPDYSWYTVLDLKDAFFCLPLAPQSQELFAFEWKDPERGISGQLTWTRLPQGFKNSPTLFNEALHRDLTDFRTQHPEVTLLQYVDDLLLAAPTKKACTQGTRHLLQELGEKGYRASAKKAQICQTKVTYLGYILSEGKRWLTPGRIETVARIPPPRNPREVREFLGKAGFCRLFIPGFAELAAPLYALTKPSTPFTWQTEHQLAFEALKKALLSAPALGLPDTSKPFTLFLDERQGIAKGVLTQKLGPWKRPVAYLSKKLDPVAAGWPPCLRIMAATAMLVKDSAKLTLGQPLTVITPHTLEAIVRQPPDRWITNARLTHYQALLLDTDRVQFGPPVTLNPATLLPVPENQPSPHDCRQVLAETHGTREDLKDQELPDADHTWYTDGSSYLDSGTRRAGAAVVDGHNTIWAQSLPPGTSAQKAELIALTKALELSKGKKANIYTDSRYAFATAHTHGSIYERRGWLTSEGKEIKNKAEIIALLKALFLPQEVAIIHCPGHQKGQDPVAVGNRQADRVARQAAMAEVLTLATEPDNTSHITAGKRTADGSEFEKRTADGSEFESPKKKAKVE

SEQ ID NO: 1987 - protein, 2106 aa, synthetic construct
MPAAKRVKLDGGDKKYSIGLDIGTNSVGWAVITDEYKVPSKKFKVLGNTDRHSIKKNLIGALLFDSGETAEATRLKRTARRRYTRRKNRICYLQEIFSNEMAKVDDSFFHRLEESFLVEEDKKHERHPIFGNIVDEVAYHEKYPTIYHLRKKLVDSTDKADLRLIYLALAHMIKFRGHFLIEGDLNPDNSDVDKLFIQLVQTYNQLFEENPINASGVDAKAILSARLSKSRRLENLIAQLPGEKKNGLFGNLIALSLGLTPNFKSNFDLAEDAKLQLSKDTYDDDLDNLLAQIGDQYADLFLAAKNLSDAILLSDILRVNTEITKAPLSASMIKRYDEHHQDLTLLKALVRQQLPEKYKEIFFDQSKNGYAGYIDGGASQEEFYKFIKPILEKMDGTEELLVKLNREDLLRKQRTFDNGSIPHQIHLGELHAILRRQEDFYPFLKDNREKIEKILTFRIPYYVGPLARGNSRFAWMTRKSEETITPWNFEEVVDKGASAQSFIERMTNFDKNLPNEKVLPKHSLLYEYFTVYNELTKVKYVTEGMRKPAFLSGEQKKAIVDLLFKTNRKVTVKQLKEDYFKKIECFDSVEISGVEDRFNASLGTYHDLLKIIKDKDFLDNEENEDILEDIVLTLTLFEDREMIEERLKTYAHLFDDKVMKQLKRRRYTGWGRLSRKLINGIRDKQSGKTILDFLKSDGFANRNFMQLIHDDSLTFKEDIQKAQVSGQGDSLHEHIANLAGSPAIKKGILQTVKVVDELVKVMGRHKPENIVIEMARENQTTQKGQKNSRERMKRIEEGIKELGSQILKEHPVENTQLQNEKLYLYYLQNGRDMYVDQELDINRLSDYDVDHIVPQSFLKDDSIDNKVLTRSDKARGKSDNVPSEEVVKKMKNYWRQLLNAKLITQRKFDNLTKAERGGLSELDKAGFIKRQLVETRQITKHVAQILDSRMNTKYDENDKLIREVKVITLKSKLVSDFRKDFQFYKVREINNYHHAHDAYLNAVVGTALIKKYPKLESEFVYGDYKVYDVRKMIAKSEQEIGKATAKYFFYSNIMNFFKTEITLANGEIRKRPLIETNGETGEIVWDKGRDFATVRKVLSMPQVNIVKKTEVQTGGFSKESILPKRNSDKLIARKKDWDPKKYGGFDSPTVAYSVLVVAKVEKGKSKKLKSVKELLGITIMERSSFEKNPIDFLEAKGYKEVKKDLIIKLPKYSLFELENGRKRMLASAGELQKGNELALPSKYVNFLYLASHYEKLKGSPEDNEQKQLFVEQHKHYLDEIIEQISEFSKRVILADANLDKVLSAYNKHRDKPIREQAENIIHLFTLTNLGAPAAFKYFDTTIDRKRYTSTKEVLDATLIHQSITGLYETRIDLSQLGGDGGGGGGSGGGGSGGGGSGGTVSLQDEHRLFDIPVTTSLPDVWLQDFPQAWAETGGLGRAKCQAPIIIDLKPTAVPVSIKQYPMSLEAHMGIRQHIIKFLELGVLRPCRSPWNTPLLPVKKPGTQDYRPVQDLREINKRTVDIHPTVPNPYNLLSTLKPDYSWYTVLDLKDAFFCLPLAPQSQELFAFEWKDPERGISGQLTWTRLPQGFKNSPTLFNEALHRDLTDFRTQHPEVTLLQYVDDLLLAAPTKKACTQGTRHLLQELGEKGYRASAKKAQICQTKVTYLGYILSEGKRWLTPGRIETVARIPPPRNPREVREFLGKAGFCRLFIPGFAELAAPLYALTKPSTPFTWQTEHQLAFEALKKALLSAPALGLPDTSKPFTLFLDERQGIAKGVLTQKLGPWKRPVAYLSKKLDPVAAGWPPCLRIMAATAMLVKDSAKLTLGQPLTVITPHTLEAIVRQPPDRWITNARLTHYQALLLDTDRVQFGPPVTLNPATLLPVPENQPSPHDCRQVLAETHGTREDLKDQELPDADHTWYTDGSSYLDSGTRRAGAAVVDGHNTIWAQSLPPGTSAQKAELIALTKALELSKGKKANIYTDSRYAFATAHTHGSIYERRGWLTSEGKEIKNKAEIIALLKALFLPQEVAIIHCPGHQKGQDPVAVGNRQADRVARQAAMAEVLTLATEPDNTSHITAGKRTADGSEFEKRTADGSEFESPKKKAKVE

SEQ ID NO: 1988 - protein, 2100 aa, synthetic construct
MPAAKRVKLDGGDKKYSIGLDIGTNSVGWAVITDEYKVPSKKFKVLGNTDRHSIKKNLIGALLFDSGETAEATRLKRTARRRYTRRKNRICYLQEIFSNEMAKVDDSFFHRLEESFLVEEDKKHERHPIFGNIVDEVAYHEKYPTIYHLRKKLVDSTDKADLRLIYLALAHMIKFRGHFLIEGDLNPDNSDVDKLFIQLVQTYNQLFEENPINASGVDAKAILSARLSKSRRLENLIAQLPGEKKNGLFGNLIALSLGLTPNFKSNFDLAEDAKLQLSKDTYDDDLDNLLAQIGDQYADLFLAAKNLSDAILLSDILRVNTEITKAPLSASMIKRYDEHHQDLTLLKALVRQQLPEKYKEIFFDQSKNGYAGYIDGGASQEEFYKFIKPILEKMDGTEELLVKLNREDLLRKQRTFDNGSIPHQIHLGELHAILRRQEDFYPFLKDNREKIEKILTFRIPYYVGPLARGNSRFAWMTRKSEETITPWNFEEVVDKGASAQSFIERMTNFDKNLPNEKVLPKHSLLYEYFTVYNELTKVKYVTEGMRKPAFLSGEQKKAIVDLLFKTNRKVTVKQLKEDYFKKIECFDSVEISGVEDRFNASLGTYHDLLKIIKDKDFLDNEENEDILEDIVLTLTLFEDREMIEERLKTYAHLFDDKVMKQLKRRRYTGWGRLSRKLINGIRDKQSGKTILDFLKSDGFANRNFMQLIHDDSLTFKEDIQKAQVSGQGDSLHEHIANLAGSPAIKKGILQTVKVVDELVKVMGRHKPENIVIEMARENQTTQKGQKNSRERMKRIEEGIKELGSQILKEHPVENTQLQNEKLYLYYLQNGRDMYVDQELDINRLSDYDVDHIVPQSFLKDDSIDNKVLTRSDKARGKSDNVPSEEVVKKMKNYWRQLLNAKLITQRKFDNLTKAERGGLSELDKAGFIKRQLVETRQITKHVAQILDSRMNTKYDENDKLIREVKVITLKSKLVSDFRKDFQFYKVREINNYHHAHDAYLNAVVGTALIKKYPKLESEFVYGDYKVYDVRKMIAKSEQEIGKATAKYFFYSNIMNFFKTEITLANGEIRKRPLIETNGETGEIVWDKGRDFATVRKVLSMPQVNIVKKTEVQTGGFSKESILPKRNSDKLIARKKDWDPKKYGGFDSPTVAYSVLVVAKVEKGKSKKLKSVKELLGITIMERSSFEKNPIDFLEAKGYKEVKKDLIIKLPKYSLFELENGRKRMLASAGELQKGNELALPSKYVNFLYLASHYEKLKGSPEDNEQKQLFVEQHKHYLDEIIEQISEFSKRVILADANLDKVLSAYNKHRDKPIREQAENIIHLFTLTNLGAPAAFKYFDTTIDRKRYTSTKEVLDATLIHQSITGLYETRIDLSQLGGDGGGGGPAPGSSGGTVSLQDEHRLFDIPVTTSLPDVWLQDFPQAWAETGGLGRAKCQAPIIIDLKPTAVPVSIKQYPMSLEAHMGIRQHIIKFLELGVLRPCRSPWNTPLLPVKKPGTQDYRPVQDLREINKRTVDIHPTVPNPYNLLSTLKPDYSWYTVLDLKDAFFCLPLAPQSQELFAFEWKDPERGISGQLTWTRLPQGFKNSPTLFNEALHRDLTDFRTQHPEVTLLQYVDDLLLAAPTKKACTQGTRHLLQELGEKGYRASAKKAQICQTKVTYLGYILSEGKRWLTPGRIETVARIPPPRNPREVREFLGKAGFCRLFIPGFAELAAPLYALTKPSTPFTWQTEHQLAFEALKKALLSAPALGLPDTSKPFTLFLDERQGIAKGVLTQKLGPWKRPVAYLSKKLDPVAAGWPPCLRIMAATAMLVKDSAKLTLGQPLTVITPHTLEAIVRQPPDRWITNARLTHYQALLLDTDRVQFGPPVTLNPATLLPVPENQPSPHDCRQVLAETHGTREDLKDQELPDADHTWYTDGSSYLDSGTRRAGAAVVDGHNTIWAQSLPPGTSAQKAELIALTKALELSKGKKANIYTDSRYAFATAHTHGSIYERRGWLTSEGKEIKNKAEIIALLKALFLPQEVAIIHCPGHQKGQDPVAVGNRQADRVARQAAMAEVLTLATEPDNTSHITAGKRTADGSEFEKRTADGSEFESPKKKAKVE

SEQ ID NO: 1989 - protein, 2102 aa, synthetic construct
MPAAKRVKLDGGDKKYSIGLDIGTNSVGWAVITDEYKVPSKKFKVLGNTDRHSIKKNLIGALLFDSGETAEATRLKRTARRRYTRRKNRICYLQEIFSNEMAKVDDSFFHRLEESFLVEEDKKHERHPIFGNIVDEVAYHEKYPTIYHLRKKLVDSTDKADLRLIYLALAHMIKFRGHFLIEGDLNPDNSDVDKLFIQLVQTYNQLFEENPINASGVDAKAILSARLSKSRRLENLIAQLPGEKKNGLFGNLIALSLGLTPNFKSNFDLAEDAKLQLSKDTYDDDLDNLLAQIGDQYADLFLAAKNLSDAILLSDILRVNTEITKAPLSASMIKRYDEHHQDLTLLKALVRQQLPEKYKEIFFDQSKNGYAGYIDGGASQEEFYKFIKPILEKMDGTEELLVKLNREDLLRKQRTFDNGSIPHQIHLGELHAILRRQEDFYPFLKDNREKIEKILTFRIPYYVGPLARGNSRFAWMTRKSEETITPWNFEEVVDKGASAQSFIERMTNFDKNLPNEKVLPKHSLLYEYFTVYNELTKVKYVTEGMRKPAFLSGEQKKAIVDLLFKTNRKVTVKQLKEDYFKKIECFDSVEISGVEDRFNASLGTYHDLLKIIKDKDFLDNEENEDILEDIVLTLTLFEDREMIEERLKTYAHLFDDKVMKQLKRRRYTGWGRLSRKLINGIRDKQSGKTILDFLKSDGFANRNFMQLIHDDSLTFKEDIQKAQVSGQGDSLHEHIANLAGSPAIKKGILQTVKVVDELVKVMGRHKPENIVIEMARENQTTQKGQKNSRERMKRIEEGIKELGSQILKEHPVENTQLQNEKLYLYYLQNGRDMYVDQELDINRLSDYDVDHIVPQSFLKDDSIDNKVLTRSDKARGKSDNVPSEEVVKKMKNYWRQLLNAKLITQRKFDNLTKAERGGLSELDKAGFIKRQLVETRQITKHVAQILDSRMNTKYDENDKLIREVKVITLKSKLVSDFRKDFQFYKVREINNYHHAHDAYLNAVVGTALIKKYPKLESEFVYGDYKVYDVRKMIAKSEQEIGKATAKYFFYSNIMNFFKTEITLANGEIRKRPLIETNGETGEIVWDKGRDFATVRKVLSMPQVNIVKKTEVQTGGFSKESILPKRNSDKLIARKKDWDPKKYGGFDSPTVAYSVLVVAKVEKGKSKKLKSVKELLGITIMERSSFEKNPIDFLEAKGYKEVKKDLIIKLPKYSLFELENGRKRMLASAGELQKGNELALPSKYVNFLYLASHYEKLKGSPEDNEQKQLFVEQHKHYLDEIIEQISEFSKRVILADANLDKVLSAYNKHRDKPIREQAENIIHLFTLTNLGAPAAFKYFDTTIDRKRYTSTKEVLDATLIHQSITGLYETRIDLSQLGGDGGGGSEAAAKPAPGGTVSLQDEHRLFDIPVTTSLPDVWLQDFPQAWAETGGLGRAKCQAPIIIDLKPTAVPVSIKQYPMSLEAHMGIRQHIIKFLELGVLRPCRSPWNTPLLPVKKPGTQDYRPVQDLREINKRTVDIHPTVPNPYNLLSTLKPDYSWYTVLDLKDAFFCLPLAPQSQELFAFEWKDPERGISGQLTWTRLPQGFKNSPTLFNEALHRDLTDFRTQHPEVTLLQYVDDLLLAAPTKKACTQGTRHLLQELGEKGYRASAKKAQICQTKVTYLGYILSEGKRWLTPGRIETVARIPPPRNPREVREFLGKAGFCRLFIPGFAELAAPLYALTKPSTPFTWQTEHQLAFEALKKALLSAPALGLPDTSKPFTLFLDERQGIAKGVLTQKLGPWKRPVAYLSKKLDPVAAGWPPCLRIMAATAMLVKDSAKLTLGQPLTVITPHTLEAIVRQPPDRWITNARLTHYQALLLDTDRVQFGPPVTLNPATLLPVPENQPSPHDCRQVLAETHGTREDLKDQELPDADHTWYTDGSSYLDSGTRRAGAAVVDGHNTIWAQSLPPGTSAQKAELIALTKALELSKGKKANIYTDSRYAFATAHTHGSIYERRGWLTSEGKEIKNKAEIIALLKALFLPQEVAIIHCPGHQKGQDPVAVGNRQADRVARQAAMAEVLTLATEPDNTSHITAGKRTADGSEFEKRTADGSEFESPKKKAKVE

SEQ ID NO: 1990 - protein, 2100 aa, synthetic construct
MPAAKRVKLDGGDKKYSIGLDIGTNSVGWAVITDEYKVPSKKFKVLGNTDRHSIKKNLIGALLFDSGETAEATRLKRTARRRYTRRKNRICYLQEIFSNEMAKVDDSFFHRLEESFLVEEDKKHERHPIFGNIVDEVAYHEKYPTIYHLRKKLVDSTDKADLRLIYLALAHMIKFRGHFLIEGDLNPDNSDVDKLFIQLVQTYNQLFEENPINASGVDAKAILSARLSKSRRLENLIAQLPGEKKNGLFGNLIALSLGLTPNFKSNFDLAEDAKLQLSKDTYDDDLDNLLAQIGDQYADLFLAAKNLSDAILLSDILRVNTEITKAPLSASMIKRYDEHHQDLTLLKALVRQQLPEKYKEIFFDQSKNGYAGYIDGGASQEEFYKFIKPILEKMDGTEELLVKLNREDLLRKQRTFDNGSIPHQIHLGELHAILRRQEDFYPFLKDNREKIEKILTFRIPYYVGPLARGNSRFAWMTRKSEETITPWNFEEVVDKGASAQSFIERMTNFDKNLPNEKVLPKHSLLYEYFTVYNELTKVKYVTEGMRKPAFLSGEQKKAIVDLLFKTNRKVTVKQLKEDYFKKIECFDSVEISGVEDRFNASLGTYHDLLKIIKDKDFLDNEENEDILEDIVLTLTLFEDREMIEERLKTYAHLFDDKVMKQLKRRRYTGWGRLSRKLINGIRDKQSGKTILDFLKSDGFANRNFMQLIHDDSLTFKEDIQKAQVSGQGDSLHEHIANLAGSPAIKKGILQTVKVVDELVKVMGRHKPENIVIEMARENQTTQKGQKNSRERMKRIEEGIKELGSQILKEHPVENTQLQNEKLYLYYLQNGRDMYVDQELDINRLSDYDVDHIVPQSFLKDDSIDNKVLTRSDKARGKSDNVPSEEVVKKMKNYWRQLLNAKLITQRKFDNLTKAERGGLSELDKAGFIKRQLVETRQITKHVAQILDSRMNTKYDENDKLIREVKVITLKSKLVSDFRKDFQFYKVREINNYHHAHDAYLNAVVGTALIKKYPKLESEFVYGDYKVYDVRKMIAKSEQEIGKATAKYFFYSNIMNFFKTEITLANGEIRKRPLIETNGETGEIVWDKGRDFATVRKVLSMPQVNIVKKTEVQTGGFSKESILPKRNSDKLIARKKDWDPKKYGGFDSPTVAYSVLVVAKVEKGKSKKLKSVKELLGITIMERSSFEKNPIDFLEAKGYKEVKKDLIIKLPKYSLFELENGRKRMLASAGELQKGNELALPSKYVNFLYLASHYEKLKGSPEDNEQKQLFVEQHKHYLDEIIEQISEFSKRVILADANLDKVLSAYNKHRDKPIREQAENIIHLFTLTNLGAPAAFKYFDTTIDRKRYTSTKEVLDATLIHQSITGLYETRIDLSQLGGDGGPAPGGSGSSGGTVSLQDEHRLFDIPVTTSLPDVWLQDFPQAWAETGGLGRAKCQAPIIIDLKPTAVPVSIKQYPMSLEAHMGIRQHIIKFLELGVLRPCRSPWNTPLLPVKKPGTQDYRPVQDLREINKRTVDIHPTVPNPYNLLSTLKPDYSWYTVLDLKDAFFCLPLAPQSQELFAFEWKDPERGISGQLTWTRLPQGFKNSPTLFNEALHRDLTDFRTQHPEVTLLQYVDDLLLAAPTKKACTQGTRHLLQELGEKGYRASAKKAQICQTKVTYLGYILSEGKRWLTPGRIETVARIPPPRNPREVREFLGKAGFCRLFIPGFAELAAPLYALTKPSTPFTWQTEHQLAFEALKKALLSAPALGLPDTSKPFTLFLDERQGIAKGVLTQKLGPWKRPVAYLSKKLDPVAAGWPPCLRIMAATAMLVKDSAKLTLGQPLTVITPHTLEAIVRQPPDRWITNARLTHYQALLLDTDRVQFGPPVTLNPATLLPVPENQPSPHDCRQVLAETHGTREDLKDQELPDADHTWYTDGSSYLDSGTRRAGAAVVDGHNTIWAQSLPPGTSAQKAELIALTKALELSKGKKANIYTDSRYAFATAHTHGSIYERRGWLTSEGKEIKNKAEIIALLKALFLPQEVAIIHCPGHQKGQDPVAVGNRQADRVARQAAMAEVLTLATEPDNTSHITAGKRTADGSEFEKRTADGSEFESPKKKAKVE

SEQ ID NO: 1991 - protein, 2100 aa, synthetic construct
MPAAKRVKLDGGDKKYSIGLDIGTNSVGWAVITDEYKVPSKKFKVLGNTDRHSIKKNLIGALLFDSGETAEATRLKRTARRRYTRRKNRICYLQEIFSNEMAKVDDSFFHRLEESFLVEEDKKHERHPIFGNIVDEVAYHEKYPTIYHLRKKLVDSTDKADLRLIYLALAHMIKFRGHFLIEGDLNPDNSDVDKLFIQLVQTYNQLFEENPINASGVDAKAILSARLSKSRRLENLIAQLPGEKKNGLFGNLIALSLGLTPNFKSNFDLAEDAKLQLSKDTYDDDLDNLLAQIGDQYADLFLAAKNLSDAILLSDILRVNTEITKAPLSASMIKRYDEHHQDLTLLKALVRQQLPEKYKEIFFDQSKNGYAGYIDGGASQEEFYKFIKPILEKMDGTEELLVKLNREDLLRKQRTFDNGSIPHQIHLGELHAILRRQEDFYPFLKDNREKIEKILTFRIPYYVGPLARGNSRFAWMTRKSEETITPWNFEEVVDKGASAQSFIERMTNFDKNLPNEKVLPKHSLLYEYFTVYNELTKVKYVTEGMRKPAFLSGEQKKAIVDLLFKTNRKVTVKQLKEDYFKKIECFDSVEISGVEDRFNASLGTYHDLLKIIKDKDFLDNEENEDILEDIVLTLTLFEDREMIEERLKTYAHLFDDKVMKQLKRRRYTGWGRLSRKLINGIRDKQSGKTILDFLKSDGFANRNFMQLIHDDSLTFKEDIQKAQVSGQGDSLHEHIANLAGSPAIKKGILQTVKVVDELVKVMGRHKPENIVIEMARENQTTQKGQKNSRERMKRIEEGIKELGSQILKEHPVENTQLQNEKLYLYYLQNGRDMYVDQELDINRLSDYDVDHIVPQSFLKDDSIDNKVLTRSDKARGKSDNVPSEEVVKKMKNYWRQLLNAKLITQRKFDNLTKAERGGLSELDKAGFIKRQLVETRQITKHVAQILDSRMNTKYDENDKLIREVKVITLKSKLVSDFRKDFQFYKVREINNYHHAHDAYLNAVVGTALIKKYPKLESEFVYGDYKVYDVRKMIAKSEQEIGKATAKYFFYSNIMNFFKTEITLANGEIRKRPLIETNGETGEIVWDKGRDFATVRKVLSMPQVNIVKKTEVQTGGFSKESILPKRNSDKLIARKKDWDPKKYGGFDSPTVAYSVLVVAKVEKGKSKKLKSVKELLGITIMERSSFEKNPIDFLEAKGYKEVKKDLIIKLPKYSLFELENGRKRMLASAGELQKGNELALPSKYVNFLYLASHYEKLKGSPEDNEQKQLFVEQHKHYLDEIIEQISEFSKRVILADANLDKVLSAYNKHRDKPIREQAENIIHLFTLTNLGAPAAFKYFDTTIDRKRYTSTKEVLDATLIHQSITGLYETRIDLSQLGGDGGGGGGSSGGSGGTVSLQDEHRLFDIPVTTSLPDVWLQDFPQAWAETGGLGRAKCQAPIIIDLKPTAVPVSIKQYPMSLEAHMGIRQHIIKFLELGVLRPCRSPWNTPLLPVKKPGTQDYRPVQDLREINKRTVDIHPTVPNPYNLLSTLKPDYSWYTVLDLKDAFFCLPLAPQSQELFAFEWKDPERGISGQLTWTRLPQGFKNSPTLFNEALHRDLTDFRTQHPEVTLLQYVDDLLLAAPTKKACTQGTRHLLQELGEKGYRASAKKAQICQTKVTYLGYILSEGKRWLTPGRIETVARIPPPRNPREVREFLGKAGFCRLFIPGFAELAAPLYALTKPSTPFTWQTEHQLAFEALKKALLSAPALGLPDTSKPFTLFLDERQGIAKGVLTQKLGPWKRPVAYLSKKLDPVAAGWPPCLRIMAATAMLVKDSAKLTLGQPLTVITPHTLEAIVRQPPDRWITNARLTHYQALLLDTDRVQFGPPVTLNPATLLPVPENQPSPHDCRQVLAETHGTREDLKDQELPDADHTWYTDGSSYLDSGTRRAGAAVVDGHNTIWAQSLPPGTSAQKAELIALTKALELSKGKKANIYTDSRYAFATAHTHGSIYERRGWLTSEGKEIKNKAEIIALLKALFLPQEVAIIHCPGHQKGQDPVAVGNRQADRVARQAAMAEVLTLATEPDNTSHITAGKRTADGSEFEKRTADGSEFESPKKKAKVE

SEQ ID NO: 1992 - protein, 2106 aa, synthetic construct
MPAAKRVKLDGGDKKYSIGLDIGTNSVGWAVITDEYKVPSKKFKVLGNTDRHSIKKNLIGALLFDSGETAEATRLKRTARRRYTRRKNRICYLQEIFSNEMAKVDDSFFHRLEESFLVEEDKKHERHPIFGNIVDEVAYHEKYPTIYHLRKKLVDSTDKADLRLIYLALAHMIKFRGHFLIEGDLNPDNSDVDKLFIQLVQTYNQLFEENPINASGVDAKAILSARLSKSRRLENLIAQLPGEKKNGLFGNLIALSLGLTPNFKSNFDLAEDAKLQLSKDTYDDDLDNLLAQIGDQYADLFLAAKNLSDAILLSDILRVNTEITKAPLSASMIKRYDEHHQDLTLLKALVRQQLPEKYKEIFFDQSKNGYAGYIDGGASQEEFYKFIKPILEKMDGTEELLVKLNREDLLRKQRTFDNGSIPHQIHLGELHAILRRQEDFYPFLKDNREKIEKILTFRIPYYVGPLARGNSRFAWMTRKSEETITPWNFEEVVDKGASAQSFIERMTNFDKNLPNEKVLPKHSLLYEYFTVYNELTKVKYVTEGMRKPAFLSGEQKKAIVDLLFKTNRKVTVKQLKEDYFKKIECFDSVEISGVEDRFNASLGTYHDLLKIIKDKDFLDNEENEDILEDIVLTLTLFEDREMIEERLKTYAHLFDDKVMKQLKRRRYTGWGRLSRKLINGIRDKQSGKTILDFLKSDGFANRNFMQLIHDDSLTFKEDIQKAQVSGQGDSLHEHIANLAGSPAIKKGILQTVKVVDELVKVMGRHKPENIVIEMARENQTTQKGQKNSRERMKRIEEGIKELGSQILKEHPVENTQLQNEKLYLYYLQNGRDMYVDQELDINRLSDYDVDHIVPQSFLKDDSIDNKVLTRSDKARGKSDNVPSEEVVKKMKNYWRQLLNAKLITQRKFDNLTKAERGGLSELDKAGFIKRQLVETRQITKHVAQILDSRMNTKYDENDKLIREVKVITLKSKLVSDFRKDFQFYKVREINNYHHAHDAYLNAVVGTALIKKYPKLESEFVYGDYKVYDVRKMIAKSEQEIGKATAKYFFYSNIMNFFKTEITLANGEIRKRPLIETNGETGEIVWDKGRDFATVRKVLSMPQVNIVKKTEVQTGGFSKESILPKRNSDKLIARKKDWDPKKYGGFDSPTVAYSVLVVAKVEKGKSKKLKSVKELLGITIMERSSFEKNPIDFLEAKGYKEVKKDLIIKLPKYSLFELENGRKRMLASAGELQKGNELALPSKYVNFLYLASHYEKLKGSPEDNEQKQLFVEQHKHYLDEIIEQISEFSKRVILADANLDKVLSAYNKHRDKPIREQAENIIHLFTLTNLGAPAAFKYFDTTIDRKRYTSTKEVLDATLIHQSITGLYETRIDLSQLGGDGGGGSGGSGGSGGSGGSGGTVSLQDEHRLFDIPVTTSLPDVWLQDFPQAWAETGGLGRAKCQAPIIIDLKPTAVPVSIKQYPMSLEAHMGIRQHIIKFLELGVLRPCRSPWNTPLLPVKKPGTQDYRPVQDLREINKRTVDIHPTVPNPYNLLSTLKPDYSWYTVLDLKDAFFCLPLAPQSQELFAFEWKDPERGISGQLTWTRLPQGFKNSPTLFNEALHRDLTDFRTQHPEVTLLQYVDDLLLAAPTKKACTQGTRHLLQELGEKGYRASAKKAQICQTKVTYLGYILSEGKRWLTPGRIETVARIPPPRNPREVREFLGKAGFCRLFIPGFAELAAPLYALTKPSTPFTWQTEHQLAFEALKKALLSAPALGLPDTSKPFTLFLDERQGIAKGVLTQKLGPWKRPVAYLSKKLDPVAAGWPPCLRIMAATAMLVKDSAKLTLGQPLTVITPHTLEAIVRQPPDRWITNARLTHYQALLLDTDRVQFGPPVTLNPATLLPVPENQPSPHDCRQVLAETHGTREDLKDQELPDADHTWYTDGSSYLDSGTRRAGAAVVDGHNTIWAQSLPPGTSAQKAELIALTKALELSKGKKANIYTDSRYAFATAHTHGSIYERRGWLTSEGKEIKNKAEIIALLKALFLPQEVAIIHCPGHQKGQDPVAVGNRQADRVARQAAMAEVLTLATEPDNTSHITAGKRTADGSEFEKRTADGSEFESPKKKAKVE

SEQ ID NO: 1993 - protein, 2100 aa, synthetic construct
MPAAKRVKLDGGDKKYSIGLDIGTNSVGWAVITDEYKVPSKKFKVLGNTDRHSIKKNLIGALLFDSGETAEATRLKRTARRRYTRRKNRICYLQEIFSNEMAKVDDSFFHRLEESFLVEEDKKHERHPIFGNIVDEVAYHEKYPTIYHLRKKLVDSTDKADLRLIYLALAHMIKFRGHFLIEGDLNPDNSDVDKLFIQLVQTYNQLFEENPINASGVDAKAILSARLSKSRRLENLIAQLPGEKKNGLFGNLIALSLGLTPNFKSNFDLAEDAKLQLSKDTYDDDLDNLLAQIGDQYADLFLAAKNLSDAILLSDILRVNTEITKAPLSASMIKRYDEHHQDLTLLKALVRQQLPEKYKEIFFDQSKNGYAGYIDGGASQEEFYKFIKPILEKMDGTEELLVKLNREDLLRKQRTFDNGSIPHQIHLGELHAILRRQEDFYPFLKDNREKIEKILTFRIPYYVGPLARGNSRFAWMTRKSEETITPWNFEEVVDKGASAQSFIERMTNFDKNLPNEKVLPKHSLLYEYFTVYNELTKVKYVTEGMRKPAFLSGEQKKAIVDLLFKTNRKVTVKQLKEDYFKKIECFDSVEISGVEDRFNASLGTYHDLLKIIKDKDFLDNEENEDILEDIVLTLTLFEDREMIEERLKTYAHLFDDKVMKQLKRRRYTGWGRLSRKLINGIRDKQSGKTILDFLKSDGFANRNFMQLIHDDSLTFKEDIQKAQVSGQGDSLHEHIANLAGSPAIKKGILQTVKVVDELVKVMGRHKPENIVIEMARENQTTQKGQKNSRERMKRIEEGIKELGSQILKEHPVENTQLQNEKLYLYYLQNGRDMYVDQELDINRLSDYDVDHIVPQSFLKDDSIDNKVLTRSDKARGKSDNVPSEEVVKKMKNYWRQLLNAKLITQRKFDNLTKAERGGLSELDKAGFIKRQLVETRQITKHVAQILDSRMNTKYDENDKLIREVKVITLKSKLVSDFRKDFQFYKVREINNYHHAHDAYLNAVVGTALIKKYPKLESEFVYGDYKVYDVRKMIAKSEQEIGKATAKYFFYSNIMNFFKTEITLANGEIRKRPLIETNGETGEIVWDKGRDFATVRKVLSMPQVNIVKKTEVQTGGFSKESILPKRNSDKLIARKKDWDPKKYGGFDSPTVAYSVLVVAKVEKGKSKKLKSVKELLGITIMERSSFEKNPIDFLEAKGYKEVKKDLIIKLPKYSLFELENGRKRMLASAGELQKGNELALPSKYVNFLYLASHYEKLKGSPEDNEQKQLFVEQHKHYLDEIIEQISEFSKRVILADANLDKVLSAYNKHRDKPIREQAENIIHLFTLTNLGAPAAFKYFDTTIDRKRYTSTKEVLDATLIHQSITGLYETRIDLSQLGGDGGGSSGGSGGGGGTVSLQDEHRLFDIPVTTSLPDVWLQDFPQAWAETGGLGRAKCQAPIIIDLKPTAVPVSIKQYPMSLEAHMGIRQHIIKFLELGVLRPCRSPWNTPLLPVKKPGTQDYRPVQDLREINKRTVDIHPTVPNPYNLLSTLKPDYSWYTVLDLKDAFFCLPLAPQSQELFAFEWKDPERGISGQLTWTRLPQGFKNSPTLFNEALHRDLTDFRTQHPEVTLLQYVDDLLLAAPTKKACTQGTRHLLQELGEKGYRASAKKAQICQTKVTYLGYILSEGKRWLTPGRIETVARIPPPRNPREVREFLGKAGFCRLFIPGFAELAAPLYALTKPSTPFTWQTEHQLAFEALKKALLSAPALGLPDTSKPFTLFLDERQGIAKGVLTQKLGPWKRPVAYLSKKLDPVAAGWPPCLRIMAATAMLVKDSAKLTLGQPLTVITPHTLEAIVRQPPDRWITNARLTHYQALLLDTDRVQFGPPVTLNPATLLPVPENQPSPHDCRQVLAETHGTREDLKDQELPDADHTWYTDGSSYLDSGTRRAGAAVVDGHNTIWAQSLPPGTSAQKAELIALTKALELSKGKKANIYTDSRYAFATAHTHGSIYERRGWLTSEGKEIKNKAEIIALLKALFLPQEVAIIHCPGHQKGQDPVAVGNRQADRVARQAAMAEVLTLATEPDNTSHITAGKRTADGSEFEKRTADGSEFESPKKKAKVE

SEQ ID NO: 1994 - protein, 2103 aa, synthetic construct
MPAAKRVKLDGGDKKYSIGLDIGTNSVGWAVITDEYKVPSKKFKVLGNTDRHSIKKNLIGALLFDSGETAEATRLKRTARRRYTRRKNRICYLQEIFSNEMAKVDDSFFHRLEESFLVEEDKKHERHPIFGNIVDEVAYHEKYPTIYHLRKKLVDSTDKADLRLIYLALAHMIKFRGHFLIEGDLNPDNSDVDKLFIQLVQTYNQLFEENPINASGVDAKAILSARLSKSRRLENLIAQLPGEKKNGLFGNLIALSLGLTPNFKSNFDLAEDAKLQLSKDTYDDDLDNLLAQIGDQYADLFLAAKNLSDAILLSDILRVNTEITKAPLSASMIKRYDEHHQDLTLLKALVRQQLPEKYKEIFFDQSKNGYAGYIDGGASQEEFYKFIKPILEKMDGTEELLVKLNREDLLRKQRTFDNGSIPHQIHLGELHAILRRQEDFYPFLKDNREKIEKILTFRIPYYVGPLARGNSRFAWMTRKSEETITPWNFEEVVDKGASAQSFIERMTNFDKNLPNEKVLPKHSLLYEYFTVYNELTKVKYVTEGMRKPAFLSGEQKKAIVDLLFKTNRKVTVKQLKEDYFKKIECFDSVEISGVEDRFNASLGTYHDLLKIIKDKDFLDNEENEDILEDIVLTLTLFEDREMIEERLKTYAHLFDDKVMKQLKRRRYTGWGRLSRKLINGIRDKQSGKTILDFLKSDGFANRNFMQLIHDDSLTFKEDIQKAQVSGQGDSLHEHIANLAGSPAIKKGILQTVKVVDELVKVMGRHKPENIVIEMARENQTTQKGQKNSRERMKRIEEGIKELGSQILKEHPVENTQLQNEKLYLYYLQNGRDMYVDQELDINRLSDYDVDHIVPQSFLKDDSIDNKVLTRSDKARGKSDNVPSEEVVKKMKNYWRQLLNAKLITQRKFDNLTKAERGGLSELDKAGFIKRQLVETRQITKHVAQILDSRMNTKYDENDKLIREVKVITLKSKLVSDFRKDFQFYKVREINNYHHAHDAYLNAVVGTALIKKYPKLESEFVYGDYKVYDVRKMIAKSEQEIGKATAKYFFYSNIMNFFKTEITLANGEIRKRPLIETNGETGEIVWDKGRDFATVRKVLSMPQVNIVKKTEVQTGGFSKESILPKRNSDKLIARKKDWDPKKYGGFDSPTVAYSVLVVAKVEKGKSKKLKSVKELLGITIMERSSFEKNPIDFLEAKGYKEVKKDLIIKLPKYSLFELENGRKRMLASAGELQKGNELALPSKYVNFLYLASHYEKLKGSPEDNEQKQLFVEQHKHYLDEIIEQISEFSKRVILADANLDKVLSAYNKHRDKPIREQAENIIHLFTLTNLGAPAAFKYFDTTIDRKRYTSTKEVLDATLIHQSITGLYETRIDLSQLGGDGGGSSGSSGSSGSSGGTVSLQDEHRLFDIPVTTSLPDVWLQDFPQAWAETGGLGRAKCQAPIIIDLKPTAVPVSIKQYPMSLEAHMGIRQHIIKFLELGVLRPCRSPWNTPLLPVKKPGTQDYRPVQDLREINKRTVDIHPTVPNPYNLLSTLKPDYSWYTVLDLKDAFFCLPLAPQSQELFAFEWKDPERGISGQLTWTRLPQGFKNSPTLFNEALHRDLTDFRTQHPEVTLLQYVDDLLLAAPTKKACTQGTRHLLQELGEKGYRASAKKAQICQTKVTYLGYILSEGKRWLTPGRIETVARIPPPRNPREVREFLGKAGFCRLFIPGFAELAAPLYALTKPSTPFTWQTEHQLAFEALKKALLSAPALGLPDTSKPFTLFLDERQGIAKGVLTQKLGPWKRPVAYLSKKLDPVAAGWPPCLRIMAATAMLVKDSAKLTLGQPLTVITPHTLEAIVRQPPDRWITNARLTHYQALLLDTDRVQFGPPVTLNPATLLPVPENQPSPHDCRQVLAETHGTREDLKDQELPDADHTWYTDGSSYLDSGTRRAGAAVVDGHNTIWAQSLPPGTSAQKAELIALTKALELSKGKKANIYTDSRYAFATAHTHGSIYERRGWLTSEGKEIKNKAEIIALLKALFLPQEVAIIHCPGHQKGQDPVAVGNRQADRVARQAAMAEVLTLATEPDNTSHITAGKRTADGSEFEKRTADGSEFESPKKKAKVE

SEQ ID NO: 1995 - protein, 2099 aa, synthetic construct
MPAAKRVKLDGGDKKYSIGLDIGTNSVGWAVITDEYKVPSKKFKVLGNTDRHSIKKNLIGALLFDSGETAEATRLKRTARRRYTRRKNRICYLQEIFSNEMAKVDDSFFHRLEESFLVEEDKKHERHPIFGNIVDEVAYHEKYPTIYHLRKKLVDSTDKADLRLIYLALAHMIKFRGHFLIEGDLNPDNSDVDKLFIQLVQTYNQLFEENPINASGVDAKAILSARLSKSRRLENLIAQLPGEKKNGLFGNLIALSLGLTPNFKSNFDLAEDAKLQLSKDTYDDDLDNLLAQIGDQYADLFLAAKNLSDAILLSDILRVNTEITKAPLSASMIKRYDEHHQDLTLLKALVRQQLPEKYKEIFFDQSKNGYAGYIDGGASQEEFYKFIKPILEKMDGTEELLVKLNREDLLRKQRTFDNGSIPHQIHLGELHAILRRQEDFYPFLKDNREKIEKILTFRIPYYVGPLARGNSRFAWMTRKSEETITPWNFEEVVDKGASAQSFIERMTNFDKNLPNEKVLPKHSLLYEYFTVYNELTKVKYVTEGMRKPAFLSGEQKKAIVDLLFKTNRKVTVKQLKEDYFKKIECFDSVEISGVEDRFNASLGTYHDLLKIIKDKDFLDNEENEDILEDIVLTLTLFEDREMIEERLKTYAHLFDDKVMKQLKRRRYTGWGRLSRKLINGIRDKQSGKTILDFLKSDGFANRNFMQLIHDDSLTFKEDIQKAQVSGQGDSLHEHIANLAGSPAIKKGILQTVKVVDELVKVMGRHKPENIVIEMARENQTTQKGQKNSRERMKRIEEGIKELGSQILKEHPVENTQLQNEKLYLYYLQNGRDMYVDQELDINRLSDYDVDHIVPQSFLKDDSIDNKVLTRSDKARGKSDNVPSEEVVKKMKNYWRQLLNAKLITQRKFDNLTKAERGGLSELDKAGFIKRQLVETRQITKHVAQILDSRMNTKYDENDKLIREVKVITLKSKLVSDFRKDFQFYKVREINNYHHAHDAYLNAVVGTALIKKYPKLESEFVYGDYKVYDVRKMIAKSEQEIGKATAKYFFYSNIMNFFKTEITLANGEIRKRPLIETNGETGEIVWDKGRDFATVRKVLSMPQVNIVKKTEVQTGGFSKESILPKRNSDKLIARKKDWDPKKYGGFDSPTVAYSVLVVAKVEKGKSKKLKSVKELLGITIMERSSFEKNPIDFLEAKGYKEVKKDLIIKLPKYSLFELENGRKRMLASAGELQKGNELALPSKYVNFLYLASHYEKLKGSPEDNEQKQLFVEQHKHYLDEIIEQISEFSKRVILADANLDKVLSAYNKHRDKPIREQAENIIHLFTLTNLGAPAAFKYFDTTIDRKRYTSTKEVLDATLIHQSITGLYETRIDLSQLGGDGGPAPEAAAKGGTVSLQDEHRLFDIPVTTSLPDVWLQDFPQAWAETGGLGRAKCQAPIIIDLKPTAVPVSIKQYPMSLEAHMGIRQHIIKFLELGVLRPCRSPWNTPLLPVKKPGTQDYRPVQDLREINKRTVDIHPTVPNPYNLLSTLKPDYSWYTVLDLKDAFFCLPLAPQSQELFAFEWKDPERGISGQLTWTRLPQGFKNSPTLFNEALHRDLTDFRTQHPEVTLLQYVDDLLLAAPTKKACTQGTRHLLQELGEKGYRASAKKAQICQTKVTYLGYILSEGKRWLTPGRIETVARIPPPRNPREVREFLGKAGFCRLFIPGFAELAAPLYALTKPSTPFTWQTEHQLAFEALKKALLSAPALGLPDTSKPFTLFLDERQGIAKGVLTQKLGPWKRPVAYLSKKLDPVAAGWPPCLRIMAATAMLVKDSAKLTLGQPLTVITPHTLEAIVRQPPDRWITNARLTHYQALLLDTDRVQFGPPVTLNPATLLPVPENQPSPHDCRQVLAETHGTREDLKDQELPDADHTWYTDGSSYLDSGTRRAGAAVVDGHNTIWAQSLPPGTSAQKAELIALTKALELSKGKKANIYTDSRYAFATAHTHGSIYERRGWLTSEGKEIKNKAEIIALLKALFLPQEVAIIHCPGHQKGQDPVAVGNRQADRVARQAAMAEVLTLATEPDNTSHITAGKRTADGSEFEKRTADGSEFESPKKKAKVE

SEQ ID NO: 1996 - protein, 2097 aa, synthetic construct
MPAAKRVKLDGGDKKYSIGLDIGTNSVGWAVITDEYKVPSKKFKVLGNTDRHSIKKNLIGALLFDSGETAEATRLKRTARRRYTRRKNRICYLQEIFSNEMAKVDDSFFHRLEESFLVEEDKKHERHPIFGNIVDEVAYHEKYPTIYHLRKKLVDSTDKADLRLIYLALAHMIKFRGHFLIEGDLNPDNSDVDKLFIQLVQTYNQLFEENPINASGVDAKAILSARLSKSRRLENLIAQLPGEKKNGLFGNLIALSLGLTPNFKSNFDLAEDAKLQLSKDTYDDDLDNLLAQIGDQYADLFLAAKNLSDAILLSDILRVNTEITKAPLSASMIKRYDEHHQDLTLLKALVRQQLPEKYKEIFFDQSKNGYAGYIDGGASQEEFYKFIKPILEKMDGTEELLVKLNREDLLRKQRTFDNGSIPHQIHLGELHAILRRQEDFYPFLKDNREKIEKILTFRIPYYVGPLARGNSRFAWMTRKSEETITPWNFEEVVDKGASAQSFIERMTNFDKNLPNEKVLPKHSLLYEYFTVYNELTKVKYVTEGMRKPAFLSGEQKKAIVDLLFKTNRKVTVKQLKEDYFKKIECFDSVEISGVEDRFNASLGTYHDLLKIIKDKDFLDNEENEDILEDIVLTLTLFEDREMIEERLKTYAHLFDDKVMKQLKRRRYTGWGRLSRKLINGIRDKQSGKTILDFLKSDGFANRNFMQLIHDDSLTFKEDIQKAQVSGQGDSLHEHIANLAGSPAIKKGILQTVKVVDELVKVMGRHKPENIVIEMARENQTTQKGQKNSRERMKRIEEGIKELGSQILKEHPVENTQLQNEKLYLYYLQNGRDMYVDQELDINRLSDYDVDHIVPQSFLKDDSIDNKVLTRSDKARGKSDNVPSEEVVKKMKNYWRQLLNAKLITQRKFDNLTKAERGGLSELDKAGFIKRQLVETRQITKHVAQILDSRMNTKYDENDKLIREVKVITLKSKLVSDFRKDFQFYKVREINNYHHAHDAYLNAVVGTALIKKYPKLESEFVYGDYKVYDVRKMIAKSEQEIGKATAKYFFYSNIMNFFKTEITLANGEIRKRPLIETNGETGEIVWDKGRDFATVRKVLSMPQVNIVKKTEVQTGGFSKESILPKRNSDKLIARKKDWDPKKYGGFDSPTVAYSVLVVAKVEKGKSKKLKSVKELLGITIMERSSFEKNPIDFLEAKGYKEVKKDLIIKLPKYSLFELENGRKRMLASAGELQKGNELALPSKYVNFLYLASHYEKLKGSPEDNEQKQLFVEQHKHYLDEIIEQISEFSKRVILADANLDKVLSAYNKHRDKPIREQAENIIHLFTLTNLGAPAAFKYFDTTIDRKRYTSTKEVLDATLIHQSITGLYETRIDLSQLGGDGGGGGPAPGGTVSLQDEHRLFDIPVTTSLPDVWLQDFPQAWAETGGLGRAKCQAPIIIDLKPTAVPVSIKQYPMSLEAHMGIRQHIIKFLELGVLRPCRSPWNTPLLPVKKPGTQDYRPVQDLREINKRTVDIHPTVPNPYNLLSTLKPDYSWYTVLDLKDAFFCLPLAPQSQELFAFEWKDPERGISGQLTWTRLPQGFKNSPTLFNEALHRDLTDFRTQHPEVTLLQYVDDLLLAAPTKKACTQGTRHLLQELGEKGYRASAKKAQICQTKVTYLGYILSEGKRWLTPGRIETVARIPPPRNPREVREFLGKAGFCRLFIPGFAELAAPLYALTKPSTPFTWQTEHQLAFEALKKALLSAPALGLPDTSKPFTLFLDERQGIAKGVLTQKLGPWKRPVAYLSKKLDPVAAGWPPCLRIMAATAMLVKDSAKLTLGQPLTVITPHTLEAIVRQPPDRWITNARLTHYQALLLDTDRVQFGPPVTLNPATLLPVPENQPSPHDCRQVLAETHGTREDLKDQELPDADHTWYTDGSSYLDSGTRRAGAAVVDGHNTIWAQSLPPGTSAQKAELIALTKALELSKGKKANIYTDSRYAFATAHTHGSIYERRGWLTSEGKEIKNKAEIIALLKALFLPQEVAIIHCPGHQKGQDPVAVGNRQADRVARQAAMAEVLTLATEPDNTSHITAGKRTADGSEFEKRTADGSEFESPKKKAKVE

SEQ ID NO: 1997 - protein, 2099 aa, synthetic construct
MPAAKRVKLDGGDKKYSIGLDIGTNSVGWAVITDEYKVPSKKFKVLGNTDRHSIKKNLIGALLFDSGETAEATRLKRTARRRYTRRKNRICYLQEIFSNEMAKVDDSFFHRLEESFLVEEDKKHERHPIFGNIVDEVAYHEKYPTIYHLRKKLVDSTDKADLRLIYLALAHMIKFRGHFLIEGDLNPDNSDVDKLFIQLVQTYNQLFEENPINASGVDAKAILSARLSKSRRLENLIAQLPGEKKNGLFGNLIALSLGLTPNFKSNFDLAEDAKLQLSKDTYDDDLDNLLAQIGDQYADLFLAAKNLSDAILLSDILRVNTEITKAPLSASMIKRYDEHHQDLTLLKALVRQQLPEKYKEIFFDQSKNGYAGYIDGGASQEEFYKFIKPILEKMDGTEELLVKLNREDLLRKQRTFDNGSIPHQIHLGELHAILRRQEDFYPFLKDNREKIEKILTFRIPYYVGPLARGNSRFAWMTRKSEETITPWNFEEVVDKGASAQSFIERMTNFDKNLPNEKVLPKHSLLYEYFTVYNELTKVKYVTEGMRKPAFLSGEQKKAIVDLLFKTNRKVTVKQLKEDYFKKIECFDSVEISGVEDRFNASLGTYHDLLKIIKDKDFLDNEENEDILEDIVLTLTLFEDREMIEERLKTYAHLFDDKVMKQLKRRRYTGWGRLSRKLINGIRDKQSGKTILDFLKSDGFANRNFMQLIHDDSLTFKEDIQKAQVSGQGDSLHEHIANLAGSPAIKKGILQTVKVVDELVKVMGRHKPENIVIEMARENQTTQKGQKNSRERMKRIEEGIKELGSQILKEHPVENTQLQNEKLYLYYLQNGRDMYVDQELDINRLSDYDVDHIVPQSFLKDDSIDNKVLTRSDKARGKSDNVPSEEVVKKMKNYWRQLLNAKLITQRKFDNLTKAERGGLSELDKAGFIKRQLVETRQITKHVAQILDSRMNTKYDENDKLIREVKVITLKSKLVSDFRKDFQFYKVREINNYHHAHDAYLNAVVGTALIKKYPKLESEFVYGDYKVYDVRKMIAKSEQEIGKATAKYFFYSNIMNFFKTEITLANGEIRKRPLIETNGETGEIVWDKGRDFATVRKVLSMPQVNIVKKTEVQTGGFSKESILPKRNSDKLIARKKDWDPKKYGGFDSPTVAYSVLVVAKVEKGKSKKLKSVKELLGITIMERSSFEKNPIDFLEAKGYKEVKKDLIIKLPKYSLFELENGRKRMLASAGELQKGNELALPSKYVNFLYLASHYEKLKGSPEDNEQKQLFVEQHKHYLDEIIEQISEFSKRVILADANLDKVLSAYNKHRDKPIREQAENIIHLFTLTNLGAPAAFKYFDTTIDRKRYTSTKEVLDATLIHQSITGLYETRIDLSQLGGDGGGGSEAAAKGGTVSLQDEHRLFDIPVTTSLPDVWLQDFPQAWAETGGLGRAKCQAPIIIDLKPTAVPVSIKQYPMSLEAHMGIRQHIIKFLELGVLRPCRSPWNTPLLPVKKPGTQDYRPVQDLREINKRTVDIHPTVPNPYNLLSTLKPDYSWYTVLDLKDAFFCLPLAPQSQELFAFEWKDPERGISGQLTWTRLPQGFKNSPTLFNEALHRDLTDFRTQHPEVTLLQYVDDLLLAAPTKKACTQGTRHLLQELGEKGYRASAKKAQICQTKVTYLGYILSEGKRWLTPGRIETVARIPPPRNPREVREFLGKAGFCRLFIPGFAELAAPLYALTKPSTPFTWQTEHQLAFEALKKALLSAPALGLPDTSKPFTLFLDERQGIAKGVLTQKLGPWKRPVAYLSKKLDPVAAGWPPCLRIMAATAMLVKDSAKLTLGQPLTVITPHTLEAIVRQPPDRWITNARLTHYQALLLDTDRVQFGPPVTLNPATLLPVPENQPSPHDCRQVLAETHGTREDLKDQELPDADHTWYTDGSSYLDSGTRRAGAAVVDGHNTIWAQSLPPGTSAQKAELIALTKALELSKGKKANIYTDSRYAFATAHTHGSIYERRGWLTSEGKEIKNKAEIIALLKALFLPQEVAIIHCPGHQKGQDPVAVGNRQADRVARQAAMAEVLTLATEPDNTSHITAGKRTADGSEFEKRTADGSEFESPKKKAKVE

SEQ ID NO: 1998 - protein, 2096 aa, synthetic construct
MPAAKRVKLDGGDKKYSIGLDIGTNSVGWAVITDEYKVPSKKFKVLGNTDRHSIKKNLIGALLFDSGETAEATRLKRTARRRYTRRKNRICYLQEIFSNEMAKVDDSFFHRLEESFLVEEDKKHERHPIFGNIVDEVAYHEKYPTIYHLRKKLVDSTDKADLRLIYLALAHMIKFRGHFLIEGDLNPDNSDVDKLFIQLVQTYNQLFEENPINASGVDAKAILSARLSKSRRLENLIAQLPGEKKNGLFGNLIALSLGLTPNFKSNFDLAEDAKLQLSKDTYDDDLDNLLAQIGDQYADLFLAAKNLSDAILLSDILRVNTEITKAPLSASMIKRYDEHHQDLTLLKALVRQQLPEKYKEIFFDQSKNGYAGYIDGGASQEEFYKFIKPILEKMDGTEELLVKLNREDLLRKQRTFDNGSIPHQIHLGELHAILRRQEDFYPFLKDNREKIEKILTFRIPYYVGPLARGNSRFAWMTRKSEETITPWNFEEVVDKGASAQSFIERMTNFDKNLPNEKVLPKHSLLYEYFTVYNELTKVKYVTEGMRKPAFLSGEQKKAIVDLLFKTNRKVTVKQLKEDYFKKIECFDSVEISGVEDRFNASLGTYHDLLKIIKDKDFLDNEENEDILEDIVLTLTLFEDREMIEERLKTYAHLFDDKVMKQLKRRRYTGWGRLSRKLINGIRDKQSGKTILDFLKSDGFANRNFMQLIHDDSLTFKEDIQKAQVSGQGDSLHEHIANLAGSPAIKKGILQTVKVVDELVKVMGRHKPENIVIEMARENQTTQKGQKNSRERMKRIEEGIKELGSQILKEHPVENTQLQNEKLYLYYLQNGRDMYVDQELDINRLSDYDVDHIVPQSFLKDDSIDNKVLTRSDKARGKSDNVPSEEVVKKMKNYWRQLLNAKLITQRKFDNLTKAERGGLSELDKAGFIKRQLVETRQITKHVAQILDSRMNTKYDENDKLIREVKVITLKSKLVSDFRKDFQFYKVREINNYHHAHDAYLNAVVGTALIKKYPKLESEFVYGDYKVYDVRKMIAKSEQEIGKATAKYFFYSNIMNFFKTEITLANGEIRKRPLIETNGETGEIVWDKGRDFATVRKVLSMPQVNIVKKTEVQTGGFSKESILPKRNSDKLIARKKDWDPKKYGGFDSPTVAYSVLVVAKVEKGKSKKLKSVKELLGITIMERSSFEKNPIDFLEAKGYKEVKKDLIIKLPKYSLFELENGRKRMLASAGELQKGNELALPSKYVNFLYLASHYEKLKGSPEDNEQKQLFVEQHKHYLDEIIEQISEFSKRVILADANLDKVLSAYNKHRDKPIREQAENIIHLFTLTNLGAPAAFKYFDTTIDRKRYTSTKEVLDATLIHQSITGLYETRIDLSQLGGDGGGGGGGGGTVSLQDEHRLFDIPVTTSLPDVWLQDFPQAWAETGGLGRAKCQAPIIIDLKPTAVPVSIKQYPMSLEAHMGIRQHIIKFLELGVLRPCRSPWNTPLLPVKKPGTQDYRPVQDLREINKRTVDIHPTVPNPYNLLSTLKPDYSWYTVLDLKDAFFCLPLAPQSQELFAFEWKDPERGISGQLTWTRLPQGFKNSPTLFNEALHRDLTDFRTQHPEVTLLQYVDDLLLAAPTKKACTQGTRHLLQELGEKGYRASAKKAQICQTKVTYLGYILSEGKRWLTPGRIETVARIPPPRNPREVREFLGKAGFCRLFIPGFAELAAPLYALTKPSTPFTWQTEHQLAFEALKKALLSAPALGLPDTSKPFTLFLDERQGIAKGVLTQKLGPWKRPVAYLSKKLDPVAAGWPPCLRIMAATAMLVKDSAKLTLGQPLTVITPHTLEAIVRQPPDRWITNARLTHYQALLLDTDRVQFGPPVTLNPATLLPVPENQPSPHDCRQVLAETHGTREDLKDQELPDADHTWYTDGSSYLDSGTRRAGAAVVDGHNTIWAQSLPPGTSAQKAELIALTKALELSKGKKANIYTDSRYAFATAHTHGSIYERRGWLTSEGKEIKNKAEIIALLKALFLPQEVAIIHCPGHQKGQDPVAVGNRQADRVARQAAMAEVLTLATEPDNTSHITAGKRTADGSEFEKRTADGSEFESPKKKAKVE

SEQ ID NO: 1999 - protein, 2094 aa, synthetic construct
MPAAKRVKLDGGDKKYSIGLDIGTNSVGWAVITDEYKVPSKKFKVLGNTDRHSIKKNLIGALLFDSGETAEATRLKRTARRRYTRRKNRICYLQEIFSNEMAKVDDSFFHRLEESFLVEEDKKHERHPIFGNIVDEVAYHEKYPTIYHLRKKLVDSTDKADLRLIYLALAHMIKFRGHFLIEGDLNPDNSDVDKLFIQLVQTYNQLFEENPINASGVDAKAILSARLSKSRRLENLIAQLPGEKKNGLFGNLIALSLGLTPNFKSNFDLAEDAKLQLSKDTYDDDLDNLLAQIGDQYADLFLAAKNLSDAILLSDILRVNTEITKAPLSASMIKRYDEHHQDLTLLKALVRQQLPEKYKEIFFDQSKNGYAGYIDGGASQEEFYKFIKPILEKMDGTEELLVKLNREDLLRKQRTFDNGSIPHQIHLGELHAILRRQEDFYPFLKDNREKIEKILTFRIPYYVGPLARGNSRFAWMTRKSEETITPWNFEEVVDKGASAQSFIERMTNFDKNLPNEKVLPKHSLLYEYFTVYNELTKVKYVTEGMRKPAFLSGEQKKAIVDLLFKTNRKVTVKQLKEDYFKKIECFDSVEISGVEDRFNASLGTYHDLLKIIKDKDFLDNEENEDILEDIVLTLTLFEDREMIEERLKTYAHLFDDKVMKQLKRRRYTGWGRLSRKLINGIRDKQSGKTILDFLKSDGFANRNFMQLIHDDSLTFKEDIQKAQVSGQGDSLHEHIANLAGSPAIKKGILQTVKVVDELVKVMGRHKPENIVIEMARENQTTQKGQKNSRERMKRIEEGIKELGSQILKEHPVENTQLQNEKLYLYYLQNGRDMYVDQELDINRLSDYDVDHIVPQSFLKDDSIDNKVLTRSDKARGKSDNVPSEEVVKKMKNYWRQLLNAKLITQRKFDNLTKAERGGLSELDKAGFIKRQLVETRQITKHVAQILDSRMNTKYDENDKLIREVKVITLKSKLVSDFRKDFQFYKVREINNYHHAHDAYLNAVVGTALIKKYPKLESEFVYGDYKVYDVRKMIAKSEQEIGKATAKYFFYSNIMNFFKTEITLANGEIRKRPLIETNGETGEIVWDKGRDFATVRKVLSMPQVNIVKKTEVQTGGFSKESILPKRNSDKLIARKKDWDPKKYGGFDSPTVAYSVLVVAKVEKGKSKKLKSVKELLGITIMERSSFEKNPIDFLEAKGYKEVKKDLIIKLPKYSLFELENGRKRMLASAGELQKGNELALPSKYVNFLYLASHYEKLKGSPEDNEQKQLFVEQHKHYLDEIIEQISEFSKRVILADANLDKVLSAYNKHRDKPIREQAENIIHLFTLTNLGAPAAFKYFDTTIDRKRYTSTKEVLDATLIHQSITGLYETRIDLSQLGGDGGGGSGGTVSLQDEHRLFDIPVTTSLPDVWLQDFPQAWAETGGLGRAKCQAPIIIDLKPTAVPVSIKQYPMSLEAHMGIRQHIIKFLELGVLRPCRSPWNTPLLPVKKPGTQDYRPVQDLREINKRTVDIHPTVPNPYNLLSTLKPDYSWYTVLDLKDAFFCLPLAPQSQELFAFEWKDPERGISGQLTWTRLPQGFKNSPTLFNEALHRDLTDFRTQHPEVTLLQYVDDLLLAAPTKKACTQGTRHLLQELGEKGYRASAKKAQICQTKVTYLGYILSEGKRWLTPGRIETVARIPPPRNPREVREFLGKAGFCRLFIPGFAELAAPLYALTKPSTPFTWQTEHQLAFEALKKALLSAPALGLPDTSKPFTLFLDERQGIAKGVLTQKLGPWKRPVAYLSKKLDPVAAGWPPCLRIMAATAMLVKDSAKLTLGQPLTVITPHTLEAIVRQPPDRWITNARLTHYQALLLDTDRVQFGPPVTLNPATLLPVPENQPSPHDCRQVLAETHGTREDLKDQELPDADHTWYTDGSSYLDSGTRRAGAAVVDGHNTIWAQSLPPGTSAQKAELIALTKALELSKGKKANIYTDSRYAFATAHTHGSIYERRGWLTSEGKEIKNKAEIIALLKALFLPQEVAIIHCPGHQKGQDPVAVGNRQADRVARQAAMAEVLTLATEPDNTSHITAGKRTADGSEFEKRTADGSEFESPKKKAKVE

SEQ ID NO: 2000 - protein, 2121 aa, synthetic construct
MPAAKRVKLDGGDKKYSIGLDIGTNSVGWAVITDEYKVPSKKFKVLGNTDRHSIKKNLIGALLFDSGETAEATRLKRTARRRYTRRKNRICYLQEIFSNEMAKVDDSFFHRLEESFLVEEDKKHERHPIFGNIVDEVAYHEKYPTIYHLRKKLVDSTDKADLRLIYLALAHMIKFRGHFLIEGDLNPDNSDVDKLFIQLVQTYNQLFEENPINASGVDAKAILSARLSKSRRLENLIAQLPGEKKNGLFGNLIALSLGLTPNFKSNFDLAEDAKLQLSKDTYDDDLDNLLAQIGDQYADLFLAAKNLSDAILLSDILRVNTEITKAPLSASMIKRYDEHHQDLTLLKALVRQQLPEKYKEIFFDQSKNGYAGYIDGGASQEEFYKFIKPILEKMDGTEELLVKLNREDLLRKQRTFDNGSIPHQIHLGELHAILRRQEDFYPFLKDNREKIEKILTFRIPYYVGPLARGNSRFAWMTRKSEETITPWNFEEVVDKGASAQSFIERMTNFDKNLPNEKVLPKHSLLYEYFTVYNELTKVKYVTEGMRKPAFLSGEQKKAIVDLLFKTNRKVTVKQLKEDYFKKIECFDSVEISGVEDRFNASLGTYHDLLKIIKDKDFLDNEENEDILEDIVLTLTLFEDREMIEERLKTYAHLFDDKVMKQLKRRRYTGWGRLSRKLINGIRDKQSGKTILDFLKSDGFANRNFMQLIHDDSLTFKEDIQKAQVSGQGDSLHEHIANLAGSPAIKKGILQTVKVVDELVKVMGRHKPENIVIEMARENQTTQKGQKNSRERMKRIEEGIKELGSQILKEHPVENTQLQNEKLYLYYLQNGRDMYVDQELDINRLSDYDVDHIVPQSFLKDDSIDNKVLTRSDKARGKSDNVPSEEVVKKMKNYWRQLLNAKLITQRKFDNLTKAERGGLSELDKAGFIKRQLVETRQITKHVAQILDSRMNTKYDENDKLIREVKVITLKSKLVSDFRKDFQFYKVREINNYHHAHDAYLNAVVGTALIKKYPKLESEFVYGDYKVYDVRKMIAKSEQEIGKATAKYFFYSNIMNFFKTEITLANGEIRKRPLIETNGETGEIVWDKGRDFATVRKVLSMPQVNIVKKTEVQTGGFSKESILPKRNSDKLIARKKDWDPKKYGGFDSPTVAYSVLVVAKVEKGKSKKLKSVKELLGITIMERSSFEKNPIDFLEAKGYKEVKKDLIIKLPKYSLFELENGRKRMLASAGELQKGNELALPSKYVNFLYLASHYEKLKGSPEDNEQKQLFVEQHKHYLDEIIEQISEFSKRVILADANLDKVLSAYNKHRDKPIREQAENIIHLFTLTNLGAPAAFKYFDTTIDRKRYTSTKEVLDATLIHQSITGLYETRIDLSQLGGDGGEAAAKEAAAKEAAAKEAAAKEAAAKEAAAKGGTVSLQDEHRLFDIPVTTSLPDVWLQDFPQAWAETGGLGRAKCQAPIIIDLKPTAVPVSIKQYPMSLEAHMGIRQHIIKFLELGVLRPCRSPWNTPLLPVKKPGTQDYRPVQDLREINKRTVDIHPTVPNPYNLLSTLKPDYSWYTVLDLKDAFFCLPLAPQSQELFAFEWKDPERGISGQLTWTRLPQGFKNSPTLFNEALHRDLTDFRTQHPEVTLLQYVDDLLLAAPTKKACTQGTRHLLQELGEKGYRASAKKAQICQTKVTYLGYILSEGKRWLTPGRIETVARIPPPRNPREVREFLGKAGFCRLFIPGFAELAAPLYALTKPSTPFTWQTEHQLAFEALKKALLSAPALGLPDTSKPFTLFLDERQGIAKGVLTQKLGPWKRPVAYLSKKLDPVAAGWPPCLRIMAATAMLVKDSAKLTLGQPLTVITPHTLEAIVRQPPDRWITNARLTHYQALLLDTDRVQFGPPVTLNPATLLPVPENQPSPHDCRQVLAETHGTREDLKDQELPDADHTWYTDGSSYLDSGTRRAGAAVVDGHNTIWAQSLPPGTSAQKAELIALTKALELSKGKKANIYTDSRYAFATAHTHGSIYERRGWLTSEGKEIKNKAEIIALLKALFLPQEVAIIHCPGHQKGQDPVAVGNRQADRVARQAAMAEVLTLATEPDNTSHITAGKRTADGSEFEKRTADGSEFESPKKKAKVE

SEQ ID NO: 2001 - protein, 2102 aa, synthetic construct
MPAAKRVKLDGGDKKYSIGLDIGTNSVGWAVITDEYKVPSKKFKVLGNTDRHSIKKNLIGALLFDSGETAEATRLKRTARRRYTRRKNRICYLQEIFSNEMAKVDDSFFHRLEESFLVEEDKKHERHPIFGNIVDEVAYHEKYPTIYHLRKKLVDSTDKADLRLIYLALAHMIKFRGHFLIEGDLNPDNSDVDKLFIQLVQTYNQLFEENPINASGVDAKAILSARLSKSRRLENLIAQLPGEKKNGLFGNLIALSLGLTPNFKSNFDLAEDAKLQLSKDTYDDDLDNLLAQIGDQYADLFLAAKNLSDAILLSDILRVNTEITKAPLSASMIKRYDEHHQDLTLLKALVRQQLPEKYKEIFFDQSKNGYAGYIDGGASQEEFYKFIKPILEKMDGTEELLVKLNREDLLRKQRTFDNGSIPHQIHLGELHAILRRQEDFYPFLKDNREKIEKILTFRIPYYVGPLARGNSRFAWMTRKSEETITPWNFEEVVDKGASAQSFIERMTNFDKNLPNEKVLPKHSLLYEYFTVYNELTKVKYVTEGMRKPAFLSGEQKKAIVDLLFKTNRKVTVKQLKEDYFKKIECFDSVEISGVEDRFNASLGTYHDLLKIIKDKDFLDNEENEDILEDIVLTLTLFEDREMIEERLKTYAHLFDDKVMKQLKRRRYTGWGRLSRKLINGIRDKQSGKTILDFLKSDGFANRNFMQLIHDDSLTFKEDIQKAQVSGQGDSLHEHIANLAGSPAIKKGILQTVKVVDELVKVMGRHKPENIVIEMARENQTTQKGQKNSRERMKRIEEGIKELGSQILKEHPVENTQLQNEKLYLYYLQNGRDMYVDQELDINRLSDYDVDHIVPQSFLKDDSIDNKVLTRSDKARGKSDNVPSEEVVKKMKNYWRQLLNAKLITQRKFDNLTKAERGGLSELDKAGFIKRQLVETRQITKHVAQILDSRMNTKYDENDKLIREVKVITLKSKLVSDFRKDFQFYKVREINNYHHAHDAYLNAVVGTALIKKYPKLESEFVYGDYKVYDVRKMIAKSEQEIGKATAKYFFYSNIMNFFKTEITLANGEIRKRPLIETNGETGEIVWDKGRDFATVRKVLSMPQVNIVKKTEVQTGGFSKESILPKRNSDKLIARKKDWDPKKYGGFDSPTVAYSVLVVAKVEKGKSKKLKSVKELLGITIMERSSFEKNPIDFLEAKGYKEVKKDLIIKLPKYSLFELENGRKRMLASAGELQKGNELALPSKYVNFLYLASHYEKLKGSPEDNEQKQLFVEQHKHYLDEIIEQISEFSKRVILADANLDKVLSAYNKHRDKPIREQAENIIHLFTLTNLGAPAAFKYFDTTIDRKRYTSTKEVLDATLIHQSITGLYETRIDLSQLGGDGGEAAAKGGSGSSGGTVSLQDEHRLFDIPVTTSLPDVWLQDFPQAWAETGGLGRAKCQAPIIIDLKPTAVPVSIKQYPMSLEAHMGIRQHIIKFLELGVLRPCRSPWNTPLLPVKKPGTQDYRPVQDLREINKRTVDIHPTVPNPYNLLSTLKPDYSWYTVLDLKDAFFCLPLAPQSQELFAFEWKDPERGISGQLTWTRLPQGFKNSPTLFNEALHRDLTDFRTQHPEVTLLQYVDDLLLAAPTKKACTQGTRHLLQELGEKGYRASAKKAQICQTKVTYLGYILSEGKRWLTPGRIETVARIPPPRNPREVREFLGKAGFCRLFIPGFAELAAPLYALTKPSTPFTWQTEHQLAFEALKKALLSAPALGLPDTSKPFTLFLDERQGIAKGVLTQKLGPWKRPVAYLSKKLDPVAAGWPPCLRIMAATAMLVKDSAKLTLGQPLTVITPHTLEAIVRQPPDRWITNARLTHYQALLLDTDRVQFGPPVTLNPATLLPVPENQPSPHDCRQVLAETHGTREDLKDQELPDADHTWYTDGSSYLDSGTRRAGAAVVDGHNTIWAQSLPPGTSAQKAELIALTKALELSKGKKANIYTDSRYAFATAHTHGSIYERRGWLTSEGKEIKNKAEIIALLKALFLPQEVAIIHCPGHQKGQDPVAVGNRQADRVARQAAMAEVLTLATEPDNTSHITAGKRTADGSEFEKRTADGSEFESPKKKAKVE

SEQ ID NO: 2002 - protein, 2100 aa, synthetic construct
MPAAKRVKLDGGDKKYSIGLDIGTNSVGWAVITDEYKVPSKKFKVLGNTDRHSIKKNLIGALLFDSGETAEATRLKRTARRRYTRRKNRICYLQEIFSNEMAKVDDSFFHRLEESFLVEEDKKHERHPIFGNIVDEVAYHEKYPTIYHLRKKLVDSTDKADLRLIYLALAHMIKFRGHFLIEGDLNPDNSDVDKLFIQLVQTYNQLFEENPINASGVDAKAILSARLSKSRRLENLIAQLPGEKKNGLFGNLIALSLGLTPNFKSNFDLAEDAKLQLSKDTYDDDLDNLLAQIGDQYADLFLAAKNLSDAILLSDILRVNTEITKAPLSASMIKRYDEHHQDLTLLKALVRQQLPEKYKEIFFDQSKNGYAGYIDGGASQEEFYKFIKPILEKMDGTEELLVKLNREDLLRKQRTFDNGSIPHQIHLGELHAILRRQEDFYPFLKDNREKIEKILTFRIPYYVGPLARGNSRFAWMTRKSEETITPWNFEEVVDKGASAQSFIERMTNFDKNLPNEKVLPKHSLLYEYFTVYNELTKVKYVTEGMRKPAFLSGEQKKAIVDLLFKTNRKVTVKQLKEDYFKKIECFDSVEISGVEDRFNASLGTYHDLLKIIKDKDFLDNEENEDILEDIVLTLTLFEDREMIEERLKTYAHLFDDKVMKQLKRRRYTGWGRLSRKLINGIRDKQSGKTILDFLKSDGFANRNFMQLIHDDSLTFKEDIQKAQVSGQGDSLHEHIANLAGSPAIKKGILQTVKVVDELVKVMGRHKPENIVIEMARENQTTQKGQKNSRERMKRIEEGIKELGSQILKEHPVENTQLQNEKLYLYYLQNGRDMYVDQELDINRLSDYDVDHIVPQSFLKDDSIDNKVLTRSDKARGKSDNVPSEEVVKKMKNYWRQLLNAKLITQRKFDNLTKAERGGLSELDKAGFIKRQLVETRQITKHVAQILDSRMNTKYDENDKLIREVKVITLKSKLVSDFRKDFQFYKVREINNYHHAHDAYLNAVVGTALIKKYPKLESEFVYGDYKVYDVRKMIAKSEQEIGKATAKYFFYSNIMNFFKTEITLANGEIRKRPLIETNGETGEIVWDKGRDFATVRKVLSMPQVNIVKKTEVQTGGFSKESILPKRNSDKLIARKKDWDPKKYGGFDSPTVAYSVLVVAKVEKGKSKKLKSVKELLGITIMERSSFEKNPIDFLEAKGYKEVKKDLIIKLPKYSLFELENGRKRMLASAGELQKGNELALPSKYVNFLYLASHYEKLKGSPEDNEQKQLFVEQHKHYLDEIIEQISEFSKRVILADANLDKVLSAYNKHRDKPIREQAENIIHLFTLTNLGAPAAFKYFDTTIDRKRYTSTKEVLDATLIHQSITGLYETRIDLSQLGGDGGGGGGSSPAPGGTVSLQDEHRLFDIPVTTSLPDVWLQDFPQAWAETGGLGRAKCQAPIIIDLKPTAVPVSIKQYPMSLEAHMGIRQHIIKFLELGVLRPCRSPWNTPLLPVKKPGTQDYRPVQDLREINKRTVDIHPTVPNPYNLLSTLKPDYSWYTVLDLKDAFFCLPLAPQSQELFAFEWKDPERGISGQLTWTRLPQGFKNSPTLFNEALHRDLTDFRTQHPEVTLLQYVDDLLLAAPTKKACTQGTRHLLQELGEKGYRASAKKAQICQTKVTYLGYILSEGKRWLTPGRIETVARIPPPRNPREVREFLGKAGFCRLFIPGFAELAAPLYALTKPSTPFTWQTEHQLAFEALKKALLSAPALGLPDTSKPFTLFLDERQGIAKGVLTQKLGPWKRPVAYLSKKLDPVAAGWPPCLRIMAATAMLVKDSAKLTLGQPLTVITPHTLEAIVRQPPDRWITNARLTHYQALLLDTDRVQFGPPVTLNPATLLPVPENQPSPHDCRQVLAETHGTREDLKDQELPDADHTWYTDGSSYLDSGTRRAGAAVVDGHNTIWAQSLPPGTSAQKAELIALTKALELSKGKKANIYTDSRYAFATAHTHGSIYERRGWLTSEGKEIKNKAEIIALLKALFLPQEVAIIHCPGHQKGQDPVAVGNRQADRVARQAAMAEVLTLATEPDNTSHITAGKRTADGSEFEKRTADGSEFESPKKKAKVE

SEQ ID NO: 2003 - protein, 2102 aa, synthetic construct
MPAAKRVKLDGGDKKYSIGLDIGTNSVGWAVITDEYKVPSKKFKVLGNTDRHSIKKNLIGALLFDSGETAEATRLKRTARRRYTRRKNRICYLQEIFSNEMAKVDDSFFHRLEESFLVEEDKKHERHPIFGNIVDEVAYHEKYPTIYHLRKKLVDSTDKADLRLIYLALAHMIKFRGHFLIEGDLNPDNSDVDKLFIQLVQTYNQLFEENPINASGVDAKAILSARLSKSRRLENLIAQLPGEKKNGLFGNLIALSLGLTPNFKSNFDLAEDAKLQLSKDTYDDDLDNLLAQIGDQYADLFLAAKNLSDAILLSDILRVNTEITKAPLSASMIKRYDEHHQDLTLLKALVRQQLPEKYKEIFFDQSKNGYAGYIDGGASQEEFYKFIKPILEKMDGTEELLVKLNREDLLRKQRTFDNGSIPHQIHLGELHAILRRQEDFYPFLKDNREKIEKILTFRIPYYVGPLARGNSRFAWMTRKSEETITPWNFEEVVDKGASAQSFIERMTNFDKNLPNEKVLPKHSLLYEYFTVYNELTKVKYVTEGMRKPAFLSGEQKKAIVDLLFKTNRKVTVKQLKEDYFKKIECFDSVEISGVEDRFNASLGTYHDLLKIIKDKDFLDNEENEDILEDIVLTLTLFEDREMIEERLKTYAHLFDDKVMKQLKRRRYTGWGRLSRKLINGIRDKQSGKTILDFLKSDGFANRNFMQLIHDDSLTFKEDIQKAQVSGQGDSLHEHIANLAGSPAIKKGILQTVKVVDELVKVMGRHKPENIVIEMARENQTTQKGQKNSRERMKRIEEGIKELGSQILKEHPVENTQLQNEKLYLYYLQNGRDMYVDQELDINRLSDYDVDHIVPQSFLKDDSIDNKVLTRSDKARGKSDNVPSEEVVKKMKNYWRQLLNAKLITQRKFDNLTKAERGGLSELDKAGFIKRQLVETRQITKHVAQILDSRMNTKYDENDKLIREVKVITLKSKLVSDFRKDFQFYKVREINNYHHAHDAYLNAVVGTALIKKYPKLESEFVYGDYKVYDVRKMIAKSEQEIGKATAKYFFYSNIMNFFKTEITLANGEIRKRPLIETNGETGEIVWDKGRDFATVRKVLSMPQVNIVKKTEVQTGGFSKESILPKRNSDKLIARKKDWDPKKYGGFDSPTVAYSVLVVAKVEKGKSKKLKSVKELLGITIMERSSFEKNPIDFLEAKGYKEVKKDLIIKLPKYSLFELENGRKRMLASAGELQKGNELALPSKYVNFLYLASHYEKLKGSPEDNEQKQLFVEQHKHYLDEIIEQISEFSKRVILADANLDKVLSAYNKHRDKPIREQAENIIHLFTLTNLGAPAAFKYFDTTIDRKRYTSTKEVLDATLIHQSITGLYETRIDLSQLGGDGGGGSGGGEAAAKGGTVSLQDEHRLFDIPVTTSLPDVWLQDFPQAWAETGGLGRAKCQAPIIIDLKPTAVPVSIKQYPMSLEAHMGIRQHIIKFLELGVLRPCRSPWNTPLLPVKKPGTQDYRPVQDLREINKRTVDIHPTVPNPYNLLSTLKPDYSWYTVLDLKDAFFCLPLAPQSQELFAFEWKDPERGISGQLTWTRLPQGFKNSPTLFNEALHRDLTDFRTQHPEVTLLQYVDDLLLAAPTKKACTQGTRHLLQELGEKGYRASAKKAQICQTKVTYLGYILSEGKRWLTPGRIETVARIPPPRNPREVREFLGKAGFCRLFIPGFAELAAPLYALTKPSTPFTWQTEHQLAFEALKKALLSAPALGLPDTSKPFTLFLDERQGIAKGVLTQKLGPWKRPVAYLSKKLDPVAAGWPPCLRIMAATAMLVKDSAKLTLGQPLTVITPHTLEAIVRQPPDRWITNARLTHYQALLLDTDRVQFGPPVTLNPATLLPVPENQPSPHDCRQVLAETHGTREDLKDQELPDADHTWYTDGSSYLDSGTRRAGAAVVDGHNTIWAQSLPPGTSAQKAELIALTKALELSKGKKANIYTDSRYAFATAHTHGSIYERRGWLTSEGKEIKNKAEIIALLKALFLPQEVAIIHCPGHQKGQDPVAVGNRQADRVARQAAMAEVLTLATEPDNTSHITAGKRTADGSEFEKRTADGSEFESPKKKAKVE

SEQ ID NO: 2004 - protein, 2099 aa, synthetic construct
MPAAKRVKLDGGDKKYSIGLDIGTNSVGWAVITDEYKVPSKKFKVLGNTDRHSIKKNLIGALLFDSGETAEATRLKRTARRRYTRRKNRICYLQEIFSNEMAKVDDSFFHRLEESFLVEEDKKHERHPIFGNIVDEVAYHEKYPTIYHLRKKLVDSTDKADLRLIYLALAHMIKFRGHFLIEGDLNPDNSDVDKLFIQLVQTYNQLFEENPINASGVDAKAILSARLSKSRRLENLIAQLPGEKKNGLFGNLIALSLGLTPNFKSNFDLAEDAKLQLSKDTYDDDLDNLLAQIGDQYADLFLAAKNLSDAILLSDILRVNTEITKAPLSASMIKRYDEHHQDLTLLKALVRQQLPEKYKEIFFDQSKNGYAGYIDGGASQEEFYKFIKPILEKMDGTEELLVKLNREDLLRKQRTFDNGSIPHQIHLGELHAILRRQEDFYPFLKDNREKIEKILTFRIPYYVGPLARGNSRFAWMTRKSEETITPWNFEEVVDKGASAQSFIERMTNFDKNLPNEKVLPKHSLLYEYFTVYNELTKVKYVTEGMRKPAFLSGEQKKAIVDLLFKTNRKVTVKQLKEDYFKKIECFDSVEISGVEDRFNASLGTYHDLLKIIKDKDFLDNEENEDILEDIVLTLTLFEDREMIEERLKTYAHLFDDKVMKQLKRRRYTGWGRLSRKLINGIRDKQSGKTILDFLKSDGFANRNFMQLIHDDSLTFKEDIQKAQVSGQGDSLHEHIANLAGSPAIKKGILQTVKVVDELVKVMGRHKPENIVIEMARENQTTQKGQKNSRERMKRIEEGIKELGSQILKEHPVENTQLQNEKLYLYYLQNGRDMYVDQELDINRLSDYDVDHIVPQSFLKDDSIDNKVLTRSDKARGKSDNVPSEEVVKKMKNYWRQLLNAKLITQRKFDNLTKAERGGLSELDKAGFIKRQLVETRQITKHVAQILDSRMNTKYDENDKLIREVKVITLKSKLVSDFRKDFQFYKVREINNYHHAHDAYLNAVVGTALIKKYPKLESEFVYGDYKVYDVRKMIAKSEQEIGKATAKYFFYSNIMNFFKTEITLANGEIRKRPLIETNGETGEIVWDKGRDFATVRKVLSMPQVNIVKKTEVQTGGFSKESILPKRNSDKLIARKKDWDPKKYGGFDSPTVAYSVLVVAKVEKGKSKKLKSVKELLGITIMERSSFEKNPIDFLEAKGYKEVKKDLIIKLPKYSLFELENGRKRMLASAGELQKGNELALPSKYVNFLYLASHYEKLKGSPEDNEQKQLFVEQHKHYLDEIIEQISEFSKRVILADANLDKVLSAYNKHRDKPIREQAENIIHLFTLTNLGAPAAFKYFDTTIDRKRYTSTKEVLDATLIHQSITGLYETRIDLSQLGGDGGGGGEAAAKGGTVSLQDEHRLFDIPVTTSLPDVWLQDFPQAWAETGGLGRAKCQAPIIIDLKPTAVPVSIKQYPMSLEAHMGIRQHIIKFLELGVLRPCRSPWNTPLLPVKKPGTQDYRPVQDLREINKRTVDIHPTVPNPYNLLSTLKPDYSWYTVLDLKDAFFCLPLAPQSQELFAFEWKDPERGISGQLTWTRLPQGFKNSPTLFNEALHRDLTDFRTQHPEVTLLQYVDDLLLAAPTKKACTQGTRHLLQELGEKGYRASAKKAQICQTKVTYLGYILSEGKRWLTPGRIETVARIPPPRNPREVREFLGKAGFCRLFIPGFAELAAPLYALTKPSTPFTWQTEHQLAFEALKKALLSAPALGLPDTSKPFTLFLDERQGIAKGVLTQKLGPWKRPVAYLSKKLDPVAAGWPPCLRIMAATAMLVKDSAKLTLGQPLTVITPHTLEAIVRQPPDRWITNARLTHYQALLLDTDRVQFGPPVTLNPATLLPVPENQPSPHDCRQVLAETHGTREDLKDQELPDADHTWYTDGSSYLDSGTRRAGAAVVDGHNTIWAQSLPPGTSAQKAELIALTKALELSKGKKANIYTDSRYAFATAHTHGSIYERRGWLTSEGKEIKNKAEIIALLKALFLPQEVAIIHCPGHQKGQDPVAVGNRQADRVARQAAMAEVLTLATEPDNTSHITAGKRTADGSEFEKRTADGSEFESPKKKAKVE

SEQ ID NO: 2005 - protein, 2103 aa, synthetic construct
MPAAKRVKLDGGDKKYSIGLDIGTNSVGWAVITDEYKVPSKKFKVLGNTDRHSIKKNLIGALLFDSGETAEATRLKRTARRRYTRRKNRICYLQEIFSNEMAKVDDSFFHRLEESFLVEEDKKHERHPIFGNIVDEVAYHEKYPTIYHLRKKLVDSTDKADLRLIYLALAHMIKFRGHFLIEGDLNPDNSDVDKLFIQLVQTYNQLFEENPINASGVDAKAILSARLSKSRRLENLIAQLPGEKKNGLFGNLIALSLGLTPNFKSNFDLAEDAKLQLSKDTYDDDLDNLLAQIGDQYADLFLAAKNLSDAILLSDILRVNTEITKAPLSASMIKRYDEHHQDLTLLKALVRQQLPEKYKEIFFDQSKNGYAGYIDGGASQEEFYKFIKPILEKMDGTEELLVKLNREDLLRKQRTFDNGSIPHQIHLGELHAILRRQEDFYPFLKDNREKIEKILTFRIPYYVGPLARGNSRFAWMTRKSEETITPWNFEEVVDKGASAQSFIERMTNFDKNLPNEKVLPKHSLLYEYFTVYNELTKVKYVTEGMRKPAFLSGEQKKAIVDLLFKTNRKVTVKQLKEDYFKKIECFDSVEISGVEDRFNASLGTYHDLLKIIKDKDFLDNEENEDILEDIVLTLTLFEDREMIEERLKTYAHLFDDKVMKQLKRRRYTGWGRLSRKLINGIRDKQSGKTILDFLKSDGFANRNFMQLIHDDSLTFKEDIQKAQVSGQGDSLHEHIANLAGSPAIKKGILQTVKVVDELVKVMGRHKPENIVIEMARENQTTQKGQKNSRERMKRIEEGIKELGSQILKEHPVENTQLQNEKLYLYYLQNGRDMYVDQELDINRLSDYDVDHIVPQSFLKDDSIDNKVLTRSDKARGKSDNVPSEEVVKKMKNYWRQLLNAKLITQRKFDNLTKAERGGLSELDKAGFIKRQLVETRQITKHVAQILDSRMNTKYDENDKLIREVKVITLKSKLVSDFRKDFQFYKVREINNYHHAHDAYLNAVVGTALIKKYPKLESEFVYGDYKVYDVRKMIAKSEQEIGKATAKYFFYSNIMNFFKTEITLANGEIRKRPLIETNGETGEIVWDKGRDFATVRKVLSMPQVNIVKKTEVQTGGFSKESILPKRNSDKLIARKKDWDPKKYGGFDSPTVAYSVLVVAKVEKGKSKKLKSVKELLGITIMERSSFEKNPIDFLEAKGYKEVKKDLIIKLPKYSLFELENGRKRMLASAGELQKGNELALPSKYVNFLYLASHYEKLKGSPEDNEQKQLFVEQHKHYLDEIIEQISEFSKRVILADANLDKVLSAYNKHRDKPIREQAENIIHLFTLTNLGAPAAFKYFDTTIDRKRYTSTKEVLDATLIHQSITGLYETRIDLSQLGGDGGGSAGSAAGSGEFGGTVSLQDEHRLFDIPVTTSLPDVWLQDFPQAWAETGGLGRAKCQAPIIIDLKPTAVPVSIKQYPMSLEAHMGIRQHIIKFLELGVLRPCRSPWNTPLLPVKKPGTQDYRPVQDLREINKRTVDIHPTVPNPYNLLSTLKPDYSWYTVLDLKDAFFCLPLAPQSQELFAFEWKDPERGISGQLTWTRLPQGFKNSPTLFNEALHRDLTDFRTQHPEVTLLQYVDDLLLAAPTKKACTQGTRHLLQELGEKGYRASAKKAQICQTKVTYLGYILSEGKRWLTPGRIETVARIPPPRNPREVREFLGKAGFCRLFIPGFAELAAPLYALTKPSTPFTWQTEHQLAFEALKKALLSAPALGLPDTSKPFTLFLDERQGIAKGVLTQKLGPWKRPVAYLSKKLDPVAAGWPPCLRIMAATAMLVKDSAKLTLGQPLTVITPHTLEAIVRQPPDRWITNARLTHYQALLLDTDRVQFGPPVTLNPATLLPVPENQPSPHDCRQVLAETHGTREDLKDQELPDADHTWYTDGSSYLDSGTRRAGAAVVDGHNTIWAQSLPPGTSAQKAELIALTKALELSKGKKANIYTDSRYAFATAHTHGSIYERRGWLTSEGKEIKNKAEIIALLKALFLPQEVAIIHCPGHQKGQDPVAVGNRQADRVARQAAMAEVLTLATEPDNTSHITAGKRTADGSEFEKRTADGSEFESPKKKAKVE

SEQ ID NO: 2006 - protein, 2096 aa, synthetic construct
MPAAKRVKLDGGDKKYSIGLDIGTNSVGWAVITDEYKVPSKKFKVLGNTDRHSIKKNLIGALLFDSGETAEATRLKRTARRRYTRRKNRICYLQEIFSNEMAKVDDSFFHRLEESFLVEEDKKHERHPIFGNIVDEVAYHEKYPTIYHLRKKLVDSTDKADLRLIYLALAHMIKFRGHFLIEGDLNPDNSDVDKLFIQLVQTYNQLFEENPINASGVDAKAILSARLSKSRRLENLIAQLPGEKKNGLFGNLIALSLGLTPNFKSNFDLAEDAKLQLSKDTYDDDLDNLLAQIGDQYADLFLAAKNLSDAILLSDILRVNTEITKAPLSASMIKRYDEHHQDLTLLKALVRQQLPEKYKEIFFDQSKNGYAGYIDGGASQEEFYKFIKPILEKMDGTEELLVKLNREDLLRKQRTFDNGSIPHQIHLGELHAILRRQEDFYPFLKDNREKIEKILTFRIPYYVGPLARGNSRFAWMTRKSEETITPWNFEEVVDKGASAQSFIERMTNFDKNLPNEKVLPKHSLLYEYFTVYNELTKVKYVTEGMRKPAFLSGEQKKAIVDLLFKTNRKVTVKQLKEDYFKKIECFDSVEISGVEDRFNASLGTYHDLLKIIKDKDFLDNEENEDILEDIVLTLTLFEDREMIEERLKTYAHLFDDKVMKQLKRRRYTGWGRLSRKLINGIRDKQSGKTILDFLKSDGFANRNFMQLIHDDSLTFKEDIQKAQVSGQGDSLHEHIANLAGSPAIKKGILQTVKVVDELVKVMGRHKPENIVIEMARENQTTQKGQKNSRERMKRIEEGIKELGSQILKEHPVENTQLQNEKLYLYYLQNGRDMYVDQELDINRLSDYDVDHIVPQSFLKDDSIDNKVLTRSDKARGKSDNVPSEEVVKKMKNYWRQLLNAKLITQRKFDNLTKAERGGLSELDKAGFIKRQLVETRQITKHVAQILDSRMNTKYDENDKLIREVKVITLKSKLVSDFRKDFQFYKVREINNYHHAHDAYLNAVVGTALIKKYPKLESEFVYGDYKVYDVRKMIAKSEQEIGKATAKYFFYSNIMNFFKTEITLANGEIRKRPLIETNGETGEIVWDKGRDFATVRKVLSMPQVNIVKKTEVQTGGFSKESILPKRNSDKLIARKKDWDPKKYGGFDSPTVAYSVLVVAKVEKGKSKKLKSVKELLGITIMERSSFEKNPIDFLEAKGYKEVKKDLIIKLPKYSLFELENGRKRMLASAGELQKGNELALPSKYVNFLYLASHYEKLKGSPEDNEQKQLFVEQHKHYLDEIIEQISEFSKRVILADANLDKVLSAYNKHRDKPIREQAENIIHLFTLTNLGAPAAFKYFDTTIDRKRYTSTKEVLDATLIHQSITGLYETRIDLSQLGGDGGGGGGSGGTVSLQDEHRLFDIPVTTSLPDVWLQDFPQAWAETGGLGRAKCQAPIIIDLKPTAVPVSIKQYPMSLEAHMGIRQHIIKFLELGVLRPCRSPWNTPLLPVKKPGTQDYRPVQDLREINKRTVDIHPTVPNPYNLLSTLKPDYSWYTVLDLKDAFFCLPLAPQSQELFAFEWKDPERGISGQLTWTRLPQGFKNSPTLFNEALHRDLTDFRTQHPEVTLLQYVDDLLLAAPTKKACTQGTRHLLQELGEKGYRASAKKAQICQTKVTYLGYILSEGKRWLTPGRIETVARIPPPRNPREVREFLGKAGFCRLFIPGFAELAAPLYALTKPSTPFTWQTEHQLAFEALKKALLSAPALGLPDTSKPFTLFLDERQGIAKGVLTQKLGPWKRPVAYLSKKLDPVAAGWPPCLRIMAATAMLVKDSAKLTLGQPLTVITPHTLEAIVRQPPDRWITNARLTHYQALLLDTDRVQFGPPVTLNPATLLPVPENQPSPHDCRQVLAETHGTREDLKDQELPDADHTWYTDGSSYLDSGTRRAGAAVVDGHNTIWAQSLPPGTSAQKAELIALTKALELSKGKKANIYTDSRYAFATAHTHGSIYERRGWLTSEGKEIKNKAEIIALLKALFLPQEVAIIHCPGHQKGQDPVAVGNRQADRVARQAAMAEVLTLATEPDNTSHITAGKRTADGSEFEKRTADGSEFESPKKKAKVE

SEQ ID NO: 2007 - protein, 2100 aa, synthetic construct
MPAAKRVKLDGGDKKYSIGLDIGTNSVGWAVITDEYKVPSKKFKVLGNTDRHSIKKNLIGALLFDSGETAEATRLKRTARRRYTRRKNRICYLQEIFSNEMAKVDDSFFHRLEESFLVEEDKKHERHPIFGNIVDEVAYHEKYPTIYHLRKKLVDSTDKADLRLIYLALAHMIKFRGHFLIEGDLNPDNSDVDKLFIQLVQTYNQLFEENPINASGVDAKAILSARLSKSRRLENLIAQLPGEKKNGLFGNLIALSLGLTPNFKSNFDLAEDAKLQLSKDTYDDDLDNLLAQIGDQYADLFLAAKNLSDAILLSDILRVNTEITKAPLSASMIKRYDEHHQDLTLLKALVRQQLPEKYKEIFFDQSKNGYAGYIDGGASQEEFYKFIKPILEKMDGTEELLVKLNREDLLRKQRTFDNGSIPHQIHLGELHAILRRQEDFYPFLKDNREKIEKILTFRIPYYVGPLARGNSRFAWMTRKSEETITPWNFEEVVDKGASAQSFIERMTNFDKNLPNEKVLPKHSLLYEYFTVYNELTKVKYVTEGMRKPAFLSGEQKKAIVDLLFKTNRKVTVKQLKEDYFKKIECFDSVEISGVEDRFNASLGTYHDLLKIIKDKDFLDNEENEDILEDIVLTLTLFEDREMIEERLKTYAHLFDDKVMKQLKRRRYTGWGRLSRKLINGIRDKQSGKTILDFLKSDGFANRNFMQLIHDDSLTFKEDIQKAQVSGQGDSLHEHIANLAGSPAIKKGILQTVKVVDELVKVMGRHKPENIVIEMARENQTTQKGQKNSRERMKRIEEGIKELGSQILKEHPVENTQLQNEKLYLYYLQNGRDMYVDQELDINRLSDYDVDHIVPQSFLKDDSIDNKVLTRSDKARGKSDNVPSEEVVKKMKNYWRQLLNAKLITQRKFDNLTKAERGGLSELDKAGFIKRQLVETRQITKHVAQILDSRMNTKYDENDKLIREVKVITLKSKLVSDFRKDFQFYKVREINNYHHAHDAYLNAVVGTALIKKYPKLESEFVYGDYKVYDVRKMIAKSEQEIGKATAKYFFYSNIMNFFKTEITLANGEIRKRPLIETNGETGEIVWDKGRDFATVRKVLSMPQVNIVKKTEVQTGGFSKESILPKRNSDKLIARKKDWDPKKYGGFDSPTVAYSVLVVAKVEKGKSKKLKSVKELLGITIMERSSFEKNPIDFLEAKGYKEVKKDLIIKLPKYSLFELENGRKRMLASAGELQKGNELALPSKYVNFLYLASHYEKLKGSPEDNEQKQLFVEQHKHYLDEIIEQISEFSKRVILADANLDKVLSAYNKHRDKPIREQAENIIHLFTLTNLGAPAAFKYFDTTIDRKRYTSTKEVLDATLIHQSITGLYETRIDLSQLGGDGGGSSGGGPAPGGTVSLQDEHRLFDIPVTTSLPDVWLQDFPQAWAETGGLGRAKCQAPIIIDLKPTAVPVSIKQYPMSLEAHMGIRQHIIKFLELGVLRPCRSPWNTPLLPVKKPGTQDYRPVQDLREINKRTVDIHPTVPNPYNLLSTLKPDYSWYTVLDLKDAFFCLPLAPQSQELFAFEWKDPERGISGQLTWTRLPQGFKNSPTLFNEALHRDLTDFRTQHPEVTLLQYVDDLLLAAPTKKACTQGTRHLLQELGEKGYRASAKKAQICQTKVTYLGYILSEGKRWLTPGRIETVARIPPPRNPREVREFLGKAGFCRLFIPGFAELAAPLYALTKPSTPFTWQTEHQLAFEALKKALLSAPALGLPDTSKPFTLFLDERQGIAKGVLTQKLGPWKRPVAYLSKKLDPVAAGWPPCLRIMAATAMLVKDSAKLTLGQPLTVITPHTLEAIVRQPPDRWITNARLTHYQALLLDTDRVQFGPPVTLNPATLLPVPENQPSPHDCRQVLAETHGTREDLKDQELPDADHTWYTDGSSYLDSGTRRAGAAVVDGHNTIWAQSLPPGTSAQKAELIALTKALELSKGKKANIYTDSRYAFATAHTHGSIYERRGWLTSEGKEIKNKAEIIALLKALFLPQEVAIIHCPGHQKGQDPVAVGNRQADRVARQAAMAEVLTLATEPDNTSHITAGKRTADGSEFEKRTADGSEFESPKKKAKVE

SEQ ID NO: 2008 - protein, 2096 aa, synthetic construct
MPAAKRVKLDGGDKKYSIGLDIGTNSVGWAVITDEYKVPSKKFKVLGNTDRHSIKKNLIGALLFDSGETAEATRLKRTARRRYTRRKNRICYLQEIFSNEMAKVDDSFFHRLEESFLVEEDKKHERHPIFGNIVDEVAYHEKYPTIYHLRKKLVDSTDKADLRLIYLALAHMIKFRGHFLIEGDLNPDNSDVDKLFIQLVQTYNQLFEENPINASGVDAKAILSARLSKSRRLENLIAQLPGEKKNGLFGNLIALSLGLTPNFKSNFDLAEDAKLQLSKDTYDDDLDNLLAQIGDQYADLFLAAKNLSDAILLSDILRVNTEITKAPLSASMIKRYDEHHQDLTLLKALVRQQLPEKYKEIFFDQSKNGYAGYIDGGASQEEFYKFIKPILEKMDGTEELLVKLNREDLLRKQRTFDNGSIPHQIHLGELHAILRRQEDFYPFLKDNREKIEKILTFRIPYYVGPLARGNSRFAWMTRKSEETITPWNFEEVVDKGASAQSFIERMTNFDKNLPNEKVLPKHSLLYEYFTVYNELTKVKYVTEGMRKPAFLSGEQKKAIVDLLFKTNRKVTVKQLKEDYFKKIECFDSVEISGVEDRFNASLGTYHDLLKIIKDKDFLDNEENEDILEDIVLTLTLFEDREMIEERLKTYAHLFDDKVMKQLKRRRYTGWGRLSRKLINGIRDKQSGKTILDFLKSDGFANRNFMQLIHDDSLTFKEDIQKAQVSGQGDSLHEHIANLAGSPAIKKGILQTVKVVDELVKVMGRHKPENIVIEMARENQTTQKGQKNSRERMKRIEEGIKELGSQILKEHPVENTQLQNEKLYLYYLQNGRDMYVDQELDINRLSDYDVDHIVPQSFLKDDSIDNKVLTRSDKARGKSDNVPSEEVVKKMKNYWRQLLNAKLITQRKFDNLTKAERGGLSELDKAGFIKRQLVETRQITKHVAQILDSRMNTKYDENDKLIREVKVITLKSKLVSDFRKDFQFYKVREINNYHHAHDAYLNAVVGTALIKKYPKLESEFVYGDYKVYDVRKMIAKSEQEIGKATAKYFFYSNIMNFFKTEITLANGEIRKRPLIETNGETGEIVWDKGRDFATVRKVLSMPQVNIVKKTEVQTGGFSKESILPKRNSDKLIARKKDWDPKKYGGFDSPTVAYSVLVVAKVEKGKSKKLKSVKELLGITIMERSSFEKNPIDFLEAKGYKEVKKDLIIKLPKYSLFELENGRKRMLASAGELQKGNELALPSKYVNFLYLASHYEKLKGSPEDNEQKQLFVEQHKHYLDEIIEQISEFSKRVILADANLDKVLSAYNKHRDKPIREQAENIIHLFTLTNLGAPAAFKYFDTTIDRKRYTSTKEVLDATLIHQSITGLYETRIDLSQLGGDGGEAAAKGGTVSLQDEHRLFDIPVTTSLPDVWLQDFPQAWAETGGLGRAKCQAPIIIDLKPTAVPVSIKQYPMSLEAHMGIRQHIIKFLELGVLRPCRSPWNTPLLPVKKPGTQDYRPVQDLREINKRTVDIHPTVPNPYNLLSTLKPDYSWYTVLDLKDAFFCLPLAPQSQELFAFEWKDPERGISGQLTWTRLPQGFKNSPTLFNEALHRDLTDFRTQHPEVTLLQYVDDLLLAAPTKKACTQGTRHLLQELGEKGYRASAKKAQICQTKVTYLGYILSEGKRWLTPGRIETVARIPPPRNPREVREFLGKAGFCRLFIPGFAELAAPLYALTKPSTPFTWQTEHQLAFEALKKALLSAPALGLPDTSKPFTLFLDERQGIAKGVLTQKLGPWKRPVAYLSKKLDPVAAGWPPCLRIMAATAMLVKDSAKLTLGQPLTVITPHTLEAIVRQPPDRWITNARLTHYQALLLDTDRVQFGPPVTLNPATLLPVPENQPSPHDCRQVLAETHGTREDLKDQELPDADHTWYTDGSSYLDSGTRRAGAAVVDGHNTIWAQSLPPGTSAQKAELIALTKALELSKGKKANIYTDSRYAFATAHTHGSIYERRGWLTSEGKEIKNKAEIIALLKALFLPQEVAIIHCPGHQKGQDPVAVGNRQADRVARQAAMAEVLTLATEPDNTSHITAGKRTADGSEFEKRTADGSEFESPKKKAKVE

SEQ ID NO: 2009 - protein, 2102 aa, synthetic construct
MPAAKRVKLDGGDKKYSIGLDIGTNSVGWAVITDEYKVPSKKFKVLGNTDRHSIKKNLIGALLFDSGETAEATRLKRTARRRYTRRKNRICYLQEIFSNEMAKVDDSFFHRLEESFLVEEDKKHERHPIFGNIVDEVAYHEKYPTIYHLRKKLVDSTDKADLRLIYLALAHMIKFRGHFLIEGDLNPDNSDVDKLFIQLVQTYNQLFEENPINASGVDAKAILSARLSKSRRLENLIAQLPGEKKNGLFGNLIALSLGLTPNFKSNFDLAEDAKLQLSKDTYDDDLDNLLAQIGDQYADLFLAAKNLSDAILLSDILRVNTEITKAPLSASMIKRYDEHHQDLTLLKALVRQQLPEKYKEIFFDQSKNGYAGYIDGGASQEEFYKFIKPILEKMDGTEELLVKLNREDLLRKQRTFDNGSIPHQIHLGELHAILRRQEDFYPFLKDNREKIEKILTFRIPYYVGPLARGNSRFAWMTRKSEETITPWNFEEVVDKGASAQSFIERMTNFDKNLPNEKVLPKHSLLYEYFTVYNELTKVKYVTEGMRKPAFLSGEQKKAIVDLLFKTNRKVTVKQLKEDYFKKIECFDSVEISGVEDRFNASLGTYHDLLKIIKDKDFLDNEENEDILEDIVLTLTLFEDREMIEERLKTYAHLFDDKVMKQLKRRRYTGWGRLSRKLINGIRDKQSGKTILDFLKSDGFANRNFMQLIHDDSLTFKEDIQKAQVSGQGDSLHEHIANLAGSPAIKKGILQTVKVVDELVKVMGRHKPENIVIEMARENQTTQKGQKNSRERMKRIEEGIKELGSQILKEHPVENTQLQNEKLYLYYLQNGRDMYVDQELDINRLSDYDVDHIVPQSFLKDDSIDNKVLTRSDKARGKSDNVPSEEVVKKMKNYWRQLLNAKLITQRKFDNLTKAERGGLSELDKAGFIKRQLVETRQITKHVAQILDSRMNTKYDENDKLIREVKVITLKSKLVSDFRKDFQFYKVREINNYHHAHDAYLNAVVGTALIKKYPKLESEFVYGDYKVYDVRKMIAKSEQEIGKATAKYFFYSNIMNFFKTEITLANGEIRKRPLIETNGETGEIVWDKGRDFATVRKVLSMPQVNIVKKTEVQTGGFSKESILPKRNSDKLIARKKDWDPKKYGGFDSPTVAYSVLVVAKVEKGKSKKLKSVKELLGITIMERSSFEKNPIDFLEAKGYKEVKKDLIIKLPKYSLFELENGRKRMLASAGELQKGNELALPSKYVNFLYLASHYEKLKGSPEDNEQKQLFVEQHKHYLDEIIEQISEFSKRVILADANLDKVLSAYNKHRDKPIREQAENIIHLFTLTNLGAPAAFKYFDTTIDRKRYTSTKEVLDATLIHQSITGLYETRIDLSQLGGDGGEAAAKGGGGSSGGTVSLQDEHRLFDIPVTTSLPDVWLQDFPQAWAETGGLGRAKCQAPIIIDLKPTAVPVSIKQYPMSLEAHMGIRQHIIKFLELGVLRPCRSPWNTPLLPVKKPGTQDYRPVQDLREINKRTVDIHPTVPNPYNLLSTLKPDYSWYTVLDLKDAFFCLPLAPQSQELFAFEWKDPERGISGQLTWTRLPQGFKNSPTLFNEALHRDLTDFRTQHPEVTLLQYVDDLLLAAPTKKACTQGTRHLLQELGEKGYRASAKKAQICQTKVTYLGYILSEGKRWLTPGRIETVARIPPPRNPREVREFLGKAGFCRLFIPGFAELAAPLYALTKPSTPFTWQTEHQLAFEALKKALLSAPALGLPDTSKPFTLFLDERQGIAKGVLTQKLGPWKRPVAYLSKKLDPVAAGWPPCLRIMAATAMLVKDSAKLTLGQPLTVITPHTLEAIVRQPPDRWITNARLTHYQALLLDTDRVQFGPPVTLNPATLLPVPENQPSPHDCRQVLAETHGTREDLKDQELPDADHTWYTDGSSYLDSGTRRAGAAVVDGHNTIWAQSLPPGTSAQKAELIALTKALELSKGKKANIYTDSRYAFATAHTHGSIYERRGWLTSEGKEIKNKAEIIALLKALFLPQEVAIIHCPGHQKGQDPVAVGNRQADRVARQAAMAEVLTLATEPDNTSHITAGKRTADGSEFEKRTADGSEFESPKKKAKVE

SEQ ID NO: 2010 - protein, 2100 aa, synthetic construct
MPAAKRVKLDGGDKKYSIGLDIGTNSVGWAVITDEYKVPSKKFKVLGNTDRHSIKKNLIGALLFDSGETAEATRLKRTARRRYTRRKNRICYLQEIFSNEMAKVDDSFFHRLEESFLVEEDKKHERHPIFGNIVDEVAYHEKYPTIYHLRKKLVDSTDKADLRLIYLALAHMIKFRGHFLIEGDLNPDNSDVDKLFIQLVQTYNQLFEENPINASGVDAKAILSARLSKSRRLENLIAQLPGEKKNGLFGNLIALSLGLTPNFKSNFDLAEDAKLQLSKDTYDDDLDNLLAQIGDQYADLFLAAKNLSDAILLSDILRVNTEITKAPLSASMIKRYDEHHQDLTLLKALVRQQLPEKYKEIFFDQSKNGYAGYIDGGASQEEFYKFIKPILEKMDGTEELLVKLNREDLLRKQRTFDNGSIPHQIHLGELHAILRRQEDFYPFLKDNREKIEKILTFRIPYYVGPLARGNSRFAWMTRKSEETITPWNFEEVVDKGASAQSFIERMTNFDKNLPNEKVLPKHSLLYEYFTVYNELTKVKYVTEGMRKPAFLSGEQKKAIVDLLFKTNRKVTVKQLKEDYFKKIECFDSVEISGVEDRFNASLGTYHDLLKIIKDKDFLDNEENEDILEDIVLTLTLFEDREMIEERLKTYAHLFDDKVMKQLKRRRYTGWGRLSRKLINGIRDKQSGKTILDFLKSDGFANRNFMQLIHDDSLTFKEDIQKAQVSGQGDSLHEHIANLAGSPAIKKGILQTVKVVDELVKVMGRHKPENIVIEMARENQTTQKGQKNSRERMKRIEEGIKELGSQILKEHPVENTQLQNEKLYLYYLQNGRDMYVDQELDINRLSDYDVDHIVPQSFLKDDSIDNKVLTRSDKARGKSDNVPSEEVVKKMKNYWRQLLNAKLITQRKFDNLTKAERGGLSELDKAGFIKRQLVETRQITKHVAQILDSRMNTKYDENDKLIREVKVITLKSKLVSDFRKDFQFYKVREINNYHHAHDAYLNAVVGTALIKKYPKLESEFVYGDYKVYDVRKMIAKSEQEIGKATAKYFFYSNIMNFFKTEITLANGEIRKRPLIETNGETGEIVWDKGRDFATVRKVLSMPQVNIVKKTEVQTGGFSKESILPKRNSDKLIARKKDWDPKKYGGFDSPTVAYSVLVVAKVEKGKSKKLKSVKELLGITIMERSSFEKNPIDFLEAKGYKEVKKDLIIKLPKYSLFELENGRKRMLASAGELQKGNELALPSKYVNFLYLASHYEKLKGSPEDNEQKQLFVEQHKHYLDEIIEQISEFSKRVILADANLDKVLSAYNKHRDKPIREQAENIIHLFTLTNLGAPAAFKYFDTTIDRKRYTSTKEVLDATLIHQSITGLYETRIDLSQLGGDGGPAPGGSGGGGGTVSLQDEHRLFDIPVTTSLPDVWLQDFPQAWAETGGLGRAKCQAPIIIDLKPTAVPVSIKQYPMSLEAHMGIRQHIIKFLELGVLRPCRSPWNTPLLPVKKPGTQDYRPVQDLREINKRTVDIHPTVPNPYNLLSTLKPDYSWYTVLDLKDAFFCLPLAPQSQELFAFEWKDPERGISGQLTWTRLPQGFKNSPTLFNEALHRDLTDFRTQHPEVTLLQYVDDLLLAAPTKKACTQGTRHLLQELGEKGYRASAKKAQICQTKVTYLGYILSEGKRWLTPGRIETVARIPPPRNPREVREFLGKAGFCRLFIPGFAELAAPLYALTKPSTPFTWQTEHQLAFEALKKALLSAPALGLPDTSKPFTLFLDERQGIAKGVLTQKLGPWKRPVAYLSKKLDPVAAGWPPCLRIMAATAMLVKDSAKLTLGQPLTVITPHTLEAIVRQPPDRWITNARLTHYQALLLDTDRVQFGPPVTLNPATLLPVPENQPSPHDCRQVLAETHGTREDLKDQELPDADHTWYTDGSSYLDSGTRRAGAAVVDGHNTIWAQSLPPGTSAQKAELIALTKALELSKGKKANIYTDSRYAFATAHTHGSIYERRGWLTSEGKEIKNKAEIIALLKALFLPQEVAIIHCPGHQKGQDPVAVGNRQADRVARQAAMAEVLTLATEPDNTSHITAGKRTADGSEFEKRTADGSEFESPKKKAKVE

SEQ ID NO: 2011 - protein, 2100 aa, synthetic construct
MPAAKRVKLDGGDKKYSIGLDIGTNSVGWAVITDEYKVPSKKFKVLGNTDRHSIKKNLIGALLFDSGETAEATRLKRTARRRYTRRKNRICYLQEIFSNEMAKVDDSFFHRLEESFLVEEDKKHERHPIFGNIVDEVAYHEKYPTIYHLRKKLVDSTDKADLRLIYLALAHMIKFRGHFLIEGDLNPDNSDVDKLFIQLVQTYNQLFEENPINASGVDAKAILSARLSKSRRLENLIAQLPGEKKNGLFGNLIALSLGLTPNFKSNFDLAEDAKLQLSKDTYDDDLDNLLAQIGDQYADLFLAAKNLSDAILLSDILRVNTEITKAPLSASMIKRYDEHHQDLTLLKALVRQQLPEKYKEIFFDQSKNGYAGYIDGGASQEEFYKFIKPILEKMDGTEELLVKLNREDLLRKQRTFDNGSIPHQIHLGELHAILRRQEDFYPFLKDNREKIEKILTFRIPYYVGPLARGNSRFAWMTRKSEETITPWNFEEVVDKGASAQSFIERMTNFDKNLPNEKVLPKHSLLYEYFTVYNELTKVKYVTEGMRKPAFLSGEQKKAIVDLLFKTNRKVTVKQLKEDYFKKIECFDSVEISGVEDRFNASLGTYHDLLKIIKDKDFLDNEENEDILEDIVLTLTLFEDREMIEERLKTYAHLFDDKVMKQLKRRRYTGWGRLSRKLINGIRDKQSGKTILDFLKSDGFANRNFMQLIHDDSLTFKEDIQKAQVSGQGDSLHEHIANLAGSPAIKKGILQTVKVVDELVKVMGRHKPENIVIEMARENQTTQKGQKNSRERMKRIEEGIKELGSQILKEHPVENTQLQNEKLYLYYLQNGRDMYVDQELDINRLSDYDVDHIVPQSFLKDDSIDNKVLTRSDKARGKSDNVPSEEVVKKMKNYWRQLLNAKLITQRKFDNLTKAERGGLSELDKAGFIKRQLVETRQITKHVAQILDSRMNTKYDENDKLIREVKVITLKSKLVSDFRKDFQFYKVREINNYHHAHDAYLNAVVGTALIKKYPKLESEFVYGDYKVYDVRKMIAKSEQEIGKATAKYFFYSNIMNFFKTEITLANGEIRKRPLIETNGETGEIVWDKGRDFATVRKVLSMPQVNIVKKTEVQTGGFSKESILPKRNSDKLIARKKDWDPKKYGGFDSPTVAYSVLVVAKVEKGKSKKLKSVKELLGITIMERSSFEKNPIDFLEAKGYKEVKKDLIIKLPKYSLFELENGRKRMLASAGELQKGNELALPSKYVNFLYLASHYEKLKGSPEDNEQKQLFVEQHKHYLDEIIEQISEFSKRVILADANLDKVLSAYNKHRDKPIREQAENIIHLFTLTNLGAPAAFKYFDTTIDRKRYTSTKEVLDATLIHQSITGLYETRIDLSQLGGDGGGGGPAPGGSGGTVSLQDEHRLFDIPVTTSLPDVWLQDFPQAWAETGGLGRAKCQAPIIIDLKPTAVPVSIKQYPMSLEAHMGIRQHIIKFLELGVLRPCRSPWNTPLLPVKKPGTQDYRPVQDLREINKRTVDIHPTVPNPYNLLSTLKPDYSWYTVLDLKDAFFCLPLAPQSQELFAFEWKDPERGISGQLTWTRLPQGFKNSPTLFNEALHRDLTDFRTQHPEVTLLQYVDDLLLAAPTKKACTQGTRHLLQELGEKGYRASAKKAQICQTKVTYLGYILSEGKRWLTPGRIETVARIPPPRNPREVREFLGKAGFCRLFIPGFAELAAPLYALTKPSTPFTWQTEHQLAFEALKKALLSAPALGLPDTSKPFTLFLDERQGIAKGVLTQKLGPWKRPVAYLSKKLDPVAAGWPPCLRIMAATAMLVKDSAKLTLGQPLTVITPHTLEAIVRQPPDRWITNARLTHYQALLLDTDRVQFGPPVTLNPATLLPVPENQPSPHDCRQVLAETHGTREDLKDQELPDADHTWYTDGSSYLDSGTRRAGAAVVDGHNTIWAQSLPPGTSAQKAELIALTKALELSKGKKANIYTDSRYAFATAHTHGSIYERRGWLTSEGKEIKNKAEIIALLKALFLPQEVAIIHCPGHQKGQDPVAVGNRQADRVARQAAMAEVLTLATEPDNTSHITAGKRTADGSEFEKRTADGSEFESPKKKAKVE

SEQ ID NO: 2012 - protein, 2099 aa, synthetic construct
MPAAKRVKLDGGDKKYSIGLDIGTNSVGWAVITDEYKVPSKKFKVLGNTDRHSIKKNLIGALLFDSGETAEATRLKRTARRRYTRRKNRICYLQEIFSNEMAKVDDSFFHRLEESFLVEEDKKHERHPIFGNIVDEVAYHEKYPTIYHLRKKLVDSTDKADLRLIYLALAHMIKFRGHFLIEGDLNPDNSDVDKLFIQLVQTYNQLFEENPINASGVDAKAILSARLSKSRRLENLIAQLPGEKKNGLFGNLIALSLGLTPNFKSNFDLAEDAKLQLSKDTYDDDLDNLLAQIGDQYADLFLAAKNLSDAILLSDILRVNTEITKAPLSASMIKRYDEHHQDLTLLKALVRQQLPEKYKEIFFDQSKNGYAGYIDGGASQEEFYKFIKPILEKMDGTEELLVKLNREDLLRKQRTFDNGSIPHQIHLGELHAILRRQEDFYPFLKDNREKIEKILTFRIPYYVGPLARGNSRFAWMTRKSEETITPWNFEEVVDKGASAQSFIERMTNFDKNLPNEKVLPKHSLLYEYFTVYNELTKVKYVTEGMRKPAFLSGEQKKAIVDLLFKTNRKVTVKQLKEDYFKKIECFDSVEISGVEDRFNASLGTYHDLLKIIKDKDFLDNEENEDILEDIVLTLTLFEDREMIEERLKTYAHLFDDKVMKQLKRRRYTGWGRLSRKLINGIRDKQSGKTILDFLKSDGFANRNFMQLIHDDSLTFKEDIQKAQVSGQGDSLHEHIANLAGSPAIKKGILQTVKVVDELVKVMGRHKPENIVIEMARENQTTQKGQKNSRERMKRIEEGIKELGSQILKEHPVENTQLQNEKLYLYYLQNGRDMYVDQELDINRLSDYDVDHIVPQSFLKDDSIDNKVLTRSDKARGKSDNVPSEEVVKKMKNYWRQLLNAKLITQRKFDNLTKAERGGLSELDKAGFIKRQLVETRQITKHVAQILDSRMNTKYDENDKLIREVKVITLKSKLVSDFRKDFQFYKVREINNYHHAHDAYLNAVVGTALIKKYPKLESEFVYGDYKVYDVRKMIAKSEQEIGKATAKYFFYSNIMNFFKTEITLANGEIRKRPLIETNGETGEIVWDKGRDFATVRKVLSMPQVNIVKKTEVQTGGFSKESILPKRNSDKLIARKKDWDPKKYGGFDSPTVAYSVLVVAKVEKGKSKKLKSVKELLGITIMERSSFEKNPIDFLEAKGYKEVKKDLIIKLPKYSLFELENGRKRMLASAGELQKGNELALPSKYVNFLYLASHYEKLKGSPEDNEQKQLFVEQHKHYLDEIIEQISEFSKRVILADANLDKVLSAYNKHRDKPIREQAENIIHLFTLTNLGAPAAFKYFDTTIDRKRYTSTKEVLDATLIHQSITGLYETRIDLSQLGGDGGEAAAKGGSGGTVSLQDEHRLFDIPVTTSLPDVWLQDFPQAWAETGGLGRAKCQAPIIIDLKPTAVPVSIKQYPMSLEAHMGIRQHIIKFLELGVLRPCRSPWNTPLLPVKKPGTQDYRPVQDLREINKRTVDIHPTVPNPYNLLSTLKPDYSWYTVLDLKDAFFCLPLAPQSQELFAFEWKDPERGISGQLTWTRLPQGFKNSPTLFNEALHRDLTDFRTQHPEVTLLQYVDDLLLAAPTKKACTQGTRHLLQELGEKGYRASAKKAQICQTKVTYLGYILSEGKRWLTPGRIETVARIPPPRNPREVREFLGKAGFCRLFIPGFAELAAPLYALTKPSTPFTWQTEHQLAFEALKKALLSAPALGLPDTSKPFTLFLDERQGIAKGVLTQKLGPWKRPVAYLSKKLDPVAAGWPPCLRIMAATAMLVKDSAKLTLGQPLTVITPHTLEAIVRQPPDRWITNARLTHYQALLLDTDRVQFGPPVTLNPATLLPVPENQPSPHDCRQVLAETHGTREDLKDQELPDADHTWYTDGSSYLDSGTRRAGAAVVDGHNTIWAQSLPPGTSAQKAELIALTKALELSKGKKANIYTDSRYAFATAHTHGSIYERRGWLTSEGKEIKNKAEIIALLKALFLPQEVAIIHCPGHQKGQDPVAVGNRQADRVARQAAMAEVLTLATEPDNTSHITAGKRTADGSEFEKRTADGSEFESPKKKAKVE

SEQ ID NO: 2013 - protein, 2100 aa, synthetic construct
MPAAKRVKLDGGDKKYSIGLDIGTNSVGWAVITDEYKVPSKKFKVLGNTDRHSIKKNLIGALLFDSGETAEATRLKRTARRRYTRRKNRICYLQEIFSNEMAKVDDSFFHRLEESFLVEEDKKHERHPIFGNIVDEVAYHEKYPTIYHLRKKLVDSTDKADLRLIYLALAHMIKFRGHFLIEGDLNPDNSDVDKLFIQLVQTYNQLFEENPINASGVDAKAILSARLSKSRRLENLIAQLPGEKKNGLFGNLIALSLGLTPNFKSNFDLAEDAKLQLSKDTYDDDLDNLLAQIGDQYADLFLAAKNLSDAILLSDILRVNTEITKAPLSASMIKRYDEHHQDLTLLKALVRQQLPEKYKEIFFDQSKNGYAGYIDGGASQEEFYKFIKPILEKMDGTEELLVKLNREDLLRKQRTFDNGSIPHQIHLGELHAILRRQEDFYPFLKDNREKIEKILTFRIPYYVGPLARGNSRFAWMTRKSEETITPWNFEEVVDKGASAQSFIERMTNFDKNLPNEKVLPKHSLLYEYFTVYNELTKVKYVTEGMRKPAFLSGEQKKAIVDLLFKTNRKVTVKQLKEDYFKKIECFDSVEISGVEDRFNASLGTYHDLLKIIKDKDFLDNEENEDILEDIVLTLTLFEDREMIEERLKTYAHLFDDKVMKQLKRRRYTGWGRLSRKLINGIRDKQSGKTILDFLKSDGFANRNFMQLIHDDSLTFKEDIQKAQVSGQGDSLHEHIANLAGSPAIKKGILQTVKVVDELVKVMGRHKPENIVIEMARENQTTQKGQKNSRERMKRIEEGIKELGSQILKEHPVENTQLQNEKLYLYYLQNGRDMYVDQELDINRLSDYDVDHIVPQSFLKDDSIDNKVLTRSDKARGKSDNVPSEEVVKKMKNYWRQLLNAKLITQRKFDNLTKAERGGLSELDKAGFIKRQLVETRQITKHVAQILDSRMNTKYDENDKLIREVKVITLKSKLVSDFRKDFQFYKVREINNYHHAHDAYLNAVVGTALIKKYPKLESEFVYGDYKVYDVRKMIAKSEQEIGKATAKYFFYSNIMNFFKTEITLANGEIRKRPLIETNGETGEIVWDKGRDFATVRKVLSMPQVNIVKKTEVQTGGFSKESILPKRNSDKLIARKKDWDPKKYGGFDSPTVAYSVLVVAKVEKGKSKKLKSVKELLGITIMERSSFEKNPIDFLEAKGYKEVKKDLIIKLPKYSLFELENGRKRMLASAGELQKGNELALPSKYVNFLYLASHYEKLKGSPEDNEQKQLFVEQHKHYLDEIIEQISEFSKRVILADANLDKVLSAYNKHRDKPIREQAENIIHLFTLTNLGAPAAFKYFDTTIDRKRYTSTKEVLDATLIHQSITGLYETRIDLSQLGGDGGPAPGGGGSSGGTVSLQDEHRLFDIPVTTSLPDVWLQDFPQAWAETGGLGRAKCQAPIIIDLKPTAVPVSIKQYPMSLEAHMGIRQHIIKFLELGVLRPCRSPWNTPLLPVKKPGTQDYRPVQDLREINKRTVDIHPTVPNPYNLLSTLKPDYSWYTVLDLKDAFFCLPLAPQSQELFAFEWKDPERGISGQLTWTRLPQGFKNSPTLFNEALHRDLTDFRTQHPEVTLLQYVDDLLLAAPTKKACTQGTRHLLQELGEKGYRASAKKAQICQTKVTYLGYILSEGKRWLTPGRIETVARIPPPRNPREVREFLGKAGFCRLFIPGFAELAAPLYALTKPSTPFTWQTEHQLAFEALKKALLSAPALGLPDTSKPFTLFLDERQGIAKGVLTQKLGPWKRPVAYLSKKLDPVAAGWPPCLRIMAATAMLVKDSAKLTLGQPLTVITPHTLEAIVRQPPDRWITNARLTHYQALLLDTDRVQFGPPVTLNPATLLPVPENQPSPHDCRQVLAETHGTREDLKDQELPDADHTWYTDGSSYLDSGTRRAGAAVVDGHNTIWAQSLPPGTSAQKAELIALTKALELSKGKKANIYTDSRYAFATAHTHGSIYERRGWLTSEGKEIKNKAEIIALLKALFLPQEVAIIHCPGHQKGQDPVAVGNRQADRVARQAAMAEVLTLATEPDNTSHITAGKRTADGSEFEKRTADGSEFESPKKKAKVE

SEQ ID NO: 2014 - protein, 2102 aa, synthetic construct
MPAAKRVKLDGGDKKYSIGLDIGTNSVGWAVITDEYKVPSKKFKVLGNTDRHSIKKNLIGALLFDSGETAEATRLKRTARRRYTRRKNRICYLQEIFSNEMAKVDDSFFHRLEESFLVEEDKKHERHPIFGNIVDEVAYHEKYPTIYHLRKKLVDSTDKADLRLIYLALAHMIKFRGHFLIEGDLNPDNSDVDKLFIQLVQTYNQLFEENPINASGVDAKAILSARLSKSRRLENLIAQLPGEKKNGLFGNLIALSLGLTPNFKSNFDLAEDAKLQLSKDTYDDDLDNLLAQIGDQYADLFLAAKNLSDAILLSDILRVNTEITKAPLSASMIKRYDEHHQDLTLLKALVRQQLPEKYKEIFFDQSKNGYAGYIDGGASQEEFYKFIKPILEKMDGTEELLVKLNREDLLRKQRTFDNGSIPHQIHLGELHAILRRQEDFYPFLKDNREKIEKILTFRIPYYVGPLARGNSRFAWMTRKSEETITPWNFEEVVDKGASAQSFIERMTNFDKNLPNEKVLPKHSLLYEYFTVYNELTKVKYVTEGMRKPAFLSGEQKKAIVDLLFKTNRKVTVKQLKEDYFKKIECFDSVEISGVEDRFNASLGTYHDLLKIIKDKDFLDNEENEDILEDIVLTLTLFEDREMIEERLKTYAHLFDDKVMKQLKRRRYTGWGRLSRKLINGIRDKQSGKTILDFLKSDGFANRNFMQLIHDDSLTFKEDIQKAQVSGQGDSLHEHIANLAGSPAIKKGILQTVKVVDELVKVMGRHKPENIVIEMARENQTTQKGQKNSRERMKRIEEGIKELGSQILKEHPVENTQLQNEKLYLYYLQNGRDMYVDQELDINRLSDYDVDHIVPQSFLKDDSIDNKVLTRSDKARGKSDNVPSEEVVKKMKNYWRQLLNAKLITQRKFDNLTKAERGGLSELDKAGFIKRQLVETRQITKHVAQILDSRMNTKYDENDKLIREVKVITLKSKLVSDFRKDFQFYKVREINNYHHAHDAYLNAVVGTALIKKYPKLESEFVYGDYKVYDVRKMIAKSEQEIGKATAKYFFYSNIMNFFKTEITLANGEIRKRPLIETNGETGEIVWDKGRDFATVRKVLSMPQVNIVKKTEVQTGGFSKESILPKRNSDKLIARKKDWDPKKYGGFDSPTVAYSVLVVAKVEKGKSKKLKSVKELLGITIMERSSFEKNPIDFLEAKGYKEVKKDLIIKLPKYSLFELENGRKRMLASAGELQKGNELALPSKYVNFLYLASHYEKLKGSPEDNEQKQLFVEQHKHYLDEIIEQISEFSKRVILADANLDKVLSAYNKHRDKPIREQAENIIHLFTLTNLGAPAAFKYFDTTIDRKRYTSTKEVLDATLIHQSITGLYETRIDLSQLGGDGGEAAAKGSSGGGGGTVSLQDEHRLFDIPVTTSLPDVWLQDFPQAWAETGGLGRAKCQAPIIIDLKPTAVPVSIKQYPMSLEAHMGIRQHIIKFLELGVLRPCRSPWNTPLLPVKKPGTQDYRPVQDLREINKRTVDIHPTVPNPYNLLSTLKPDYSWYTVLDLKDAFFCLPLAPQSQELFAFEWKDPERGISGQLTWTRLPQGFKNSPTLFNEALHRDLTDFRTQHPEVTLLQYVDDLLLAAPTKKACTQGTRHLLQELGEKGYRASAKKAQICQTKVTYLGYILSEGKRWLTPGRIETVARIPPPRNPREVREFLGKAGFCRLFIPGFAELAAPLYALTKPSTPFTWQTEHQLAFEALKKALLSAPALGLPDTSKPFTLFLDERQGIAKGVLTQKLGPWKRPVAYLSKKLDPVAAGWPPCLRIMAATAMLVKDSAKLTLGQPLTVITPHTLEAIVRQPPDRWITNARLTHYQALLLDTDRVQFGPPVTLNPATLLPVPENQPSPHDCRQVLAETHGTREDLKDQELPDADHTWYTDGSSYLDSGTRRAGAAVVDGHNTIWAQSLPPGTSAQKAELIALTKALELSKGKKANIYTDSRYAFATAHTHGSIYERRGWLTSEGKEIKNKAEIIALLKALFLPQEVAIIHCPGHQKGQDPVAVGNRQADRVARQAAMAEVLTLATEPDNTSHITAGKRTADGSEFEKRTADGSEFESPKKKAKVE

SEQ ID NO: 2015 - protein, 2100 aa, synthetic construct
MPAAKRVKLDGGDKKYSIGLDIGTNSVGWAVITDEYKVPSKKFKVLGNTDRHSIKKNLIGALLFDSGETAEATRLKRTARRRYTRRKNRICYLQEIFSNEMAKVDDSFFHRLEESFLVEEDKKHERHPIFGNIVDEVAYHEKYPTIYHLRKKLVDSTDKADLRLIYLALAHMIKFRGHFLIEGDLNPDNSDVDKLFIQLVQTYNQLFEENPINASGVDAKAILSARLSKSRRLENLIAQLPGEKKNGLFGNLIALSLGLTPNFKSNFDLAEDAKLQLSKDTYDDDLDNLLAQIGDQYADLFLAAKNLSDAILLSDILRVNTEITKAPLSASMIKRYDEHHQDLTLLKALVRQQLPEKYKEIFFDQSKNGYAGYIDGGASQEEFYKFIKPILEKMDGTEELLVKLNREDLLRKQRTFDNGSIPHQIHLGELHAILRRQEDFYPFLKDNREKIEKILTFRIPYYVGPLARGNSRFAWMTRKSEETITPWNFEEVVDKGASAQSFIERMTNFDKNLPNEKVLPKHSLLYEYFTVYNELTKVKYVTEGMRKPAFLSGEQKKAIVDLLFKTNRKVTVKQLKEDYFKKIECFDSVEISGVEDRFNASLGTYHDLLKIIKDKDFLDNEENEDILEDIVLTLTLFEDREMIEERLKTYAHLFDDKVMKQLKRRRYTGWGRLSRKLINGIRDKQSGKTILDFLKSDGFANRNFMQLIHDDSLTFKEDIQKAQVSGQGDSLHEHIANLAGSPAIKKGILQTVKVVDELVKVMGRHKPENIVIEMARENQTTQKGQKNSRERMKRIEEGIKELGSQILKEHPVENTQLQNEKLYLYYLQNGRDMYVDQELDINRLSDYDVDHIVPQSFLKDDSIDNKVLTRSDKARGKSDNVPSEEVVKKMKNYWRQLLNAKLITQRKFDNLTKAERGGLSELDKAGFIKRQLVETRQITKHVAQILDSRMNTKYDENDKLIREVKVITLKSKLVSDFRKDFQFYKVREINNYHHAHDAYLNAVVGTALIKKYPKLESEFVYGDYKVYDVRKMIAKSEQEIGKATAKYFFYSNIMNFFKTEITLANGEIRKRPLIETNGETGEIVWDKGRDFATVRKVLSMPQVNIVKKTEVQTGGFSKESILPKRNSDKLIARKKDWDPKKYGGFDSPTVAYSVLVVAKVEKGKSKKLKSVKELLGITIMERSSFEKNPIDFLEAKGYKEVKKDLIIKLPKYSLFELENGRKRMLASAGELQKGNELALPSKYVNFLYLASHYEKLKGSPEDNEQKQLFVEQHKHYLDEIIEQISEFSKRVILADANLDKVLSAYNKHRDKPIREQAENIIHLFTLTNLGAPAAFKYFDTTIDRKRYTSTKEVLDATLIHQSITGLYETRIDLSQLGGDGGPAPGGGGGSGGTVSLQDEHRLFDIPVTTSLPDVWLQDFPQAWAETGGLGRAKCQAPIIIDLKPTAVPVSIKQYPMSLEAHMGIRQHIIKFLELGVLRPCRSPWNTPLLPVKKPGTQDYRPVQDLREINKRTVDIHPTVPNPYNLLSTLKPDYSWYTVLDLKDAFFCLPLAPQSQELFAFEWKDPERGISGQLTWTRLPQGFKNSPTLFNEALHRDLTDFRTQHPEVTLLQYVDDLLLAAPTKKACTQGTRHLLQELGEKGYRASAKKAQICQTKVTYLGYILSEGKRWLTPGRIETVARIPPPRNPREVREFLGKAGFCRLFIPGFAELAAPLYALTKPSTPFTWQTEHQLAFEALKKALLSAPALGLPDTSKPFTLFLDERQGIAKGVLTQKLGPWKRPVAYLSKKLDPVAAGWPPCLRIMAATAMLVKDSAKLTLGQPLTVITPHTLEAIVRQPPDRWITNARLTHYQALLLDTDRVQFGPPVTLNPATLLPVPENQPSPHDCRQVLAETHGTREDLKDQELPDADHTWYTDGSSYLDSGTRRAGAAVVDGHNTIWAQSLPPGTSAQKAELIALTKALELSKGKKANIYTDSRYAFATAHTHGSIYERRGWLTSEGKEIKNKAEIIALLKALFLPQEVAIIHCPGHQKGQDPVAVGNRQADRVARQAAMAEVLTLATEPDNTSHITAGKRTADGSEFEKRTADGSEFESPKKKAKVE

SEQ ID NO: 2016 - protein, 2095 aa, synthetic construct
MPAAKRVKLDGGDKKYSIGLDIGTNSVGWAVITDEYKVPSKKFKVLGNTDRHSIKKNLIGALLFDSGETAEATRLKRTARRRYTRRKNRICYLQEIFSNEMAKVDDSFFHRLEESFLVEEDKKHERHPIFGNIVDEVAYHEKYPTIYHLRKKLVDSTDKADLRLIYLALAHMIKFRGHFLIEGDLNPDNSDVDKLFIQLVQTYNQLFEENPINASGVDAKAILSARLSKSRRLENLIAQLPGEKKNGLFGNLIALSLGLTPNFKSNFDLAEDAKLQLSKDTYDDDLDNLLAQIGDQYADLFLAAKNLSDAILLSDILRVNTEITKAPLSASMIKRYDEHHQDLTLLKALVRQQLPEKYKEIFFDQSKNGYAGYIDGGASQEEFYKFIKPILEKMDGTEELLVKLNREDLLRKQRTFDNGSIPHQIHLGELHAILRRQEDFYPFLKDNREKIEKILTFRIPYYVGPLARGNSRFAWMTRKSEETITPWNFEEVVDKGASAQSFIERMTNFDKNLPNEKVLPKHSLLYEYFTVYNELTKVKYVTEGMRKPAFLSGEQKKAIVDLLFKTNRKVTVKQLKEDYFKKIECFDSVEISGVEDRFNASLGTYHDLLKIIKDKDFLDNEENEDILEDIVLTLTLFEDREMIEERLKTYAHLFDDKVMKQLKRRRYTGWGRLSRKLINGIRDKQSGKTILDFLKSDGFANRNFMQLIHDDSLTFKEDIQKAQVSGQGDSLHEHIANLAGSPAIKKGILQTVKVVDELVKVMGRHKPENIVIEMARENQTTQKGQKNSRERMKRIEEGIKELGSQILKEHPVENTQLQNEKLYLYYLQNGRDMYVDQELDINRLSDYDVDHIVPQSFLKDDSIDNKVLTRSDKARGKSDNVPSEEVVKKMKNYWRQLLNAKLITQRKFDNLTKAERGGLSELDKAGFIKRQLVETRQITKHVAQILDSRMNTKYDENDKLIREVKVITLKSKLVSDFRKDFQFYKVREINNYHHAHDAYLNAVVGTALIKKYPKLESEFVYGDYKVYDVRKMIAKSEQEIGKATAKYFFYSNIMNFFKTEITLANGEIRKRPLIETNGETGEIVWDKGRDFATVRKVLSMPQVNIVKKTEVQTGGFSKESILPKRNSDKLIARKKDWDPKKYGGFDSPTVAYSVLVVAKVEKGKSKKLKSVKELLGITIMERSSFEKNPIDFLEAKGYKEVKKDLIIKLPKYSLFELENGRKRMLASAGELQKGNELALPSKYVNFLYLASHYEKLKGSPEDNEQKQLFVEQHKHYLDEIIEQISEFSKRVILADANLDKVLSAYNKHRDKPIREQAENIIHLFTLTNLGAPAAFKYFDTTIDRKRYTSTKEVLDATLIHQSITGLYETRIDLSQLGGDGGGGGGGGTVSLQDEHRLFDIPVTTSLPDVWLQDFPQAWAETGGLGRAKCQAPIIIDLKPTAVPVSIKQYPMSLEAHMGIRQHIIKFLELGVLRPCRSPWNTPLLPVKKPGTQDYRPVQDLREINKRTVDIHPTVPNPYNLLSTLKPDYSWYTVLDLKDAFFCLPLAPQSQELFAFEWKDPERGISGQLTWTRLPQGFKNSPTLFNEALHRDLTDFRTQHPEVTLLQYVDDLLLAAPTKKACTQGTRHLLQELGEKGYRASAKKAQICQTKVTYLGYILSEGKRWLTPGRIETVARIPPPRNPREVREFLGKAGFCRLFIPGFAELAAPLYALTKPSTPFTWQTEHQLAFEALKKALLSAPALGLPDTSKPFTLFLDERQGIAKGVLTQKLGPWKRPVAYLSKKLDPVAAGWPPCLRIMAATAMLVKDSAKLTLGQPLTVITPHTLEAIVRQPPDRWITNARLTHYQALLLDTDRVQFGPPVTLNPATLLPVPENQPSPHDCRQVLAETHGTREDLKDQELPDADHTWYTDGSSYLDSGTRRAGAAVVDGHNTIWAQSLPPGTSAQKAELIALTKALELSKGKKANIYTDSRYAFATAHTHGSIYERRGWLTSEGKEIKNKAEIIALLKALFLPQEVAIIHCPGHQKGQDPVAVGNRQADRVARQAAMAEVLTLATEPDNTSHITAGKRTADGSEFEKRTADGSEFESPKKKAKVE

SEQ ID NO: 2017 - protein, 2102 aa, synthetic construct
MPAAKRVKLDGGDKKYSIGLDIGTNSVGWAVITDEYKVPSKKFKVLGNTDRHSIKKNLIGALLFDSGETAEATRLKRTARRRYTRRKNRICYLQEIFSNEMAKVDDSFFHRLEESFLVEEDKKHERHPIFGNIVDEVAYHEKYPTIYHLRKKLVDSTDKADLRLIYLALAHMIKFRGHFLIEGDLNPDNSDVDKLFIQLVQTYNQLFEENPINASGVDAKAILSARLSKSRRLENLIAQLPGEKKNGLFGNLIALSLGLTPNFKSNFDLAEDAKLQLSKDTYDDDLDNLLAQIGDQYADLFLAAKNLSDAILLSDILRVNTEITKAPLSASMIKRYDEHHQDLTLLKALVRQQLPEKYKEIFFDQSKNGYAGYIDGGASQEEFYKFIKPILEKMDGTEELLVKLNREDLLRKQRTFDNGSIPHQIHLGELHAILRRQEDFYPFLKDNREKIEKILTFRIPYYVGPLARGNSRFAWMTRKSEETITPWNFEEVVDKGASAQSFIERMTNFDKNLPNEKVLPKHSLLYEYFTVYNELTKVKYVTEGMRKPAFLSGEQKKAIVDLLFKTNRKVTVKQLKEDYFKKIECFDSVEISGVEDRFNASLGTYHDLLKIIKDKDFLDNEENEDILEDIVLTLTLFEDREMIEERLKTYAHLFDDKVMKQLKRRRYTGWGRLSRKLINGIRDKQSGKTILDFLKSDGFANRNFMQLIHDDSLTFKEDIQKAQVSGQGDSLHEHIANLAGSPAIKKGILQTVKVVDELVKVMGRHKPENIVIEMARENQTTQKGQKNSRERMKRIEEGIKELGSQILKEHPVENTQLQNEKLYLYYLQNGRDMYVDQELDINRLSDYDVDHIVPQSFLKDDSIDNKVLTRSDKARGKSDNVPSEEVVKKMKNYWRQLLNAKLITQRKFDNLTKAERGGLSELDKAGFIKRQLVETRQITKHVAQILDSRMNTKYDENDKLIREVKVITLKSKLVSDFRKDFQFYKVREINNYHHAHDAYLNAVVGTALIKKYPKLESEFVYGDYKVYDVRKMIAKSEQEIGKATAKYFFYSNIMNFFKTEITLANGEIRKRPLIETNGETGEIVWDKGRDFATVRKVLSMPQVNIVKKTEVQTGGFSKESILPKRNSDKLIARKKDWDPKKYGGFDSPTVAYSVLVVAKVEKGKSKKLKSVKELLGITIMERSSFEKNPIDFLEAKGYKEVKKDLIIKLPKYSLFELENGRKRMLASAGELQKGNELALPSKYVNFLYLASHYEKLKGSPEDNEQKQLFVEQHKHYLDEIIEQISEFSKRVILADANLDKVLSAYNKHRDKPIREQAENIIHLFTLTNLGAPAAFKYFDTTIDRKRYTSTKEVLDATLIHQSITGLYETRIDLSQLGGDGGGGGEAAAKGSSGGTVSLQDEHRLFDIPVTTSLPDVWLQDFPQAWAETGGLGRAKCQAPIIIDLKPTAVPVSIKQYPMSLEAHMGIRQHIIKFLELGVLRPCRSPWNTPLLPVKKPGTQDYRPVQDLREINKRTVDIHPTVPNPYNLLSTLKPDYSWYTVLDLKDAFFCLPLAPQSQELFAFEWKDPERGISGQLTWTRLPQGFKNSPTLFNEALHRDLTDFRTQHPEVTLLQYVDDLLLAAPTKKACTQGTRHLLQELGEKGYRASAKKAQICQTKVTYLGYILSEGKRWLTPGRIETVARIPPPRNPREVREFLGKAGFCRLFIPGFAELAAPLYALTKPSTPFTWQTEHQLAFEALKKALLSAPALGLPDTSKPFTLFLDERQGIAKGVLTQKLGPWKRPVAYLSKKLDPVAAGWPPCLRIMAATAMLVKDSAKLTLGQPLTVITPHTLEAIVRQPPDRWITNARLTHYQALLLDTDRVQFGPPVTLNPATLLPVPENQPSPHDCRQVLAETHGTREDLKDQELPDADHTWYTDGSSYLDSGTRRAGAAVVDGHNTIWAQSLPPGTSAQKAELIALTKALELSKGKKANIYTDSRYAFATAHTHGSIYERRGWLTSEGKEIKNKAEIIALLKALFLPQEVAIIHCPGHQKGQDPVAVGNRQADRVARQAAMAEVLTLATEPDNTSHITAGKRTADGSEFEKRTADGSEFESPKKKAKVE

SEQ ID NO: 2018 - protein, 2104 aa, synthetic construct
MPAAKRVKLDGGDKKYSIGLDIGTNSVGWAVITDEYKVPSKKFKVLGNTDRHSIKKNLIGALLFDSGETAEATRLKRTARRRYTRRKNRICYLQEIFSNEMAKVDDSFFHRLEESFLVEEDKKHERHPIFGNIVDEVAYHEKYPTIYHLRKKLVDSTDKADLRLIYLALAHMIKFRGHFLIEGDLNPDNSDVDKLFIQLVQTYNQLFEENPINASGVDAKAILSARLSKSRRLENLIAQLPGEKKNGLFGNLIALSLGLTPNFKSNFDLAEDAKLQLSKDTYDDDLDNLLAQIGDQYADLFLAAKNLSDAILLSDILRVNTEITKAPLSASMIKRYDEHHQDLTLLKALVRQQLPEKYKEIFFDQSKNGYAGYIDGGASQEEFYKFIKPILEKMDGTEELLVKLNREDLLRKQRTFDNGSIPHQIHLGELHAILRRQEDFYPFLKDNREKIEKILTFRIPYYVGPLARGNSRFAWMTRKSEETITPWNFEEVVDKGASAQSFIERMTNFDKNLPNEKVLPKHSLLYEYFTVYNELTKVKYVTEGMRKPAFLSGEQKKAIVDLLFKTNRKVTVKQLKEDYFKKIECFDSVEISGVEDRFNASLGTYHDLLKIIKDKDFLDNEENEDILEDIVLTLTLFEDREMIEERLKTYAHLFDDKVMKQLKRRRYTGWGRLSRKLINGIRDKQSGKTILDFLKSDGFANRNFMQLIHDDSLTFKEDIQKAQVSGQGDSLHEHIANLAGSPAIKKGILQTVKVVDELVKVMGRHKPENIVIEMARENQTTQKGQKNSRERMKRIEEGIKELGSQILKEHPVENTQLQNEKLYLYYLQNGRDMYVDQELDINRLSDYDVDHIVPQSFLKDDSIDNKVLTRSDKARGKSDNVPSEEVVKKMKNYWRQLLNAKLITQRKFDNLTKAERGGLSELDKAGFIKRQLVETRQITKHVAQILDSRMNTKYDENDKLIREVKVITLKSKLVSDFRKDFQFYKVREINNYHHAHDAYLNAVVGTALIKKYPKLESEFVYGDYKVYDVRKMIAKSEQEIGKATAKYFFYSNIMNFFKTEITLANGEIRKRPLIETNGETGEIVWDKGRDFATVRKVLSMPQVNIVKKTEVQTGGFSKESILPKRNSDKLIARKKDWDPKKYGGFDSPTVAYSVLVVAKVEKGKSKKLKSVKELLGITIMERSSFEKNPIDFLEAKGYKEVKKDLIIKLPKYSLFELENGRKRMLASAGELQKGNELALPSKYVNFLYLASHYEKLKGSPEDNEQKQLFVEQHKHYLDEIIEQISEFSKRVILADANLDKVLSAYNKHRDKPIREQAENIIHLFTLTNLGAPAAFKYFDTTIDRKRYTSTKEVLDATLIHQSITGLYETRIDLSQLGGDGGPAPAPAPAPAPAPGGTVSLQDEHRLFDIPVTTSLPDVWLQDFPQAWAETGGLGRAKCQAPIIIDLKPTAVPVSIKQYPMSLEAHMGIRQHIIKFLELGVLRPCRSPWNTPLLPVKKPGTQDYRPVQDLREINKRTVDIHPTVPNPYNLLSTLKPDYSWYTVLDLKDAFFCLPLAPQSQELFAFEWKDPERGISGQLTWTRLPQGFKNSPTLFNEALHRDLTDFRTQHPEVTLLQYVDDLLLAAPTKKACTQGTRHLLQELGEKGYRASAKKAQICQTKVTYLGYILSEGKRWLTPGRIETVARIPPPRNPREVREFLGKAGFCRLFIPGFAELAAPLYALTKPSTPFTWQTEHQLAFEALKKALLSAPALGLPDTSKPFTLFLDERQGIAKGVLTQKLGPWKRPVAYLSKKLDPVAAGWPPCLRIMAATAMLVKDSAKLTLGQPLTVITPHTLEAIVRQPPDRWITNARLTHYQALLLDTDRVQFGPPVTLNPATLLPVPENQPSPHDCRQVLAETHGTREDLKDQELPDADHTWYTDGSSYLDSGTRRAGAAVVDGHNTIWAQSLPPGTSAQKAELIALTKALELSKGKKANIYTDSRYAFATAHTHGSIYERRGWLTSEGKEIKNKAEIIALLKALFLPQEVAIIHCPGHQKGQDPVAVGNRQADRVARQAAMAEVLTLATEPDNTSHITAGKRTADGSEFEKRTADGSEFESPKKKAKVE

SEQ ID NO: 2019 - protein, 2100 aa, synthetic construct
MPAAKRVKLDGGDKKYSIGLDIGTNSVGWAVITDEYKVPSKKFKVLGNTDRHSIKKNLIGALLFDSGETAEATRLKRTARRRYTRRKNRICYLQEIFSNEMAKVDDSFFHRLEESFLVEEDKKHERHPIFGNIVDEVAYHEKYPTIYHLRKKLVDSTDKADLRLIYLALAHMIKFRGHFLIEGDLNPDNSDVDKLFIQLVQTYNQLFEENPINASGVDAKAILSARLSKSRRLENLIAQLPGEKKNGLFGNLIALSLGLTPNFKSNFDLAEDAKLQLSKDTYDDDLDNLLAQIGDQYADLFLAAKNLSDAILLSDILRVNTEITKAPLSASMIKRYDEHHQDLTLLKALVRQQLPEKYKEIFFDQSKNGYAGYIDGGASQEEFYKFIKPILEKMDGTEELLVKLNREDLLRKQRTFDNGSIPHQIHLGELHAILRRQEDFYPFLKDNREKIEKILTFRIPYYVGPLARGNSRFAWMTRKSEETITPWNFEEVVDKGASAQSFIERMTNFDKNLPNEKVLPKHSLLYEYFTVYNELTKVKYVTEGMRKPAFLSGEQKKAIVDLLFKTNRKVTVKQLKEDYFKKIECFDSVEISGVEDRFNASLGTYHDLLKIIKDKDFLDNEENEDILEDIVLTLTLFEDREMIEERLKTYAHLFDDKVMKQLKRRRYTGWGRLSRKLINGIRDKQSGKTILDFLKSDGFANRNFMQLIHDDSLTFKEDIQKAQVSGQGDSLHEHIANLAGSPAIKKGILQTVKVVDELVKVMGRHKPENIVIEMARENQTTQKGQKNSRERMKRIEEGIKELGSQILKEHPVENTQLQNEKLYLYYLQNGRDMYVDQELDINRLSDYDVDHIVPQSFLKDDSIDNKVLTRSDKARGKSDNVPSEEVVKKMKNYWRQLLNAKLITQRKFDNLTKAERGGLSELDKAGFIKRQLVETRQITKHVAQILDSRMNTKYDENDKLIREVKVITLKSKLVSDFRKDFQFYKVREINNYHHAHDAYLNAVVGTALIKKYPKLESEFVYGDYKVYDVRKMIAKSEQEIGKATAKYFFYSNIMNFFKTEITLANGEIRKRPLIETNGETGEIVWDKGRDFATVRKVLSMPQVNIVKKTEVQTGGFSKESILPKRNSDKLIARKKDWDPKKYGGFDSPTVAYSVLVVAKVEKGKSKKLKSVKELLGITIMERSSFEKNPIDFLEAKGYKEVKKDLIIKLPKYSLFELENGRKRMLASAGELQKGNELALPSKYVNFLYLASHYEKLKGSPEDNEQKQLFVEQHKHYLDEIIEQISEFSKRVILADANLDKVLSAYNKHRDKPIREQAENIIHLFTLTNLGAPAAFKYFDTTIDRKRYTSTKEVLDATLIHQSITGLYETRIDLSQLGGDGGPAPGSSGGGGGTVSLQDEHRLFDIPVTTSLPDVWLQDFPQAWAETGGLGRAKCQAPIIIDLKPTAVPVSIKQYPMSLEAHMGIRQHIIKFLELGVLRPCRSPWNTPLLPVKKPGTQDYRPVQDLREINKRTVDIHPTVPNPYNLLSTLKPDYSWYTVLDLKDAFFCLPLAPQSQELFAFEWKDPERGISGQLTWTRLPQGFKNSPTLFNEALHRDLTDFRTQHPEVTLLQYVDDLLLAAPTKKACTQGTRHLLQELGEKGYRASAKKAQICQTKVTYLGYILSEGKRWLTPGRIETVARIPPPRNPREVREFLGKAGFCRLFIPGFAELAAPLYALTKPSTPFTWQTEHQLAFEALKKALLSAPALGLPDTSKPFTLFLDERQGIAKGVLTQKLGPWKRPVAYLSKKLDPVAAGWPPCLRIMAATAMLVKDSAKLTLGQPLTVITPHTLEAIVRQPPDRWITNARLTHYQALLLDTDRVQFGPPVTLNPATLLPVPENQPSPHDCRQVLAETHGTREDLKDQELPDADHTWYTDGSSYLDSGTRRAGAAVVDGHNTIWAQSLPPGTSAQKAELIALTKALELSKGKKANIYTDSRYAFATAHTHGSIYERRGWLTSEGKEIKNKAEIIALLKALFLPQEVAIIHCPGHQKGQDPVAVGNRQADRVARQAAMAEVLTLATEPDNTSHITAGKRTADGSEFEKRTADGSEFESPKKKAKVE

SEQ ID NO: 2020 - protein, 2100 aa, synthetic construct
MPAAKRVKLDGGDKKYSIGLDIGTNSVGWAVITDEYKVPSKKFKVLGNTDRHSIKKNLIGALLFDSGETAEATRLKRTARRRYTRRKNRICYLQEIFSNEMAKVDDSFFHRLEESFLVEEDKKHERHPIFGNIVDEVAYHEKYPTIYHLRKKLVDSTDKADLRLIYLALAHMIKFRGHFLIEGDLNPDNSDVDKLFIQLVQTYNQLFEENPINASGVDAKAILSARLSKSRRLENLIAQLPGEKKNGLFGNLIALSLGLTPNFKSNFDLAEDAKLQLSKDTYDDDLDNLLAQIGDQYADLFLAAKNLSDAILLSDILRVNTEITKAPLSASMIKRYDEHHQDLTLLKALVRQQLPEKYKEIFFDQSKNGYAGYIDGGASQEEFYKFIKPILEKMDGTEELLVKLNREDLLRKQRTFDNGSIPHQIHLGELHAILRRQEDFYPFLKDNREKIEKILTFRIPYYVGPLARGNSRFAWMTRKSEETITPWNFEEVVDKGASAQSFIERMTNFDKNLPNEKVLPKHSLLYEYFTVYNELTKVKYVTEGMRKPAFLSGEQKKAIVDLLFKTNRKVTVKQLKEDYFKKIECFDSVEISGVEDRFNASLGTYHDLLKIIKDKDFLDNEENEDILEDIVLTLTLFEDREMIEERLKTYAHLFDDKVMKQLKRRRYTGWGRLSRKLINGIRDKQSGKTILDFLKSDGFANRNFMQLIHDDSLTFKEDIQKAQVSGQGDSLHEHIANLAGSPAIKKGILQTVKVVDELVKVMGRHKPENIVIEMARENQTTQKGQKNSRERMKRIEEGIKELGSQILKEHPVENTQLQNEKLYLYYLQNGRDMYVDQELDINRLSDYDVDHIVPQSFLKDDSIDNKVLTRSDKARGKSDNVPSEEVVKKMKNYWRQLLNAKLITQRKFDNLTKAERGGLSELDKAGFIKRQLVETRQITKHVAQILDSRMNTKYDENDKLIREVKVITLKSKLVSDFRKDFQFYKVREINNYHHAHDAYLNAVVGTALIKKYPKLESEFVYGDYKVYDVRKMIAKSEQEIGKATAKYFFYSNIMNFFKTEITLANGEIRKRPLIETNGETGEIVWDKGRDFATVRKVLSMPQVNIVKKTEVQTGGFSKESILPKRNSDKLIARKKDWDPKKYGGFDSPTVAYSVLVVAKVEKGKSKKLKSVKELLGITIMERSSFEKNPIDFLEAKGYKEVKKDLIIKLPKYSLFELENGRKRMLASAGELQKGNELALPSKYVNFLYLASHYEKLKGSPEDNEQKQLFVEQHKHYLDEIIEQISEFSKRVILADANLDKVLSAYNKHRDKPIREQAENIIHLFTLTNLGAPAAFKYFDTTIDRKRYTSTKEVLDATLIHQSITGLYETRIDLSQLGGDGGGSSGGSPAPGGTVSLQDEHRLFDIPVTTSLPDVWLQDFPQAWAETGGLGRAKCQAPIIIDLKPTAVPVSIKQYPMSLEAHMGIRQHIIKFLELGVLRPCRSPWNTPLLPVKKPGTQDYRPVQDLREINKRTVDIHPTVPNPYNLLSTLKPDYSWYTVLDLKDAFFCLPLAPQSQELFAFEWKDPERGISGQLTWTRLPQGFKNSPTLFNEALHRDLTDFRTQHPEVTLLQYVDDLLLAAPTKKACTQGTRHLLQELGEKGYRASAKKAQICQTKVTYLGYILSEGKRWLTPGRIETVARIPPPRNPREVREFLGKAGFCRLFIPGFAELAAPLYALTKPSTPFTWQTEHQLAFEALKKALLSAPALGLPDTSKPFTLFLDERQGIAKGVLTQKLGPWKRPVAYLSKKLDPVAAGWPPCLRIMAATAMLVKDSAKLTLGQPLTVITPHTLEAIVRQPPDRWITNARLTHYQALLLDTDRVQFGPPVTLNPATLLPVPENQPSPHDCRQVLAETHGTREDLKDQELPDADHTWYTDGSSYLDSGTRRAGAAVVDGHNTIWAQSLPPGTSAQKAELIALTKALELSKGKKANIYTDSRYAFATAHTHGSIYERRGWLTSEGKEIKNKAEIIALLKALFLPQEVAIIHCPGHQKGQDPVAVGNRQADRVARQAAMAEVLTLATEPDNTSHITAGKRTADGSEFEKRTADGSEFESPKKKAKVE

SEQ ID NO: 2021 - protein, 2097 aa, synthetic construct
MPAAKRVKLDGGDKKYSIGLDIGTNSVGWAVITDEYKVPSKKFKVLGNTDRHSIKKNLIGALLFDSGETAEATRLKRTARRRYTRRKNRICYLQEIFSNEMAKVDDSFFHRLEESFLVEEDKKHERHPIFGNIVDEVAYHEKYPTIYHLRKKLVDSTDKADLRLIYLALAHMIKFRGHFLIEGDLNPDNSDVDKLFIQLVQTYNQLFEENPINASGVDAKAILSARLSKSRRLENLIAQLPGEKKNGLFGNLIALSLGLTPNFKSNFDLAEDAKLQLSKDTYDDDLDNLLAQIGDQYADLFLAAKNLSDAILLSDILRVNTEITKAPLSASMIKRYDEHHQDLTLLKALVRQQLPEKYKEIFFDQSKNGYAGYIDGGASQEEFYKFIKPILEKMDGTEELLVKLNREDLLRKQRTFDNGSIPHQIHLGELHAILRRQEDFYPFLKDNREKIEKILTFRIPYYVGPLARGNSRFAWMTRKSEETITPWNFEEVVDKGASAQSFIERMTNFDKNLPNEKVLPKHSLLYEYFTVYNELTKVKYVTEGMRKPAFLSGEQKKAIVDLLFKTNRKVTVKQLKEDYFKKIECFDSVEISGVEDRFNASLGTYHDLLKIIKDKDFLDNEENEDILEDIVLTLTLFEDREMIEERLKTYAHLFDDKVMKQLKRRRYTGWGRLSRKLINGIRDKQSGKTILDFLKSDGFANRNFMQLIHDDSLTFKEDIQKAQVSGQGDSLHEHIANLAGSPAIKKGILQTVKVVDELVKVMGRHKPENIVIEMARENQTTQKGQKNSRERMKRIEEGIKELGSQILKEHPVENTQLQNEKLYLYYLQNGRDMYVDQELDINRLSDYDVDHIVPQSFLKDDSIDNKVLTRSDKARGKSDNVPSEEVVKKMKNYWRQLLNAKLITQRKFDNLTKAERGGLSELDKAGFIKRQLVETRQITKHVAQILDSRMNTKYDENDKLIREVKVITLKSKLVSDFRKDFQFYKVREINNYHHAHDAYLNAVVGTALIKKYPKLESEFVYGDYKVYDVRKMIAKSEQEIGKATAKYFFYSNIMNFFKTEITLANGEIRKRPLIETNGETGEIVWDKGRDFATVRKVLSMPQVNIVKKTEVQTGGFSKESILPKRNSDKLIARKKDWDPKKYGGFDSPTVAYSVLVVAKVEKGKSKKLKSVKELLGITIMERSSFEKNPIDFLEAKGYKEVKKDLIIKLPKYSLFELENGRKRMLASAGELQKGNELALPSKYVNFLYLASHYEKLKGSPEDNEQKQLFVEQHKHYLDEIIEQISEFSKRVILADANLDKVLSAYNKHRDKPIREQAENIIHLFTLTNLGAPAAFKYFDTTIDRKRYTSTKEVLDATLIHQSITGLYETRIDLSQLGGDGGGGSPAPGGTVSLQDEHRLFDIPVTTSLPDVWLQDFPQAWAETGGLGRAKCQAPIIIDLKPTAVPVSIKQYPMSLEAHMGIRQHIIKFLELGVLRPCRSPWNTPLLPVKKPGTQDYRPVQDLREINKRTVDIHPTVPNPYNLLSTLKPDYSWYTVLDLKDAFFCLPLAPQSQELFAFEWKDPERGISGQLTWTRLPQGFKNSPTLFNEALHRDLTDFRTQHPEVTLLQYVDDLLLAAPTKKACTQGTRHLLQELGEKGYRASAKKAQICQTKVTYLGYILSEGKRWLTPGRIETVARIPPPRNPREVREFLGKAGFCRLFIPGFAELAAPLYALTKPSTPFTWQTEHQLAFEALKKALLSAPALGLPDTSKPFTLFLDERQGIAKGVLTQKLGPWKRPVAYLSKKLDPVAAGWPPCLRIMAATAMLVKDSAKLTLGQPLTVITPHTLEAIVRQPPDRWITNARLTHYQALLLDTDRVQFGPPVTLNPATLLPVPENQPSPHDCRQVLAETHGTREDLKDQELPDADHTWYTDGSSYLDSGTRRAGAAVVDGHNTIWAQSLPPGTSAQKAELIALTKALELSKGKKANIYTDSRYAFATAHTHGSIYERRGWLTSEGKEIKNKAEIIALLKALFLPQEVAIIHCPGHQKGQDPVAVGNRQADRVARQAAMAEVLTLATEPDNTSHITAGKRTADGSEFEKRTADGSEFESPKKKAKVE

SEQ ID NO: 2022 - protein, 2102 aa, synthetic construct
MPAAKRVKLDGGDKKYSIGLDIGTNSVGWAVITDEYKVPSKKFKVLGNTDRHSIKKNLIGALLFDSGETAEATRLKRTARRRYTRRKNRICYLQEIFSNEMAKVDDSFFHRLEESFLVEEDKKHERHPIFGNIVDEVAYHEKYPTIYHLRKKLVDSTDKADLRLIYLALAHMIKFRGHFLIEGDLNPDNSDVDKLFIQLVQTYNQLFEENPINASGVDAKAILSARLSKSRRLENLIAQLPGEKKNGLFGNLIALSLGLTPNFKSNFDLAEDAKLQLSKDTYDDDLDNLLAQIGDQYADLFLAAKNLSDAILLSDILRVNTEITKAPLSASMIKRYDEHHQDLTLLKALVRQQLPEKYKEIFFDQSKNGYAGYIDGGASQEEFYKFIKPILEKMDGTEELLVKLNREDLLRKQRTFDNGSIPHQIHLGELHAILRRQEDFYPFLKDNREKIEKILTFRIPYYVGPLARGNSRFAWMTRKSEETITPWNFEEVVDKGASAQSFIERMTNFDKNLPNEKVLPKHSLLYEYFTVYNELTKVKYVTEGMRKPAFLSGEQKKAIVDLLFKTNRKVTVKQLKEDYFKKIECFDSVEISGVEDRFNASLGTYHDLLKIIKDKDFLDNEENEDILEDIVLTLTLFEDREMIEERLKTYAHLFDDKVMKQLKRRRYTGWGRLSRKLINGIRDKQSGKTILDFLKSDGFANRNFMQLIHDDSLTFKEDIQKAQVSGQGDSLHEHIANLAGSPAIKKGILQTVKVVDELVKVMGRHKPENIVIEMARENQTTQKGQKNSRERMKRIEEGIKELGSQILKEHPVENTQLQNEKLYLYYLQNGRDMYVDQELDINRLSDYDVDHIVPQSFLKDDSIDNKVLTRSDKARGKSDNVPSEEVVKKMKNYWRQLLNAKLITQRKFDNLTKAERGGLSELDKAGFIKRQLVETRQITKHVAQILDSRMNTKYDENDKLIREVKVITLKSKLVSDFRKDFQFYKVREINNYHHAHDAYLNAVVGTALIKKYPKLESEFVYGDYKVYDVRKMIAKSEQEIGKATAKYFFYSNIMNFFKTEITLANGEIRKRPLIETNGETGEIVWDKGRDFATVRKVLSMPQVNIVKKTEVQTGGFSKESILPKRNSDKLIARKKDWDPKKYGGFDSPTVAYSVLVVAKVEKGKSKKLKSVKELLGITIMERSSFEKNPIDFLEAKGYKEVKKDLIIKLPKYSLFELENGRKRMLASAGELQKGNELALPSKYVNFLYLASHYEKLKGSPEDNEQKQLFVEQHKHYLDEIIEQISEFSKRVILADANLDKVLSAYNKHRDKPIREQAENIIHLFTLTNLGAPAAFKYFDTTIDRKRYTSTKEVLDATLIHQSITGLYETRIDLSQLGGDGGEAAAKPAPGSSGGTVSLQDEHRLFDIPVTTSLPDVWLQDFPQAWAETGGLGRAKCQAPIIIDLKPTAVPVSIKQYPMSLEAHMGIRQHIIKFLELGVLRPCRSPWNTPLLPVKKPGTQDYRPVQDLREINKRTVDIHPTVPNPYNLLSTLKPDYSWYTVLDLKDAFFCLPLAPQSQELFAFEWKDPERGISGQLTWTRLPQGFKNSPTLFNEALHRDLTDFRTQHPEVTLLQYVDDLLLAAPTKKACTQGTRHLLQELGEKGYRASAKKAQICQTKVTYLGYILSEGKRWLTPGRIETVARIPPPRNPREVREFLGKAGFCRLFIPGFAELAAPLYALTKPSTPFTWQTEHQLAFEALKKALLSAPALGLPDTSKPFTLFLDERQGIAKGVLTQKLGPWKRPVAYLSKKLDPVAAGWPPCLRIMAATAMLVKDSAKLTLGQPLTVITPHTLEAIVRQPPDRWITNARLTHYQALLLDTDRVQFGPPVTLNPATLLPVPENQPSPHDCRQVLAETHGTREDLKDQELPDADHTWYTDGSSYLDSGTRRAGAAVVDGHNTIWAQSLPPGTSAQKAELIALTKALELSKGKKANIYTDSRYAFATAHTHGSIYERRGWLTSEGKEIKNKAEIIALLKALFLPQEVAIIHCPGHQKGQDPVAVGNRQADRVARQAAMAEVLTLATEPDNTSHITAGKRTADGSEFEKRTADGSEFESPKKKAKVE

SEQ ID NO: 2023 - protein, 2094 aa, synthetic construct
MPAAKRVKLDGGDKKYSIGLDIGTNSVGWAVITDEYKVPSKKFKVLGNTDRHSIKKNLIGALLFDSGETAEATRLKRTARRRYTRRKNRICYLQEIFSNEMAKVDDSFFHRLEESFLVEEDKKHERHPIFGNIVDEVAYHEKYPTIYHLRKKLVDSTDKADLRLIYLALAHMIKFRGHFLIEGDLNPDNSDVDKLFIQLVQTYNQLFEENPINASGVDAKAILSARLSKSRRLENLIAQLPGEKKNGLFGNLIALSLGLTPNFKSNFDLAEDAKLQLSKDTYDDDLDNLLAQIGDQYADLFLAAKNLSDAILLSDILRVNTEITKAPLSASMIKRYDEHHQDLTLLKALVRQQLPEKYKEIFFDQSKNGYAGYIDGGASQEEFYKFIKPILEKMDGTEELLVKLNREDLLRKQRTFDNGSIPHQIHLGELHAILRRQEDFYPFLKDNREKIEKILTFRIPYYVGPLARGNSRFAWMTRKSEETITPWNFEEVVDKGASAQSFIERMTNFDKNLPNEKVLPKHSLLYEYFTVYNELTKVKYVTEGMRKPAFLSGEQKKAIVDLLFKTNRKVTVKQLKEDYFKKIECFDSVEISGVEDRFNASLGTYHDLLKIIKDKDFLDNEENEDILEDIVLTLTLFEDREMIEERLKTYAHLFDDKVMKQLKRRRYTGWGRLSRKLINGIRDKQSGKTILDFLKSDGFANRNFMQLIHDDSLTFKEDIQKAQVSGQGDSLHEHIANLAGSPAIKKGILQTVKVVDELVKVMGRHKPENIVIEMARENQTTQKGQKNSRERMKRIEEGIKELGSQILKEHPVENTQLQNEKLYLYYLQNGRDMYVDQELDINRLSDYDVDHIVPQSFLKDDSIDNKVLTRSDKARGKSDNVPSEEVVKKMKNYWRQLLNAKLITQRKFDNLTKAERGGLSELDKAGFIKRQLVETRQITKHVAQILDSRMNTKYDENDKLIREVKVITLKSKLVSDFRKDFQFYKVREINNYHHAHDAYLNAVVGTALIKKYPKLESEFVYGDYKVYDVRKMIAKSEQEIGKATAKYFFYSNIMNFFKTEITLANGEIRKRPLIETNGETGEIVWDKGRDFATVRKVLSMPQVNIVKKTEVQTGGFSKESILPKRNSDKLIARKKDWDPKKYGGFDSPTVAYSVLVVAKVEKGKSKKLKSVKELLGITIMERSSFEKNPIDFLEAKGYKEVKKDLIIKLPKYSLFELENGRKRMLASAGELQKGNELALPSKYVNFLYLASHYEKLKGSPEDNEQKQLFVEQHKHYLDEIIEQISEFSKRVILADANLDKVLSAYNKHRDKPIREQAENIIHLFTLTNLGAPAAFKYFDTTIDRKRYTSTKEVLDATLIHQSITGLYETRIDLSQLGGDGGPAPGGTVSLQDEHRLFDIPVTTSLPDVWLQDFPQAWAETGGLGRAKCQAPIIIDLKPTAVPVSIKQYPMSLEAHMGIRQHIIKFLELGVLRPCRSPWNTPLLPVKKPGTQDYRPVQDLREINKRTVDIHPTVPNPYNLLSTLKPDYSWYTVLDLKDAFFCLPLAPQSQELFAFEWKDPERGISGQLTWTRLPQGFKNSPTLFNEALHRDLTDFRTQHPEVTLLQYVDDLLLAAPTKKACTQGTRHLLQELGEKGYRASAKKAQICQTKVTYLGYILSEGKRWLTPGRIETVARIPPPRNPREVREFLGKAGFCRLFIPGFAELAAPLYALTKPSTPFTWQTEHQLAFEALKKALLSAPALGLPDTSKPFTLFLDERQGIAKGVLTQKLGPWKRPVAYLSKKLDPVAAGWPPCLRIMAATAMLVKDSAKLTLGQPLTVITPHTLEAIVRQPPDRWITNARLTHYQALLLDTDRVQFGPPVTLNPATLLPVPENQPSPHDCRQVLAETHGTREDLKDQELPDADHTWYTDGSSYLDSGTRRAGAAVVDGHNTIWAQSLPPGTSAQKAELIALTKALELSKGKKANIYTDSRYAFATAHTHGSIYERRGWLTSEGKEIKNKAEIIALLKALFLPQEVAIIHCPGHQKGQDPVAVGNRQADRVARQAAMAEVLTLATEPDNTSHITAGKRTADGSEFEKRTADGSEFESPKKKAKVE

SEQ ID NO: 2024 - protein, 2097 aa, synthetic construct
MPAAKRVKLDGGDKKYSIGLDIGTNSVGWAVITDEYKVPSKKFKVLGNTDRHSIKKNLIGALLFDSGETAEATRLKRTARRRYTRRKNRICYLQEIFSNEMAKVDDSFFHRLEESFLVEEDKKHERHPIFGNIVDEVAYHEKYPTIYHLRKKLVDSTDKADLRLIYLALAHMIKFRGHFLIEGDLNPDNSDVDKLFIQLVQTYNQLFEENPINASGVDAKAILSARLSKSRRLENLIAQLPGEKKNGLFGNLIALSLGLTPNFKSNFDLAEDAKLQLSKDTYDDDLDNLLAQIGDQYADLFLAAKNLSDAILLSDILRVNTEITKAPLSASMIKRYDEHHQDLTLLKALVRQQLPEKYKEIFFDQSKNGYAGYIDGGASQEEFYKFIKPILEKMDGTEELLVKLNREDLLRKQRTFDNGSIPHQIHLGELHAILRRQEDFYPFLKDNREKIEKILTFRIPYYVGPLARGNSRFAWMTRKSEETITPWNFEEVVDKGASAQSFIERMTNFDKNLPNEKVLPKHSLLYEYFTVYNELTKVKYVTEGMRKPAFLSGEQKKAIVDLLFKTNRKVTVKQLKEDYFKKIECFDSVEISGVEDRFNASLGTYHDLLKIIKDKDFLDNEENEDILEDIVLTLTLFEDREMIEERLKTYAHLFDDKVMKQLKRRRYTGWGRLSRKLINGIRDKQSGKTILDFLKSDGFANRNFMQLIHDDSLTFKEDIQKAQVSGQGDSLHEHIANLAGSPAIKKGILQTVKVVDELVKVMGRHKPENIVIEMARENQTTQKGQKNSRERMKRIEEGIKELGSQILKEHPVENTQLQNEKLYLYYLQNGRDMYVDQELDINRLSDYDVDHIVPQSFLKDDSIDNKVLTRSDKARGKSDNVPSEEVVKKMKNYWRQLLNAKLITQRKFDNLTKAERGGLSELDKAGFIKRQLVETRQITKHVAQILDSRMNTKYDENDKLIREVKVITLKSKLVSDFRKDFQFYKVREINNYHHAHDAYLNAVVGTALIKKYPKLESEFVYGDYKVYDVRKMIAKSEQEIGKATAKYFFYSNIMNFFKTEITLANGEIRKRPLIETNGETGEIVWDKGRDFATVRKVLSMPQVNIVKKTEVQTGGFSKESILPKRNSDKLIARKKDWDPKKYGGFDSPTVAYSVLVVAKVEKGKSKKLKSVKELLGITIMERSSFEKNPIDFLEAKGYKEVKKDLIIKLPKYSLFELENGRKRMLASAGELQKGNELALPSKYVNFLYLASHYEKLKGSPEDNEQKQLFVEQHKHYLDEIIEQISEFSKRVILADANLDKVLSAYNKHRDKPIREQAENIIHLFTLTNLGAPAAFKYFDTTIDRKRYTSTKEVLDATLIHQSITGLYETRIDLSQLGGDGGGGSGGSGGTVSLQDEHRLFDIPVTTSLPDVWLQDFPQAWAETGGLGRAKCQAPIIIDLKPTAVPVSIKQYPMSLEAHMGIRQHIIKFLELGVLRPCRSPWNTPLLPVKKPGTQDYRPVQDLREINKRTVDIHPTVPNPYNLLSTLKPDYSWYTVLDLKDAFFCLPLAPQSQELFAFEWKDPERGISGQLTWTRLPQGFKNSPTLFNEALHRDLTDFRTQHPEVTLLQYVDDLLLAAPTKKACTQGTRHLLQELGEKGYRASAKKAQICQTKVTYLGYILSEGKRWLTPGRIETVARIPPPRNPREVREFLGKAGFCRLFIPGFAELAAPLYALTKPSTPFTWQTEHQLAFEALKKALLSAPALGLPDTSKPFTLFLDERQGIAKGVLTQKLGPWKRPVAYLSKKLDPVAAGWPPCLRIMAATAMLVKDSAKLTLGQPLTVITPHTLEAIVRQPPDRWITNARLTHYQALLLDTDRVQFGPPVTLNPATLLPVPENQPSPHDCRQVLAETHGTREDLKDQELPDADHTWYTDGSSYLDSGTRRAGAAVVDGHNTIWAQSLPPGTSAQKAELIALTKALELSKGKKANIYTDSRYAFATAHTHGSIYERRGWLTSEGKEIKNKAEIIALLKALFLPQEVAIIHCPGHQKGQDPVAVGNRQADRVARQAAMAEVLTLATEPDNTSHITAGKRTADGSEFEKRTADGSEFESPKKKAKVE

SEQ ID NO: 2025 - protein, 2102 aa, synthetic construct
MPAAKRVKLDGGDKKYSIGLDIGTNSVGWAVITDEYKVPSKKFKVLGNTDRHSIKKNLIGALLFDSGETAEATRLKRTARRRYTRRKNRICYLQEIFSNEMAKVDDSFFHRLEESFLVEEDKKHERHPIFGNIVDEVAYHEKYPTIYHLRKKLVDSTDKADLRLIYLALAHMIKFRGHFLIEGDLNPDNSDVDKLFIQLVQTYNQLFEENPINASGVDAKAILSARLSKSRRLENLIAQLPGEKKNGLFGNLIALSLGLTPNFKSNFDLAEDAKLQLSKDTYDDDLDNLLAQIGDQYADLFLAAKNLSDAILLSDILRVNTEITKAPLSASMIKRYDEHHQDLTLLKALVRQQLPEKYKEIFFDQSKNGYAGYIDGGASQEEFYKFIKPILEKMDGTEELLVKLNREDLLRKQRTFDNGSIPHQIHLGELHAILRRQEDFYPFLKDNREKIEKILTFRIPYYVGPLARGNSRFAWMTRKSEETITPWNFEEVVDKGASAQSFIERMTNFDKNLPNEKVLPKHSLLYEYFTVYNELTKVKYVTEGMRKPAFLSGEQKKAIVDLLFKTNRKVTVKQLKEDYFKKIECFDSVEISGVEDRFNASLGTYHDLLKIIKDKDFLDNEENEDILEDIVLTLTLFEDREMIEERLKTYAHLFDDKVMKQLKRRRYTGWGRLSRKLINGIRDKQSGKTILDFLKSDGFANRNFMQLIHDDSLTFKEDIQKAQVSGQGDSLHEHIANLAGSPAIKKGILQTVKVVDELVKVMGRHKPENIVIEMARENQTTQKGQKNSRERMKRIEEGIKELGSQILKEHPVENTQLQNEKLYLYYLQNGRDMYVDQELDINRLSDYDVDHIVPQSFLKDDSIDNKVLTRSDKARGKSDNVPSEEVVKKMKNYWRQLLNAKLITQRKFDNLTKAERGGLSELDKAGFIKRQLVETRQITKHVAQILDSRMNTKYDENDKLIREVKVITLKSKLVSDFRKDFQFYKVREINNYHHAHDAYLNAVVGTALIKKYPKLESEFVYGDYKVYDVRKMIAKSEQEIGKATAKYFFYSNIMNFFKTEITLANGEIRKRPLIETNGETGEIVWDKGRDFATVRKVLSMPQVNIVKKTEVQTGGFSKESILPKRNSDKLIARKKDWDPKKYGGFDSPTVAYSVLVVAKVEKGKSKKLKSVKELLGITIMERSSFEKNPIDFLEAKGYKEVKKDLIIKLPKYSLFELENGRKRMLASAGELQKGNELALPSKYVNFLYLASHYEKLKGSPEDNEQKQLFVEQHKHYLDEIIEQISEFSKRVILADANLDKVLSAYNKHRDKPIREQAENIIHLFTLTNLGAPAAFKYFDTTIDRKRYTSTKEVLDATLIHQSITGLYETRIDLSQLGGDGGGSSGGSEAAAKGGTVSLQDEHRLFDIPVTTSLPDVWLQDFPQAWAETGGLGRAKCQAPIIIDLKPTAVPVSIKQYPMSLEAHMGIRQHIIKFLELGVLRPCRSPWNTPLLPVKKPGTQDYRPVQDLREINKRTVDIHPTVPNPYNLLSTLKPDYSWYTVLDLKDAFFCLPLAPQSQELFAFEWKDPERGISGQLTWTRLPQGFKNSPTLFNEALHRDLTDFRTQHPEVTLLQYVDDLLLAAPTKKACTQGTRHLLQELGEKGYRASAKKAQICQTKVTYLGYILSEGKRWLTPGRIETVARIPPPRNPREVREFLGKAGFCRLFIPGFAELAAPLYALTKPSTPFTWQTEHQLAFEALKKALLSAPALGLPDTSKPFTLFLDERQGIAKGVLTQKLGPWKRPVAYLSKKLDPVAAGWPPCLRIMAATAMLVKDSAKLTLGQPLTVITPHTLEAIVRQPPDRWITNARLTHYQALLLDTDRVQFGPPVTLNPATLLPVPENQPSPHDCRQVLAETHGTREDLKDQELPDADHTWYTDGSSYLDSGTRRAGAAVVDGHNTIWAQSLPPGTSAQKAELIALTKALELSKGKKANIYTDSRYAFATAHTHGSIYERRGWLTSEGKEIKNKAEIIALLKALFLPQEVAIIHCPGHQKGQDPVAVGNRQADRVARQAAMAEVLTLATEPDNTSHITAGKRTADGSEFEKRTADGSEFESPKKKAKVE

SEQ ID NO: 2026 - protein, 2100 aa, synthetic construct
MPAAKRVKLDGGDKKYSIGLDIGTNSVGWAVITDEYKVPSKKFKVLGNTDRHSIKKNLIGALLFDSGETAEATRLKRTARRRYTRRKNRICYLQEIFSNEMAKVDDSFFHRLEESFLVEEDKKHERHPIFGNIVDEVAYHEKYPTIYHLRKKLVDSTDKADLRLIYLALAHMIKFRGHFLIEGDLNPDNSDVDKLFIQLVQTYNQLFEENPINASGVDAKAILSARLSKSRRLENLIAQLPGEKKNGLFGNLIALSLGLTPNFKSNFDLAEDAKLQLSKDTYDDDLDNLLAQIGDQYADLFLAAKNLSDAILLSDILRVNTEITKAPLSASMIKRYDEHHQDLTLLKALVRQQLPEKYKEIFFDQSKNGYAGYIDGGASQEEFYKFIKPILEKMDGTEELLVKLNREDLLRKQRTFDNGSIPHQIHLGELHAILRRQEDFYPFLKDNREKIEKILTFRIPYYVGPLARGNSRFAWMTRKSEETITPWNFEEVVDKGASAQSFIERMTNFDKNLPNEKVLPKHSLLYEYFTVYNELTKVKYVTEGMRKPAFLSGEQKKAIVDLLFKTNRKVTVKQLKEDYFKKIECFDSVEISGVEDRFNASLGTYHDLLKIIKDKDFLDNEENEDILEDIVLTLTLFEDREMIEERLKTYAHLFDDKVMKQLKRRRYTGWGRLSRKLINGIRDKQSGKTILDFLKSDGFANRNFMQLIHDDSLTFKEDIQKAQVSGQGDSLHEHIANLAGSPAIKKGILQTVKVVDELVKVMGRHKPENIVIEMARENQTTQKGQKNSRERMKRIEEGIKELGSQILKEHPVENTQLQNEKLYLYYLQNGRDMYVDQELDINRLSDYDVDHIVPQSFLKDDSIDNKVLTRSDKARGKSDNVPSEEVVKKMKNYWRQLLNAKLITQRKFDNLTKAERGGLSELDKAGFIKRQLVETRQITKHVAQILDSRMNTKYDENDKLIREVKVITLKSKLVSDFRKDFQFYKVREINNYHHAHDAYLNAVVGTALIKKYPKLESEFVYGDYKVYDVRKMIAKSEQEIGKATAKYFFYSNIMNFFKTEITLANGEIRKRPLIETNGETGEIVWDKGRDFATVRKVLSMPQVNIVKKTEVQTGGFSKESILPKRNSDKLIARKKDWDPKKYGGFDSPTVAYSVLVVAKVEKGKSKKLKSVKELLGITIMERSSFEKNPIDFLEAKGYKEVKKDLIIKLPKYSLFELENGRKRMLASAGELQKGNELALPSKYVNFLYLASHYEKLKGSPEDNEQKQLFVEQHKHYLDEIIEQISEFSKRVILADANLDKVLSAYNKHRDKPIREQAENIIHLFTLTNLGAPAAFKYFDTTIDRKRYTSTKEVLDATLIHQSITGLYETRIDLSQLGGDGGGGGGGSGSSGGTVSLQDEHRLFDIPVTTSLPDVWLQDFPQAWAETGGLGRAKCQAPIIIDLKPTAVPVSIKQYPMSLEAHMGIRQHIIKFLELGVLRPCRSPWNTPLLPVKKPGTQDYRPVQDLREINKRTVDIHPTVPNPYNLLSTLKPDYSWYTVLDLKDAFFCLPLAPQSQELFAFEWKDPERGISGQLTWTRLPQGFKNSPTLFNEALHRDLTDFRTQHPEVTLLQYVDDLLLAAPTKKACTQGTRHLLQELGEKGYRASAKKAQICQTKVTYLGYILSEGKRWLTPGRIETVARIPPPRNPREVREFLGKAGFCRLFIPGFAELAAPLYALTKPSTPFTWQTEHQLAFEALKKALLSAPALGLPDTSKPFTLFLDERQGIAKGVLTQKLGPWKRPVAYLSKKLDPVAAGWPPCLRIMAATAMLVKDSAKLTLGQPLTVITPHTLEAIVRQPPDRWITNARLTHYQALLLDTDRVQFGPPVTLNPATLLPVPENQPSPHDCRQVLAETHGTREDLKDQELPDADHTWYTDGSSYLDSGTRRAGAAVVDGHNTIWAQSLPPGTSAQKAELIALTKALELSKGKKANIYTDSRYAFATAHTHGSIYERRGWLTSEGKEIKNKAEIIALLKALFLPQEVAIIHCPGHQKGQDPVAVGNRQADRVARQAAMAEVLTLATEPDNTSHITAGKRTADGSEFEKRTADGSEFESPKKKAKVE

SEQ ID NO: 2027 - protein, 2102 aa, synthetic construct
MPAAKRVKLDGGDKKYSIGLDIGTNSVGWAVITDEYKVPSKKFKVLGNTDRHSIKKNLIGALLFDSGETAEATRLKRTARRRYTRRKNRICYLQEIFSNEMAKVDDSFFHRLEESFLVEEDKKHERHPIFGNIVDEVAYHEKYPTIYHLRKKLVDSTDKADLRLIYLALAHMIKFRGHFLIEGDLNPDNSDVDKLFIQLVQTYNQLFEENPINASGVDAKAILSARLSKSRRLENLIAQLPGEKKNGLFGNLIALSLGLTPNFKSNFDLAEDAKLQLSKDTYDDDLDNLLAQIGDQYADLFLAAKNLSDAILLSDILRVNTEITKAPLSASMIKRYDEHHQDLTLLKALVRQQLPEKYKEIFFDQSKNGYAGYIDGGASQEEFYKFIKPILEKMDGTEELLVKLNREDLLRKQRTFDNGSIPHQIHLGELHAILRRQEDFYPFLKDNREKIEKILTFRIPYYVGPLARGNSRFAWMTRKSEETITPWNFEEVVDKGASAQSFIERMTNFDKNLPNEKVLPKHSLLYEYFTVYNELTKVKYVTEGMRKPAFLSGEQKKAIVDLLFKTNRKVTVKQLKEDYFKKIECFDSVEISGVEDRFNASLGTYHDLLKIIKDKDFLDNEENEDILEDIVLTLTLFEDREMIEERLKTYAHLFDDKVMKQLKRRRYTGWGRLSRKLINGIRDKQSGKTILDFLKSDGFANRNFMQLIHDDSLTFKEDIQKAQVSGQGDSLHEHIANLAGSPAIKKGILQTVKVVDELVKVMGRHKPENIVIEMARENQTTQKGQKNSRERMKRIEEGIKELGSQILKEHPVENTQLQNEKLYLYYLQNGRDMYVDQELDINRLSDYDVDHIVPQSFLKDDSIDNKVLTRSDKARGKSDNVPSEEVVKKMKNYWRQLLNAKLITQRKFDNLTKAERGGLSELDKAGFIKRQLVETRQITKHVAQILDSRMNTKYDENDKLIREVKVITLKSKLVSDFRKDFQFYKVREINNYHHAHDAYLNAVVGTALIKKYPKLESEFVYGDYKVYDVRKMIAKSEQEIGKATAKYFFYSNIMNFFKTEITLANGEIRKRPLIETNGETGEIVWDKGRDFATVRKVLSMPQVNIVKKTEVQTGGFSKESILPKRNSDKLIARKKDWDPKKYGGFDSPTVAYSVLVVAKVEKGKSKKLKSVKELLGITIMERSSFEKNPIDFLEAKGYKEVKKDLIIKLPKYSLFELENGRKRMLASAGELQKGNELALPSKYVNFLYLASHYEKLKGSPEDNEQKQLFVEQHKHYLDEIIEQISEFSKRVILADANLDKVLSAYNKHRDKPIREQAENIIHLFTLTNLGAPAAFKYFDTTIDRKRYTSTKEVLDATLIHQSITGLYETRIDLSQLGGDGGEAAAKGGSPAPGGTVSLQDEHRLFDIPVTTSLPDVWLQDFPQAWAETGGLGRAKCQAPIIIDLKPTAVPVSIKQYPMSLEAHMGIRQHIIKFLELGVLRPCRSPWNTPLLPVKKPGTQDYRPVQDLREINKRTVDIHPTVPNPYNLLSTLKPDYSWYTVLDLKDAFFCLPLAPQSQELFAFEWKDPERGISGQLTWTRLPQGFKNSPTLFNEALHRDLTDFRTQHPEVTLLQYVDDLLLAAPTKKACTQGTRHLLQELGEKGYRASAKKAQICQTKVTYLGYILSEGKRWLTPGRIETVARIPPPRNPREVREFLGKAGFCRLFIPGFAELAAPLYALTKPSTPFTWQTEHQLAFEALKKALLSAPALGLPDTSKPFTLFLDERQGIAKGVLTQKLGPWKRPVAYLSKKLDPVAAGWPPCLRIMAATAMLVKDSAKLTLGQPLTVITPHTLEAIVRQPPDRWITNARLTHYQALLLDTDRVQFGPPVTLNPATLLPVPENQPSPHDCRQVLAETHGTREDLKDQELPDADHTWYTDGSSYLDSGTRRAGAAVVDGHNTIWAQSLPPGTSAQKAELIALTKALELSKGKKANIYTDSRYAFATAHTHGSIYERRGWLTSEGKEIKNKAEIIALLKALFLPQEVAIIHCPGHQKGQDPVAVGNRQADRVARQAAMAEVLTLATEPDNTSHITAGKRTADGSEFEKRTADGSEFESPKKKAKVE

SEQ ID NO: 2028 - protein, 2102 aa, synthetic construct
MPAAKRVKLDGGDKKYSIGLDIGTNSVGWAVITDEYKVPSKKFKVLGNTDRHSIKKNLIGALLFDSGETAEATRLKRTARRRYTRRKNRICYLQEIFSNEMAKVDDSFFHRLEESFLVEEDKKHERHPIFGNIVDEVAYHEKYPTIYHLRKKLVDSTDKADLRLIYLALAHMIKFRGHFLIEGDLNPDNSDVDKLFIQLVQTYNQLFEENPINASGVDAKAILSARLSKSRRLENLIAQLPGEKKNGLFGNLIALSLGLTPNFKSNFDLAEDAKLQLSKDTYDDDLDNLLAQIGDQYADLFLAAKNLSDAILLSDILRVNTEITKAPLSASMIKRYDEHHQDLTLLKALVRQQLPEKYKEIFFDQSKNGYAGYIDGGASQEEFYKFIKPILEKMDGTEELLVKLNREDLLRKQRTFDNGSIPHQIHLGELHAILRRQEDFYPFLKDNREKIEKILTFRIPYYVGPLARGNSRFAWMTRKSEETITPWNFEEVVDKGASAQSFIERMTNFDKNLPNEKVLPKHSLLYEYFTVYNELTKVKYVTEGMRKPAFLSGEQKKAIVDLLFKTNRKVTVKQLKEDYFKKIECFDSVEISGVEDRFNASLGTYHDLLKIIKDKDFLDNEENEDILEDIVLTLTLFEDREMIEERLKTYAHLFDDKVMKQLKRRRYTGWGRLSRKLINGIRDKQSGKTILDFLKSDGFANRNFMQLIHDDSLTFKEDIQKAQVSGQGDSLHEHIANLAGSPAIKKGILQTVKVVDELVKVMGRHKPENIVIEMARENQTTQKGQKNSRERMKRIEEGIKELGSQILKEHPVENTQLQNEKLYLYYLQNGRDMYVDQELDINRLSDYDVDHIVPQSFLKDDSIDNKVLTRSDKARGKSDNVPSEEVVKKMKNYWRQLLNAKLITQRKFDNLTKAERGGLSELDKAGFIKRQLVETRQITKHVAQILDSRMNTKYDENDKLIREVKVITLKSKLVSDFRKDFQFYKVREINNYHHAHDAYLNAVVGTALIKKYPKLESEFVYGDYKVYDVRKMIAKSEQEIGKATAKYFFYSNIMNFFKTEITLANGEIRKRPLIETNGETGEIVWDKGRDFATVRKVLSMPQVNIVKKTEVQTGGFSKESILPKRNSDKLIARKKDWDPKKYGGFDSPTVAYSVLVVAKVEKGKSKKLKSVKELLGITIMERSSFEKNPIDFLEAKGYKEVKKDLIIKLPKYSLFELENGRKRMLASAGELQKGNELALPSKYVNFLYLASHYEKLKGSPEDNEQKQLFVEQHKHYLDEIIEQISEFSKRVILADANLDKVLSAYNKHRDKPIREQAENIIHLFTLTNLGAPAAFKYFDTTIDRKRYTSTKEVLDATLIHQSITGLYETRIDLSQLGGDGGEAAAKPAPGGSGGTVSLQDEHRLFDIPVTTSLPDVWLQDFPQAWAETGGLGRAKCQAPIIIDLKPTAVPVSIKQYPMSLEAHMGIRQHIIKFLELGVLRPCRSPWNTPLLPVKKPGTQDYRPVQDLREINKRTVDIHPTVPNPYNLLSTLKPDYSWYTVLDLKDAFFCLPLAPQSQELFAFEWKDPERGISGQLTWTRLPQGFKNSPTLFNEALHRDLTDFRTQHPEVTLLQYVDDLLLAAPTKKACTQGTRHLLQELGEKGYRASAKKAQICQTKVTYLGYILSEGKRWLTPGRIETVARIPPPRNPREVREFLGKAGFCRLFIPGFAELAAPLYALTKPSTPFTWQTEHQLAFEALKKALLSAPALGLPDTSKPFTLFLDERQGIAKGVLTQKLGPWKRPVAYLSKKLDPVAAGWPPCLRIMAATAMLVKDSAKLTLGQPLTVITPHTLEAIVRQPPDRWITNARLTHYQALLLDTDRVQFGPPVTLNPATLLPVPENQPSPHDCRQVLAETHGTREDLKDQELPDADHTWYTDGSSYLDSGTRRAGAAVVDGHNTIWAQSLPPGTSAQKAELIALTKALELSKGKKANIYTDSRYAFATAHTHGSIYERRGWLTSEGKEIKNKAEIIALLKALFLPQEVAIIHCPGHQKGQDPVAVGNRQADRVARQAAMAEVLTLATEPDNTSHITAGKRTADGSEFEKRTADGSEFESPKKKAKVE

SEQ ID NO: 2029 - protein, 2097 aa, synthetic construct
MPAAKRVKLDGGDKKYSIGLDIGTNSVGWAVITDEYKVPSKKFKVLGNTDRHSIKKNLIGALLFDSGETAEATRLKRTARRRYTRRKNRICYLQEIFSNEMAKVDDSFFHRLEESFLVEEDKKHERHPIFGNIVDEVAYHEKYPTIYHLRKKLVDSTDKADLRLIYLALAHMIKFRGHFLIEGDLNPDNSDVDKLFIQLVQTYNQLFEENPINASGVDAKAILSARLSKSRRLENLIAQLPGEKKNGLFGNLIALSLGLTPNFKSNFDLAEDAKLQLSKDTYDDDLDNLLAQIGDQYADLFLAAKNLSDAILLSDILRVNTEITKAPLSASMIKRYDEHHQDLTLLKALVRQQLPEKYKEIFFDQSKNGYAGYIDGGASQEEFYKFIKPILEKMDGTEELLVKLNREDLLRKQRTFDNGSIPHQIHLGELHAILRRQEDFYPFLKDNREKIEKILTFRIPYYVGPLARGNSRFAWMTRKSEETITPWNFEEVVDKGASAQSFIERMTNFDKNLPNEKVLPKHSLLYEYFTVYNELTKVKYVTEGMRKPAFLSGEQKKAIVDLLFKTNRKVTVKQLKEDYFKKIECFDSVEISGVEDRFNASLGTYHDLLKIIKDKDFLDNEENEDILEDIVLTLTLFEDREMIEERLKTYAHLFDDKVMKQLKRRRYTGWGRLSRKLINGIRDKQSGKTILDFLKSDGFANRNFMQLIHDDSLTFKEDIQKAQVSGQGDSLHEHIANLAGSPAIKKGILQTVKVVDELVKVMGRHKPENIVIEMARENQTTQKGQKNSRERMKRIEEGIKELGSQILKEHPVENTQLQNEKLYLYYLQNGRDMYVDQELDINRLSDYDVDHIVPQSFLKDDSIDNKVLTRSDKARGKSDNVPSEEVVKKMKNYWRQLLNAKLITQRKFDNLTKAERGGLSELDKAGFIKRQLVETRQITKHVAQILDSRMNTKYDENDKLIREVKVITLKSKLVSDFRKDFQFYKVREINNYHHAHDAYLNAVVGTALIKKYPKLESEFVYGDYKVYDVRKMIAKSEQEIGKATAKYFFYSNIMNFFKTEITLANGEIRKRPLIETNGETGEIVWDKGRDFATVRKVLSMPQVNIVKKTEVQTGGFSKESILPKRNSDKLIARKKDWDPKKYGGFDSPTVAYSVLVVAKVEKGKSKKLKSVKELLGITIMERSSFEKNPIDFLEAKGYKEVKKDLIIKLPKYSLFELENGRKRMLASAGELQKGNELALPSKYVNFLYLASHYEKLKGSPEDNEQKQLFVEQHKHYLDEIIEQISEFSKRVILADANLDKVLSAYNKHRDKPIREQAENIIHLFTLTNLGAPAAFKYFDTTIDRKRYTSTKEVLDATLIHQSITGLYETRIDLSQLGGDGGGGGGGSGGTVSLQDEHRLFDIPVTTSLPDVWLQDFPQAWAETGGLGRAKCQAPIIIDLKPTAVPVSIKQYPMSLEAHMGIRQHIIKFLELGVLRPCRSPWNTPLLPVKKPGTQDYRPVQDLREINKRTVDIHPTVPNPYNLLSTLKPDYSWYTVLDLKDAFFCLPLAPQSQELFAFEWKDPERGISGQLTWTRLPQGFKNSPTLFNEALHRDLTDFRTQHPEVTLLQYVDDLLLAAPTKKACTQGTRHLLQELGEKGYRASAKKAQICQTKVTYLGYILSEGKRWLTPGRIETVARIPPPRNPREVREFLGKAGFCRLFIPGFAELAAPLYALTKPSTPFTWQTEHQLAFEALKKALLSAPALGLPDTSKPFTLFLDERQGIAKGVLTQKLGPWKRPVAYLSKKLDPVAAGWPPCLRIMAATAMLVKDSAKLTLGQPLTVITPHTLEAIVRQPPDRWITNARLTHYQALLLDTDRVQFGPPVTLNPATLLPVPENQPSPHDCRQVLAETHGTREDLKDQELPDADHTWYTDGSSYLDSGTRRAGAAVVDGHNTIWAQSLPPGTSAQKAELIALTKALELSKGKKANIYTDSRYAFATAHTHGSIYERRGWLTSEGKEIKNKAEIIALLKALFLPQEVAIIHCPGHQKGQDPVAVGNRQADRVARQAAMAEVLTLATEPDNTSHITAGKRTADGSEFEKRTADGSEFESPKKKAKVE

SEQ ID NO: 2030 - protein, 2100 aa, synthetic construct
MPAAKRVKLDGGDKKYSIGLDIGTNSVGWAVITDEYKVPSKKFKVLGNTDRHSIKKNLIGALLFDSGETAEATRLKRTARRRYTRRKNRICYLQEIFSNEMAKVDDSFFHRLEESFLVEEDKKHERHPIFGNIVDEVAYHEKYPTIYHLRKKLVDSTDKADLRLIYLALAHMIKFRGHFLIEGDLNPDNSDVDKLFIQLVQTYNQLFEENPINASGVDAKAILSARLSKSRRLENLIAQLPGEKKNGLFGNLIALSLGLTPNFKSNFDLAEDAKLQLSKDTYDDDLDNLLAQIGDQYADLFLAAKNLSDAILLSDILRVNTEITKAPLSASMIKRYDEHHQDLTLLKALVRQQLPEKYKEIFFDQSKNGYAGYIDGGASQEEFYKFIKPILEKMDGTEELLVKLNREDLLRKQRTFDNGSIPHQIHLGELHAILRRQEDFYPFLKDNREKIEKILTFRIPYYVGPLARGNSRFAWMTRKSEETITPWNFEEVVDKGASAQSFIERMTNFDKNLPNEKVLPKHSLLYEYFTVYNELTKVKYVTEGMRKPAFLSGEQKKAIVDLLFKTNRKVTVKQLKEDYFKKIECFDSVEISGVEDRFNASLGTYHDLLKIIKDKDFLDNEENEDILEDIVLTLTLFEDREMIEERLKTYAHLFDDKVMKQLKRRRYTGWGRLSRKLINGIRDKQSGKTILDFLKSDGFANRNFMQLIHDDSLTFKEDIQKAQVSGQGDSLHEHIANLAGSPAIKKGILQTVKVVDELVKVMGRHKPENIVIEMARENQTTQKGQKNSRERMKRIEEGIKELGSQILKEHPVENTQLQNEKLYLYYLQNGRDMYVDQELDINRLSDYDVDHIVPQSFLKDDSIDNKVLTRSDKARGKSDNVPSEEVVKKMKNYWRQLLNAKLITQRKFDNLTKAERGGLSELDKAGFIKRQLVETRQITKHVAQILDSRMNTKYDENDKLIREVKVITLKSKLVSDFRKDFQFYKVREINNYHHAHDAYLNAVVGTALIKKYPKLESEFVYGDYKVYDVRKMIAKSEQEIGKATAKYFFYSNIMNFFKTEITLANGEIRKRPLIETNGETGEIVWDKGRDFATVRKVLSMPQVNIVKKTEVQTGGFSKESILPKRNSDKLIARKKDWDPKKYGGFDSPTVAYSVLVVAKVEKGKSKKLKSVKELLGITIMERSSFEKNPIDFLEAKGYKEVKKDLIIKLPKYSLFELENGRKRMLASAGELQKGNELALPSKYVNFLYLASHYEKLKGSPEDNEQKQLFVEQHKHYLDEIIEQISEFSKRVILADANLDKVLSAYNKHRDKPIREQAENIIHLFTLTNLGAPAAFKYFDTTIDRKRYTSTKEVLDATLIHQSITGLYETRIDLSQLGGDGGGGSGGSGGSGGTVSLQDEHRLFDIPVTTSLPDVWLQDFPQAWAETGGLGRAKCQAPIIIDLKPTAVPVSIKQYPMSLEAHMGIRQHIIKFLELGVLRPCRSPWNTPLLPVKKPGTQDYRPVQDLREINKRTVDIHPTVPNPYNLLSTLKPDYSWYTVLDLKDAFFCLPLAPQSQELFAFEWKDPERGISGQLTWTRLPQGFKNSPTLFNEALHRDLTDFRTQHPEVTLLQYVDDLLLAAPTKKACTQGTRHLLQELGEKGYRASAKKAQICQTKVTYLGYILSEGKRWLTPGRIETVARIPPPRNPREVREFLGKAGFCRLFIPGFAELAAPLYALTKPSTPFTWQTEHQLAFEALKKALLSAPALGLPDTSKPFTLFLDERQGIAKGVLTQKLGPWKRPVAYLSKKLDPVAAGWPPCLRIMAATAMLVKDSAKLTLGQPLTVITPHTLEAIVRQPPDRWITNARLTHYQALLLDTDRVQFGPPVTLNPATLLPVPENQPSPHDCRQVLAETHGTREDLKDQELPDADHTWYTDGSSYLDSGTRRAGAAVVDGHNTIWAQSLPPGTSAQKAELIALTKALELSKGKKANIYTDSRYAFATAHTHGSIYERRGWLTSEGKEIKNKAEIIALLKALFLPQEVAIIHCPGHQKGQDPVAVGNRQADRVARQAAMAEVLTLATEPDNTSHITAGKRTADGSEFEKRTADGSEFESPKKKAKVE

SEQ ID NO: 2031 - protein, 2097 aa, synthetic construct
MPAAKRVKLDGGDKKYSIGLDIGTNSVGWAVITDEYKVPSKKFKVLGNTDRHSIKKNLIGALLFDSGETAEATRLKRTARRRYTRRKNRICYLQEIFSNEMAKVDDSFFHRLEESFLVEEDKKHERHPIFGNIVDEVAYHEKYPTIYHLRKKLVDSTDKADLRLIYLALAHMIKFRGHFLIEGDLNPDNSDVDKLFIQLVQTYNQLFEENPINASGVDAKAILSARLSKSRRLENLIAQLPGEKKNGLFGNLIALSLGLTPNFKSNFDLAEDAKLQLSKDTYDDDLDNLLAQIGDQYADLFLAAKNLSDAILLSDILRVNTEITKAPLSASMIKRYDEHHQDLTLLKALVRQQLPEKYKEIFFDQSKNGYAGYIDGGASQEEFYKFIKPILEKMDGTEELLVKLNREDLLRKQRTFDNGSIPHQIHLGELHAILRRQEDFYPFLKDNREKIEKILTFRIPYYVGPLARGNSRFAWMTRKSEETITPWNFEEVVDKGASAQSFIERMTNFDKNLPNEKVLPKHSLLYEYFTVYNELTKVKYVTEGMRKPAFLSGEQKKAIVDLLFKTNRKVTVKQLKEDYFKKIECFDSVEISGVEDRFNASLGTYHDLLKIIKDKDFLDNEENEDILEDIVLTLTLFEDREMIEERLKTYAHLFDDKVMKQLKRRRYTGWGRLSRKLINGIRDKQSGKTILDFLKSDGFANRNFMQLIHDDSLTFKEDIQKAQVSGQGDSLHEHIANLAGSPAIKKGILQTVKVVDELVKVMGRHKPENIVIEMARENQTTQKGQKNSRERMKRIEEGIKELGSQILKEHPVENTQLQNEKLYLYYLQNGRDMYVDQELDINRLSDYDVDHIVPQSFLKDDSIDNKVLTRSDKARGKSDNVPSEEVVKKMKNYWRQLLNAKLITQRKFDNLTKAERGGLSELDKAGFIKRQLVETRQITKHVAQILDSRMNTKYDENDKLIREVKVITLKSKLVSDFRKDFQFYKVREINNYHHAHDAYLNAVVGTALIKKYPKLESEFVYGDYKVYDVRKMIAKSEQEIGKATAKYFFYSNIMNFFKTEITLANGEIRKRPLIETNGETGEIVWDKGRDFATVRKVLSMPQVNIVKKTEVQTGGFSKESILPKRNSDKLIARKKDWDPKKYGGFDSPTVAYSVLVVAKVEKGKSKKLKSVKELLGITIMERSSFEKNPIDFLEAKGYKEVKKDLIIKLPKYSLFELENGRKRMLASAGELQKGNELALPSKYVNFLYLASHYEKLKGSPEDNEQKQLFVEQHKHYLDEIIEQISEFSKRVILADANLDKVLSAYNKHRDKPIREQAENIIHLFTLTNLGAPAAFKYFDTTIDRKRYTSTKEVLDATLIHQSITGLYETRIDLSQLGGDGGGGSGSSGGTVSLQDEHRLFDIPVTTSLPDVWLQDFPQAWAETGGLGRAKCQAPIIIDLKPTAVPVSIKQYPMSLEAHMGIRQHIIKFLELGVLRPCRSPWNTPLLPVKKPGTQDYRPVQDLREINKRTVDIHPTVPNPYNLLSTLKPDYSWYTVLDLKDAFFCLPLAPQSQELFAFEWKDPERGISGQLTWTRLPQGFKNSPTLFNEALHRDLTDFRTQHPEVTLLQYVDDLLLAAPTKKACTQGTRHLLQELGEKGYRASAKKAQICQTKVTYLGYILSEGKRWLTPGRIETVARIPPPRNPREVREFLGKAGFCRLFIPGFAELAAPLYALTKPSTPFTWQTEHQLAFEALKKALLSAPALGLPDTSKPFTLFLDERQGIAKGVLTQKLGPWKRPVAYLSKKLDPVAAGWPPCLRIMAATAMLVKDSAKLTLGQPLTVITPHTLEAIVRQPPDRWITNARLTHYQALLLDTDRVQFGPPVTLNPATLLPVPENQPSPHDCRQVLAETHGTREDLKDQELPDADHTWYTDGSSYLDSGTRRAGAAVVDGHNTIWAQSLPPGTSAQKAELIALTKALELSKGKKANIYTDSRYAFATAHTHGSIYERRGWLTSEGKEIKNKAEIIALLKALFLPQEVAIIHCPGHQKGQDPVAVGNRQADRVARQAAMAEVLTLATEPDNTSHITAGKRTADGSEFEKRTADGSEFESPKKKAKVE

SEQ ID NO: 2032 - protein, 2097 aa, synthetic construct
MPAAKRVKLDGGDKKYSIGLDIGTNSVGWAVITDEYKVPSKKFKVLGNTDRHSIKKNLIGALLFDSGETAEATRLKRTARRRYTRRKNRICYLQEIFSNEMAKVDDSFFHRLEESFLVEEDKKHERHPIFGNIVDEVAYHEKYPTIYHLRKKLVDSTDKADLRLIYLALAHMIKFRGHFLIEGDLNPDNSDVDKLFIQLVQTYNQLFEENPINASGVDAKAILSARLSKSRRLENLIAQLPGEKKNGLFGNLIALSLGLTPNFKSNFDLAEDAKLQLSKDTYDDDLDNLLAQIGDQYADLFLAAKNLSDAILLSDILRVNTEITKAPLSASMIKRYDEHHQDLTLLKALVRQQLPEKYKEIFFDQSKNGYAGYIDGGASQEEFYKFIKPILEKMDGTEELLVKLNREDLLRKQRTFDNGSIPHQIHLGELHAILRRQEDFYPFLKDNREKIEKILTFRIPYYVGPLARGNSRFAWMTRKSEETITPWNFEEVVDKGASAQSFIERMTNFDKNLPNEKVLPKHSLLYEYFTVYNELTKVKYVTEGMRKPAFLSGEQKKAIVDLLFKTNRKVTVKQLKEDYFKKIECFDSVEISGVEDRFNASLGTYHDLLKIIKDKDFLDNEENEDILEDIVLTLTLFEDREMIEERLKTYAHLFDDKVMKQLKRRRYTGWGRLSRKLINGIRDKQSGKTILDFLKSDGFANRNFMQLIHDDSLTFKEDIQKAQVSGQGDSLHEHIANLAGSPAIKKGILQTVKVVDELVKVMGRHKPENIVIEMARENQTTQKGQKNSRERMKRIEEGIKELGSQILKEHPVENTQLQNEKLYLYYLQNGRDMYVDQELDINRLSDYDVDHIVPQSFLKDDSIDNKVLTRSDKARGKSDNVPSEEVVKKMKNYWRQLLNAKLITQRKFDNLTKAERGGLSELDKAGFIKRQLVETRQITKHVAQILDSRMNTKYDENDKLIREVKVITLKSKLVSDFRKDFQFYKVREINNYHHAHDAYLNAVVGTALIKKYPKLESEFVYGDYKVYDVRKMIAKSEQEIGKATAKYFFYSNIMNFFKTEITLANGEIRKRPLIETNGETGEIVWDKGRDFATVRKVLSMPQVNIVKKTEVQTGGFSKESILPKRNSDKLIARKKDWDPKKYGGFDSPTVAYSVLVVAKVEKGKSKKLKSVKELLGITIMERSSFEKNPIDFLEAKGYKEVKKDLIIKLPKYSLFELENGRKRMLASAGELQKGNELALPSKYVNFLYLASHYEKLKGSPEDNEQKQLFVEQHKHYLDEIIEQISEFSKRVILADANLDKVLSAYNKHRDKPIREQAENIIHLFTLTNLGAPAAFKYFDTTIDRKRYTSTKEVLDATLIHQSITGLYETRIDLSQLGGDGGPAPGGSGGTVSLQDEHRLFDIPVTTSLPDVWLQDFPQAWAETGGLGRAKCQAPIIIDLKPTAVPVSIKQYPMSLEAHMGIRQHIIKFLELGVLRPCRSPWNTPLLPVKKPGTQDYRPVQDLREINKRTVDIHPTVPNPYNLLSTLKPDYSWYTVLDLKDAFFCLPLAPQSQELFAFEWKDPERGISGQLTWTRLPQGFKNSPTLFNEALHRDLTDFRTQHPEVTLLQYVDDLLLAAPTKKACTQGTRHLLQELGEKGYRASAKKAQICQTKVTYLGYILSEGKRWLTPGRIETVARIPPPRNPREVREFLGKAGFCRLFIPGFAELAAPLYALTKPSTPFTWQTEHQLAFEALKKALLSAPALGLPDTSKPFTLFLDERQGIAKGVLTQKLGPWKRPVAYLSKKLDPVAAGWPPCLRIMAATAMLVKDSAKLTLGQPLTVITPHTLEAIVRQPPDRWITNARLTHYQALLLDTDRVQFGPPVTLNPATLLPVPENQPSPHDCRQVLAETHGTREDLKDQELPDADHTWYTDGSSYLDSGTRRAGAAVVDGHNTIWAQSLPPGTSAQKAELIALTKALELSKGKKANIYTDSRYAFATAHTHGSIYERRGWLTSEGKEIKNKAEIIALLKALFLPQEVAIIHCPGHQKGQDPVAVGNRQADRVARQAAMAEVLTLATEPDNTSHITAGKRTADGSEFEKRTADGSEFESPKKKAKVE

SEQ ID NO: 2033 - protein, 2094 aa, synthetic construct
MPAAKRVKLDGGDKKYSIGLDIGTNSVGWAVITDEYKVPSKKFKVLGNTDRHSIKKNLIGALLFDSGETAEATRLKRTARRRYTRRKNRICYLQEIFSNEMAKVDDSFFHRLEESFLVEEDKKHERHPIFGNIVDEVAYHEKYPTIYHLRKKLVDSTDKADLRLIYLALAHMIKFRGHFLIEGDLNPDNSDVDKLFIQLVQTYNQLFEENPINASGVDAKAILSARLSKSRRLENLIAQLPGEKKNGLFGNLIALSLGLTPNFKSNFDLAEDAKLQLSKDTYDDDLDNLLAQIGDQYADLFLAAKNLSDAILLSDILRVNTEITKAPLSASMIKRYDEHHQDLTLLKALVRQQLPEKYKEIFFDQSKNGYAGYIDGGASQEEFYKFIKPILEKMDGTEELLVKLNREDLLRKQRTFDNGSIPHQIHLGELHAILRRQEDFYPFLKDNREKIEKILTFRIPYYVGPLARGNSRFAWMTRKSEETITPWNFEEVVDKGASAQSFIERMTNFDKNLPNEKVLPKHSLLYEYFTVYNELTKVKYVTEGMRKPAFLSGEQKKAIVDLLFKTNRKVTVKQLKEDYFKKIECFDSVEISGVEDRFNASLGTYHDLLKIIKDKDFLDNEENEDILEDIVLTLTLFEDREMIEERLKTYAHLFDDKVMKQLKRRRYTGWGRLSRKLINGIRDKQSGKTILDFLKSDGFANRNFMQLIHDDSLTFKEDIQKAQVSGQGDSLHEHIANLAGSPAIKKGILQTVKVVDELVKVMGRHKPENIVIEMARENQTTQKGQKNSRERMKRIEEGIKELGSQILKEHPVENTQLQNEKLYLYYLQNGRDMYVDQELDINRLSDYDVDHIVPQSFLKDDSIDNKVLTRSDKARGKSDNVPSEEVVKKMKNYWRQLLNAKLITQRKFDNLTKAERGGLSELDKAGFIKRQLVETRQITKHVAQILDSRMNTKYDENDKLIREVKVITLKSKLVSDFRKDFQFYKVREINNYHHAHDAYLNAVVGTALIKKYPKLESEFVYGDYKVYDVRKMIAKSEQEIGKATAKYFFYSNIMNFFKTEITLANGEIRKRPLIETNGETGEIVWDKGRDFATVRKVLSMPQVNIVKKTEVQTGGFSKESILPKRNSDKLIARKKDWDPKKYGGFDSPTVAYSVLVVAKVEKGKSKKLKSVKELLGITIMERSSFEKNPIDFLEAKGYKEVKKDLIIKLPKYSLFELENGRKRMLASAGELQKGNELALPSKYVNFLYLASHYEKLKGSPEDNEQKQLFVEQHKHYLDEIIEQISEFSKRVILADANLDKVLSAYNKHRDKPIREQAENIIHLFTLTNLGAPAAFKYFDTTIDRKRYTSTKEVLDATLIHQSITGLYETRIDLSQLGGDGGGSSGGTVSLQDEHRLFDIPVTTSLPDVWLQDFPQAWAETGGLGRAKCQAPIIIDLKPTAVPVSIKQYPMSLEAHMGIRQHIIKFLELGVLRPCRSPWNTPLLPVKKPGTQDYRPVQDLREINKRTVDIHPTVPNPYNLLSTLKPDYSWYTVLDLKDAFFCLPLAPQSQELFAFEWKDPERGISGQLTWTRLPQGFKNSPTLFNEALHRDLTDFRTQHPEVTLLQYVDDLLLAAPTKKACTQGTRHLLQELGEKGYRASAKKAQICQTKVTYLGYILSEGKRWLTPGRIETVARIPPPRNPREVREFLGKAGFCRLFIPGFAELAAPLYALTKPSTPFTWQTEHQLAFEALKKALLSAPALGLPDTSKPFTLFLDERQGIAKGVLTQKLGPWKRPVAYLSKKLDPVAAGWPPCLRIMAATAMLVKDSAKLTLGQPLTVITPHTLEAIVRQPPDRWITNARLTHYQALLLDTDRVQFGPPVTLNPATLLPVPENQPSPHDCRQVLAETHGTREDLKDQELPDADHTWYTDGSSYLDSGTRRAGAAVVDGHNTIWAQSLPPGTSAQKAELIALTKALELSKGKKANIYTDSRYAFATAHTHGSIYERRGWLTSEGKEIKNKAEIIALLKALFLPQEVAIIHCPGHQKGQDPVAVGNRQADRVARQAAMAEVLTLATEPDNTSHITAGKRTADGSEFEKRTADGSEFESPKKKAKVE

SEQ ID NO: 2034 - protein, 2100 aa, synthetic construct
MPAAKRVKLDGGDKKYSIGLDIGTNSVGWAVITDEYKVPSKKFKVLGNTDRHSIKKNLIGALLFDSGETAEATRLKRTARRRYTRRKNRICYLQEIFSNEMAKVDDSFFHRLEESFLVEEDKKHERHPIFGNIVDEVAYHEKYPTIYHLRKKLVDSTDKADLRLIYLALAHMIKFRGHFLIEGDLNPDNSDVDKLFIQLVQTYNQLFEENPINASGVDAKAILSARLSKSRRLENLIAQLPGEKKNGLFGNLIALSLGLTPNFKSNFDLAEDAKLQLSKDTYDDDLDNLLAQIGDQYADLFLAAKNLSDAILLSDILRVNTEITKAPLSASMIKRYDEHHQDLTLLKALVRQQLPEKYKEIFFDQSKNGYAGYIDGGASQEEFYKFIKPILEKMDGTEELLVKLNREDLLRKQRTFDNGSIPHQIHLGELHAILRRQEDFYPFLKDNREKIEKILTFRIPYYVGPLARGNSRFAWMTRKSEETITPWNFEEVVDKGASAQSFIERMTNFDKNLPNEKVLPKHSLLYEYFTVYNELTKVKYVTEGMRKPAFLSGEQKKAIVDLLFKTNRKVTVKQLKEDYFKKIECFDSVEISGVEDRFNASLGTYHDLLKIIKDKDFLDNEENEDILEDIVLTLTLFEDREMIEERLKTYAHLFDDKVMKQLKRRRYTGWGRLSRKLINGIRDKQSGKTILDFLKSDGFANRNFMQLIHDDSLTFKEDIQKAQVSGQGDSLHEHIANLAGSPAIKKGILQTVKVVDELVKVMGRHKPENIVIEMARENQTTQKGQKNSRERMKRIEEGIKELGSQILKEHPVENTQLQNEKLYLYYLQNGRDMYVDQELDINRLSDYDVDHIVPQSFLKDDSIDNKVLTRSDKARGKSDNVPSEEVVKKMKNYWRQLLNAKLITQRKFDNLTKAERGGLSELDKAGFIKRQLVETRQITKHVAQILDSRMNTKYDENDKLIREVKVITLKSKLVSDFRKDFQFYKVREINNYHHAHDAYLNAVVGTALIKKYPKLESEFVYGDYKVYDVRKMIAKSEQEIGKATAKYFFYSNIMNFFKTEITLANGEIRKRPLIETNGETGEIVWDKGRDFATVRKVLSMPQVNIVKKTEVQTGGFSKESILPKRNSDKLIARKKDWDPKKYGGFDSPTVAYSVLVVAKVEKGKSKKLKSVKELLGITIMERSSFEKNPIDFLEAKGYKEVKKDLIIKLPKYSLFELENGRKRMLASAGELQKGNELALPSKYVNFLYLASHYEKLKGSPEDNEQKQLFVEQHKHYLDEIIEQISEFSKRVILADANLDKVLSAYNKHRDKPIREQAENIIHLFTLTNLGAPAAFKYFDTTIDRKRYTSTKEVLDATLIHQSITGLYETRIDLSQLGGDGGGGGGGSPAPGGTVSLQDEHRLFDIPVTTSLPDVWLQDFPQAWAETGGLGRAKCQAPIIIDLKPTAVPVSIKQYPMSLEAHMGIRQHIIKFLELGVLRPCRSPWNTPLLPVKKPGTQDYRPVQDLREINKRTVDIHPTVPNPYNLLSTLKPDYSWYTVLDLKDAFFCLPLAPQSQELFAFEWKDPERGISGQLTWTRLPQGFKNSPTLFNEALHRDLTDFRTQHPEVTLLQYVDDLLLAAPTKKACTQGTRHLLQELGEKGYRASAKKAQICQTKVTYLGYILSEGKRWLTPGRIETVARIPPPRNPREVREFLGKAGFCRLFIPGFAELAAPLYALTKPSTPFTWQTEHQLAFEALKKALLSAPALGLPDTSKPFTLFLDERQGIAKGVLTQKLGPWKRPVAYLSKKLDPVAAGWPPCLRIMAATAMLVKDSAKLTLGQPLTVITPHTLEAIVRQPPDRWITNARLTHYQALLLDTDRVQFGPPVTLNPATLLPVPENQPSPHDCRQVLAETHGTREDLKDQELPDADHTWYTDGSSYLDSGTRRAGAAVVDGHNTIWAQSLPPGTSAQKAELIALTKALELSKGKKANIYTDSRYAFATAHTHGSIYERRGWLTSEGKEIKNKAEIIALLKALFLPQEVAIIHCPGHQKGQDPVAVGNRQADRVARQAAMAEVLTLATEPDNTSHITAGKRTADGSEFEKRTADGSEFESPKKKAKVE

SEQ ID NO: 2035 - protein, 2109 aa, synthetic construct
MPAAKRVKLDGGDKKYSIGLDIGTNSVGWAVITDEYKVPSKKFKVLGNTDRHSIKKNLIGALLFDSGETAEATRLKRTARRRYTRRKNRICYLQEIFSNEMAKVDDSFFHRLEESFLVEEDKKHERHPIFGNIVDEVAYHEKYPTIYHLRKKLVDSTDKADLRLIYLALAHMIKFRGHFLIEGDLNPDNSDVDKLFIQLVQTYNQLFEENPINASGVDAKAILSARLSKSRRLENLIAQLPGEKKNGLFGNLIALSLGLTPNFKSNFDLAEDAKLQLSKDTYDDDLDNLLAQIGDQYADLFLAAKNLSDAILLSDILRVNTEITKAPLSASMIKRYDEHHQDLTLLKALVRQQLPEKYKEIFFDQSKNGYAGYIDGGASQEEFYKFIKPILEKMDGTEELLVKLNREDLLRKQRTFDNGSIPHQIHLGELHAILRRQEDFYPFLKDNREKIEKILTFRIPYYVGPLARGNSRFAWMTRKSEETITPWNFEEVVDKGASAQSFIERMTNFDKNLPNEKVLPKHSLLYEYFTVYNELTKVKYVTEGMRKPAFLSGEQKKAIVDLLFKTNRKVTVKQLKEDYFKKIECFDSVEISGVEDRFNASLGTYHDLLKIIKDKDFLDNEENEDILEDIVLTLTLFEDREMIEERLKTYAHLFDDKVMKQLKRRRYTGWGRLSRKLINGIRDKQSGKTILDFLKSDGFANRNFMQLIHDDSLTFKEDIQKAQVSGQGDSLHEHIANLAGSPAIKKGILQTVKVVDELVKVMGRHKPENIVIEMARENQTTQKGQKNSRERMKRIEEGIKELGSQILKEHPVENTQLQNEKLYLYYLQNGRDMYVDQELDINRLSDYDVDHIVPQSFLKDDSIDNKVLTRSDKARGKSDNVPSEEVVKKMKNYWRQLLNAKLITQRKFDNLTKAERGGLSELDKAGFIKRQLVETRQITKHVAQILDSRMNTKYDENDKLIREVKVITLKSKLVSDFRKDFQFYKVREINNYHHAHDAYLNAVVGTALIKKYPKLESEFVYGDYKVYDVRKMIAKSEQEIGKATAKYFFYSNIMNFFKTEITLANGEIRKRPLIETNGETGEIVWDKGRDFATVRKVLSMPQVNIVKKTEVQTGGFSKESILPKRNSDKLIARKKDWDPKKYGGFDSPTVAYSVLVVAKVEKGKSKKLKSVKELLGITIMERSSFEKNPIDFLEAKGYKEVKKDLIIKLPKYSLFELENGRKRMLASAGELQKGNELALPSKYVNFLYLASHYEKLKGSPEDNEQKQLFVEQHKHYLDEIIEQISEFSKRVILADANLDKVLSAYNKHRDKPIREQAENIIHLFTLTNLGAPAAFKYFDTTIDRKRYTSTKEVLDATLIHQSITGLYETRIDLSQLGGDGGGSSGSSGSSGSSGSSGSSGGTVSLQDEHRLFDIPVTTSLPDVWLQDFPQAWAETGGLGRAKCQAPIIIDLKPTAVPVSIKQYPMSLEAHMGIRQHIIKFLELGVLRPCRSPWNTPLLPVKKPGTQDYRPVQDLREINKRTVDIHPTVPNPYNLLSTLKPDYSWYTVLDLKDAFFCLPLAPQSQELFAFEWKDPERGISGQLTWTRLPQGFKNSPTLFNEALHRDLTDFRTQHPEVTLLQYVDDLLLAAPTKKACTQGTRHLLQELGEKGYRASAKKAQICQTKVTYLGYILSEGKRWLTPGRIETVARIPPPRNPREVREFLGKAGFCRLFIPGFAELAAPLYALTKPSTPFTWQTEHQLAFEALKKALLSAPALGLPDTSKPFTLFLDERQGIAKGVLTQKLGPWKRPVAYLSKKLDPVAAGWPPCLRIMAATAMLVKDSAKLTLGQPLTVITPHTLEAIVRQPPDRWITNARLTHYQALLLDTDRVQFGPPVTLNPATLLPVPENQPSPHDCRQVLAETHGTREDLKDQELPDADHTWYTDGSSYLDSGTRRAGAAVVDGHNTIWAQSLPPGTSAQKAELIALTKALELSKGKKANIYTDSRYAFATAHTHGSIYERRGWLTSEGKEIKNKAEIIALLKALFLPQEVAIIHCPGHQKGQDPVAVGNRQADRVARQAAMAEVLTLATEPDNTSHITAGKRTADGSEFEKRTADGSEFESPKKKAKVE

SEQ ID NO: 2036 - protein, 2097 aa, synthetic construct
MPAAKRVKLDGGDKKYSIGLDIGTNSVGWAVITDEYKVPSKKFKVLGNTDRHSIKKNLIGALLFDSGETAEATRLKRTARRRYTRRKNRICYLQEIFSNEMAKVDDSFFHRLEESFLVEEDKKHERHPIFGNIVDEVAYHEKYPTIYHLRKKLVDSTDKADLRLIYLALAHMIKFRGHFLIEGDLNPDNSDVDKLFIQLVQTYNQLFEENPINASGVDAKAILSARLSKSRRLENLIAQLPGEKKNGLFGNLIALSLGLTPNFKSNFDLAEDAKLQLSKDTYDDDLDNLLAQIGDQYADLFLAAKNLSDAILLSDILRVNTEITKAPLSASMIKRYDEHHQDLTLLKALVRQQLPEKYKEIFFDQSKNGYAGYIDGGASQEEFYKFIKPILEKMDGTEELLVKLNREDLLRKQRTFDNGSIPHQIHLGELHAILRRQEDFYPFLKDNREKIEKILTFRIPYYVGPLARGNSRFAWMTRKSEETITPWNFEEVVDKGASAQSFIERMTNFDKNLPNEKVLPKHSLLYEYFTVYNELTKVKYVTEGMRKPAFLSGEQKKAIVDLLFKTNRKVTVKQLKEDYFKKIECFDSVEISGVEDRFNASLGTYHDLLKIIKDKDFLDNEENEDILEDIVLTLTLFEDREMIEERLKTYAHLFDDKVMKQLKRRRYTGWGRLSRKLINGIRDKQSGKTILDFLKSDGFANRNFMQLIHDDSLTFKEDIQKAQVSGQGDSLHEHIANLAGSPAIKKGILQTVKVVDELVKVMGRHKPENIVIEMARENQTTQKGQKNSRERMKRIEEGIKELGSQILKEHPVENTQLQNEKLYLYYLQNGRDMYVDQELDINRLSDYDVDHIVPQSFLKDDSIDNKVLTRSDKARGKSDNVPSEEVVKKMKNYWRQLLNAKLITQRKFDNLTKAERGGLSELDKAGFIKRQLVETRQITKHVAQILDSRMNTKYDENDKLIREVKVITLKSKLVSDFRKDFQFYKVREINNYHHAHDAYLNAVVGTALIKKYPKLESEFVYGDYKVYDVRKMIAKSEQEIGKATAKYFFYSNIMNFFKTEITLANGEIRKRPLIETNGETGEIVWDKGRDFATVRKVLSMPQVNIVKKTEVQTGGFSKESILPKRNSDKLIARKKDWDPKKYGGFDSPTVAYSVLVVAKVEKGKSKKLKSVKELLGITIMERSSFEKNPIDFLEAKGYKEVKKDLIIKLPKYSLFELENGRKRMLASAGELQKGNELALPSKYVNFLYLASHYEKLKGSPEDNEQKQLFVEQHKHYLDEIIEQISEFSKRVILADANLDKVLSAYNKHRDKPIREQAENIIHLFTLTNLGAPAAFKYFDTTIDRKRYTSTKEVLDATLIHQSITGLYETRIDLSQLGGDGGPAPGSSGGTVSLQDEHRLFDIPVTTSLPDVWLQDFPQAWAETGGLGRAKCQAPIIIDLKPTAVPVSIKQYPMSLEAHMGIRQHIIKFLELGVLRPCRSPWNTPLLPVKKPGTQDYRPVQDLREINKRTVDIHPTVPNPYNLLSTLKPDYSWYTVLDLKDAFFCLPLAPQSQELFAFEWKDPERGISGQLTWTRLPQGFKNSPTLFNEALHRDLTDFRTQHPEVTLLQYVDDLLLAAPTKKACTQGTRHLLQELGEKGYRASAKKAQICQTKVTYLGYILSEGKRWLTPGRIETVARIPPPRNPREVREFLGKAGFCRLFIPGFAELAAPLYALTKPSTPFTWQTEHQLAFEALKKALLSAPALGLPDTSKPFTLFLDERQGIAKGVLTQKLGPWKRPVAYLSKKLDPVAAGWPPCLRIMAATAMLVKDSAKLTLGQPLTVITPHTLEAIVRQPPDRWITNARLTHYQALLLDTDRVQFGPPVTLNPATLLPVPENQPSPHDCRQVLAETHGTREDLKDQELPDADHTWYTDGSSYLDSGTRRAGAAVVDGHNTIWAQSLPPGTSAQKAELIALTKALELSKGKKANIYTDSRYAFATAHTHGSIYERRGWLTSEGKEIKNKAEIIALLKALFLPQEVAIIHCPGHQKGQDPVAVGNRQADRVARQAAMAEVLTLATEPDNTSHITAGKRTADGSEFEKRTADGSEFESPKKKAKVE

SEQ ID NO: 2037 - protein, 2102 aa, synthetic construct
MPAAKRVKLDGGDKKYSIGLDIGTNSVGWAVITDEYKVPSKKFKVLGNTDRHSIKKNLIGALLFDSGETAEATRLKRTARRRYTRRKNRICYLQEIFSNEMAKVDDSFFHRLEESFLVEEDKKHERHPIFGNIVDEVAYHEKYPTIYHLRKKLVDSTDKADLRLIYLALAHMIKFRGHFLIEGDLNPDNSDVDKLFIQLVQTYNQLFEENPINASGVDAKAILSARLSKSRRLENLIAQLPGEKKNGLFGNLIALSLGLTPNFKSNFDLAEDAKLQLSKDTYDDDLDNLLAQIGDQYADLFLAAKNLSDAILLSDILRVNTEITKAPLSASMIKRYDEHHQDLTLLKALVRQQLPEKYKEIFFDQSKNGYAGYIDGGASQEEFYKFIKPILEKMDGTEELLVKLNREDLLRKQRTFDNGSIPHQIHLGELHAILRRQEDFYPFLKDNREKIEKILTFRIPYYVGPLARGNSRFAWMTRKSEETITPWNFEEVVDKGASAQSFIERMTNFDKNLPNEKVLPKHSLLYEYFTVYNELTKVKYVTEGMRKPAFLSGEQKKAIVDLLFKTNRKVTVKQLKEDYFKKIECFDSVEISGVEDRFNASLGTYHDLLKIIKDKDFLDNEENEDILEDIVLTLTLFEDREMIEERLKTYAHLFDDKVMKQLKRRRYTGWGRLSRKLINGIRDKQSGKTILDFLKSDGFANRNFMQLIHDDSLTFKEDIQKAQVSGQGDSLHEHIANLAGSPAIKKGILQTVKVVDELVKVMGRHKPENIVIEMARENQTTQKGQKNSRERMKRIEEGIKELGSQILKEHPVENTQLQNEKLYLYYLQNGRDMYVDQELDINRLSDYDVDHIVPQSFLKDDSIDNKVLTRSDKARGKSDNVPSEEVVKKMKNYWRQLLNAKLITQRKFDNLTKAERGGLSELDKAGFIKRQLVETRQITKHVAQILDSRMNTKYDENDKLIREVKVITLKSKLVSDFRKDFQFYKVREINNYHHAHDAYLNAVVGTALIKKYPKLESEFVYGDYKVYDVRKMIAKSEQEIGKATAKYFFYSNIMNFFKTEITLANGEIRKRPLIETNGETGEIVWDKGRDFATVRKVLSMPQVNIVKKTEVQTGGFSKESILPKRNSDKLIARKKDWDPKKYGGFDSPTVAYSVLVVAKVEKGKSKKLKSVKELLGITIMERSSFEKNPIDFLEAKGYKEVKKDLIIKLPKYSLFELENGRKRMLASAGELQKGNELALPSKYVNFLYLASHYEKLKGSPEDNEQKQLFVEQHKHYLDEIIEQISEFSKRVILADANLDKVLSAYNKHRDKPIREQAENIIHLFTLTNLGAPAAFKYFDTTIDRKRYTSTKEVLDATLIHQSITGLYETRIDLSQLGGDGGGSSEAAAKPAPGGTVSLQDEHRLFDIPVTTSLPDVWLQDFPQAWAETGGLGRAKCQAPIIIDLKPTAVPVSIKQYPMSLEAHMGIRQHIIKFLELGVLRPCRSPWNTPLLPVKKPGTQDYRPVQDLREINKRTVDIHPTVPNPYNLLSTLKPDYSWYTVLDLKDAFFCLPLAPQSQELFAFEWKDPERGISGQLTWTRLPQGFKNSPTLFNEALHRDLTDFRTQHPEVTLLQYVDDLLLAAPTKKACTQGTRHLLQELGEKGYRASAKKAQICQTKVTYLGYILSEGKRWLTPGRIETVARIPPPRNPREVREFLGKAGFCRLFIPGFAELAAPLYALTKPSTPFTWQTEHQLAFEALKKALLSAPALGLPDTSKPFTLFLDERQGIAKGVLTQKLGPWKRPVAYLSKKLDPVAAGWPPCLRIMAATAMLVKDSAKLTLGQPLTVITPHTLEAIVRQPPDRWITNARLTHYQALLLDTDRVQFGPPVTLNPATLLPVPENQPSPHDCRQVLAETHGTREDLKDQELPDADHTWYTDGSSYLDSGTRRAGAAVVDGHNTIWAQSLPPGTSAQKAELIALTKALELSKGKKANIYTDSRYAFATAHTHGSIYERRGWLTSEGKEIKNKAEIIALLKALFLPQEVAIIHCPGHQKGQDPVAVGNRQADRVARQAAMAEVLTLATEPDNTSHITAGKRTADGSEFEKRTADGSEFESPKKKAKVE

SEQ ID NO: 2038 - protein, 2100 aa, synthetic construct
MPAAKRVKLDGGDKKYSIGLDIGTNSVGWAVITDEYKVPSKKFKVLGNTDRHSIKKNLIGALLFDSGETAEATRLKRTARRRYTRRKNRICYLQEIFSNEMAKVDDSFFHRLEESFLVEEDKKHERHPIFGNIVDEVAYHEKYPTIYHLRKKLVDSTDKADLRLIYLALAHMIKFRGHFLIEGDLNPDNSDVDKLFIQLVQTYNQLFEENPINASGVDAKAILSARLSKSRRLENLIAQLPGEKKNGLFGNLIALSLGLTPNFKSNFDLAEDAKLQLSKDTYDDDLDNLLAQIGDQYADLFLAAKNLSDAILLSDILRVNTEITKAPLSASMIKRYDEHHQDLTLLKALVRQQLPEKYKEIFFDQSKNGYAGYIDGGASQEEFYKFIKPILEKMDGTEELLVKLNREDLLRKQRTFDNGSIPHQIHLGELHAILRRQEDFYPFLKDNREKIEKILTFRIPYYVGPLARGNSRFAWMTRKSEETITPWNFEEVVDKGASAQSFIERMTNFDKNLPNEKVLPKHSLLYEYFTVYNELTKVKYVTEGMRKPAFLSGEQKKAIVDLLFKTNRKVTVKQLKEDYFKKIECFDSVEISGVEDRFNASLGTYHDLLKIIKDKDFLDNEENEDILEDIVLTLTLFEDREMIEERLKTYAHLFDDKVMKQLKRRRYTGWGRLSRKLINGIRDKQSGKTILDFLKSDGFANRNFMQLIHDDSLTFKEDIQKAQVSGQGDSLHEHIANLAGSPAIKKGILQTVKVVDELVKVMGRHKPENIVIEMARENQTTQKGQKNSRERMKRIEEGIKELGSQILKEHPVENTQLQNEKLYLYYLQNGRDMYVDQELDINRLSDYDVDHIVPQSFLKDDSIDNKVLTRSDKARGKSDNVPSEEVVKKMKNYWRQLLNAKLITQRKFDNLTKAERGGLSELDKAGFIKRQLVETRQITKHVAQILDSRMNTKYDENDKLIREVKVITLKSKLVSDFRKDFQFYKVREINNYHHAHDAYLNAVVGTALIKKYPKLESEFVYGDYKVYDVRKMIAKSEQEIGKATAKYFFYSNIMNFFKTEITLANGEIRKRPLIETNGETGEIVWDKGRDFATVRKVLSMPQVNIVKKTEVQTGGFSKESILPKRNSDKLIARKKDWDPKKYGGFDSPTVAYSVLVVAKVEKGKSKKLKSVKELLGITIMERSSFEKNPIDFLEAKGYKEVKKDLIIKLPKYSLFELENGRKRMLASAGELQKGNELALPSKYVNFLYLASHYEKLKGSPEDNEQKQLFVEQHKHYLDEIIEQISEFSKRVILADANLDKVLSAYNKHRDKPIREQAENIIHLFTLTNLGAPAAFKYFDTTIDRKRYTSTKEVLDATLIHQSITGLYETRIDLSQLGGDGGGGSGGGGSSGGTVSLQDEHRLFDIPVTTSLPDVWLQDFPQAWAETGGLGRAKCQAPIIIDLKPTAVPVSIKQYPMSLEAHMGIRQHIIKFLELGVLRPCRSPWNTPLLPVKKPGTQDYRPVQDLREINKRTVDIHPTVPNPYNLLSTLKPDYSWYTVLDLKDAFFCLPLAPQSQELFAFEWKDPERGISGQLTWTRLPQGFKNSPTLFNEALHRDLTDFRTQHPEVTLLQYVDDLLLAAPTKKACTQGTRHLLQELGEKGYRASAKKAQICQTKVTYLGYILSEGKRWLTPGRIETVARIPPPRNPREVREFLGKAGFCRLFIPGFAELAAPLYALTKPSTPFTWQTEHQLAFEALKKALLSAPALGLPDTSKPFTLFLDERQGIAKGVLTQKLGPWKRPVAYLSKKLDPVAAGWPPCLRIMAATAMLVKDSAKLTLGQPLTVITPHTLEAIVRQPPDRWITNARLTHYQALLLDTDRVQFGPPVTLNPATLLPVPENQPSPHDCRQVLAETHGTREDLKDQELPDADHTWYTDGSSYLDSGTRRAGAAVVDGHNTIWAQSLPPGTSAQKAELIALTKALELSKGKKANIYTDSRYAFATAHTHGSIYERRGWLTSEGKEIKNKAEIIALLKALFLPQEVAIIHCPGHQKGQDPVAVGNRQADRVARQAAMAEVLTLATEPDNTSHITAGKRTADGSEFEKRTADGSEFESPKKKAKVE

SEQ ID NO: 2039 - protein, 2102 aa, synthetic construct
MPAAKRVKLDGGDKKYSIGLDIGTNSVGWAVITDEYKVPSKKFKVLGNTDRHSIKKNLIGALLFDSGETAEATRLKRTARRRYTRRKNRICYLQEIFSNEMAKVDDSFFHRLEESFLVEEDKKHERHPIFGNIVDEVAYHEKYPTIYHLRKKLVDSTDKADLRLIYLALAHMIKFRGHFLIEGDLNPDNSDVDKLFIQLVQTYNQLFEENPINASGVDAKAILSARLSKSRRLENLIAQLPGEKKNGLFGNLIALSLGLTPNFKSNFDLAEDAKLQLSKDTYDDDLDNLLAQIGDQYADLFLAAKNLSDAILLSDILRVNTEITKAPLSASMIKRYDEHHQDLTLLKALVRQQLPEKYKEIFFDQSKNGYAGYIDGGASQEEFYKFIKPILEKMDGTEELLVKLNREDLLRKQRTFDNGSIPHQIHLGELHAILRRQEDFYPFLKDNREKIEKILTFRIPYYVGPLARGNSRFAWMTRKSEETITPWNFEEVVDKGASAQSFIERMTNFDKNLPNEKVLPKHSLLYEYFTVYNELTKVKYVTEGMRKPAFLSGEQKKAIVDLLFKTNRKVTVKQLKEDYFKKIECFDSVEISGVEDRFNASLGTYHDLLKIIKDKDFLDNEENEDILEDIVLTLTLFEDREMIEERLKTYAHLFDDKVMKQLKRRRYTGWGRLSRKLINGIRDKQSGKTILDFLKSDGFANRNFMQLIHDDSLTFKEDIQKAQVSGQGDSLHEHIANLAGSPAIKKGILQTVKVVDELVKVMGRHKPENIVIEMARENQTTQKGQKNSRERMKRIEEGIKELGSQILKEHPVENTQLQNEKLYLYYLQNGRDMYVDQELDINRLSDYDVDHIVPQSFLKDDSIDNKVLTRSDKARGKSDNVPSEEVVKKMKNYWRQLLNAKLITQRKFDNLTKAERGGLSELDKAGFIKRQLVETRQITKHVAQILDSRMNTKYDENDKLIREVKVITLKSKLVSDFRKDFQFYKVREINNYHHAHDAYLNAVVGTALIKKYPKLESEFVYGDYKVYDVRKMIAKSEQEIGKATAKYFFYSNIMNFFKTEITLANGEIRKRPLIETNGETGEIVWDKGRDFATVRKVLSMPQVNIVKKTEVQTGGFSKESILPKRNSDKLIARKKDWDPKKYGGFDSPTVAYSVLVVAKVEKGKSKKLKSVKELLGITIMERSSFEKNPIDFLEAKGYKEVKKDLIIKLPKYSLFELENGRKRMLASAGELQKGNELALPSKYVNFLYLASHYEKLKGSPEDNEQKQLFVEQHKHYLDEIIEQISEFSKRVILADANLDKVLSAYNKHRDKPIREQAENIIHLFTLTNLGAPAAFKYFDTTIDRKRYTSTKEVLDATLIHQSITGLYETRIDLSQLGGDGGEAAAKGSSPAPGGTVSLQDEHRLFDIPVTTSLPDVWLQDFPQAWAETGGLGRAKCQAPIIIDLKPTAVPVSIKQYPMSLEAHMGIRQHIIKFLELGVLRPCRSPWNTPLLPVKKPGTQDYRPVQDLREINKRTVDIHPTVPNPYNLLSTLKPDYSWYTVLDLKDAFFCLPLAPQSQELFAFEWKDPERGISGQLTWTRLPQGFKNSPTLFNEALHRDLTDFRTQHPEVTLLQYVDDLLLAAPTKKACTQGTRHLLQELGEKGYRASAKKAQICQTKVTYLGYILSEGKRWLTPGRIETVARIPPPRNPREVREFLGKAGFCRLFIPGFAELAAPLYALTKPSTPFTWQTEHQLAFEALKKALLSAPALGLPDTSKPFTLFLDERQGIAKGVLTQKLGPWKRPVAYLSKKLDPVAAGWPPCLRIMAATAMLVKDSAKLTLGQPLTVITPHTLEAIVRQPPDRWITNARLTHYQALLLDTDRVQFGPPVTLNPATLLPVPENQPSPHDCRQVLAETHGTREDLKDQELPDADHTWYTDGSSYLDSGTRRAGAAVVDGHNTIWAQSLPPGTSAQKAELIALTKALELSKGKKANIYTDSRYAFATAHTHGSIYERRGWLTSEGKEIKNKAEIIALLKALFLPQEVAIIHCPGHQKGQDPVAVGNRQADRVARQAAMAEVLTLATEPDNTSHITAGKRTADGSEFEKRTADGSEFESPKKKAKVE

SEQ ID NO: 2040 - protein, 2102 aa, synthetic construct
MPAAKRVKLDGGDKKYSIGLDIGTNSVGWAVITDEYKVPSKKFKVLGNTDRHSIKKNLIGALLFDSGETAEATRLKRTARRRYTRRKNRICYLQEIFSNEMAKVDDSFFHRLEESFLVEEDKKHERHPIFGNIVDEVAYHEKYPTIYHLRKKLVDSTDKADLRLIYLALAHMIKFRGHFLIEGDLNPDNSDVDKLFIQLVQTYNQLFEENPINASGVDAKAILSARLSKSRRLENLIAQLPGEKKNGLFGNLIALSLGLTPNFKSNFDLAEDAKLQLSKDTYDDDLDNLLAQIGDQYADLFLAAKNLSDAILLSDILRVNTEITKAPLSASMIKRYDEHHQDLTLLKALVRQQLPEKYKEIFFDQSKNGYAGYIDGGASQEEFYKFIKPILEKMDGTEELLVKLNREDLLRKQRTFDNGSIPHQIHLGELHAILRRQEDFYPFLKDNREKIEKILTFRIPYYVGPLARGNSRFAWMTRKSEETITPWNFEEVVDKGASAQSFIERMTNFDKNLPNEKVLPKHSLLYEYFTVYNELTKVKYVTEGMRKPAFLSGEQKKAIVDLLFKTNRKVTVKQLKEDYFKKIECFDSVEISGVEDRFNASLGTYHDLLKIIKDKDFLDNEENEDILEDIVLTLTLFEDREMIEERLKTYAHLFDDKVMKQLKRRRYTGWGRLSRKLINGIRDKQSGKTILDFLKSDGFANRNFMQLIHDDSLTFKEDIQKAQVSGQGDSLHEHIANLAGSPAIKKGILQTVKVVDELVKVMGRHKPENIVIEMARENQTTQKGQKNSRERMKRIEEGIKELGSQILKEHPVENTQLQNEKLYLYYLQNGRDMYVDQELDINRLSDYDVDHIVPQSFLKDDSIDNKVLTRSDKARGKSDNVPSEEVVKKMKNYWRQLLNAKLITQRKFDNLTKAERGGLSELDKAGFIKRQLVETRQITKHVAQILDSRMNTKYDENDKLIREVKVITLKSKLVSDFRKDFQFYKVREINNYHHAHDAYLNAVVGTALIKKYPKLESEFVYGDYKVYDVRKMIAKSEQEIGKATAKYFFYSNIMNFFKTEITLANGEIRKRPLIETNGETGEIVWDKGRDFATVRKVLSMPQVNIVKKTEVQTGGFSKESILPKRNSDKLIARKKDWDPKKYGGFDSPTVAYSVLVVAKVEKGKSKKLKSVKELLGITIMERSSFEKNPIDFLEAKGYKEVKKDLIIKLPKYSLFELENGRKRMLASAGELQKGNELALPSKYVNFLYLASHYEKLKGSPEDNEQKQLFVEQHKHYLDEIIEQISEFSKRVILADANLDKVLSAYNKHRDKPIREQAENIIHLFTLTNLGAPAAFKYFDTTIDRKRYTSTKEVLDATLIHQSITGLYETRIDLSQLGGDGGPAPEAAAKGSSGGTVSLQDEHRLFDIPVTTSLPDVWLQDFPQAWAETGGLGRAKCQAPIIIDLKPTAVPVSIKQYPMSLEAHMGIRQHIIKFLELGVLRPCRSPWNTPLLPVKKPGTQDYRPVQDLREINKRTVDIHPTVPNPYNLLSTLKPDYSWYTVLDLKDAFFCLPLAPQSQELFAFEWKDPERGISGQLTWTRLPQGFKNSPTLFNEALHRDLTDFRTQHPEVTLLQYVDDLLLAAPTKKACTQGTRHLLQELGEKGYRASAKKAQICQTKVTYLGYILSEGKRWLTPGRIETVARIPPPRNPREVREFLGKAGFCRLFIPGFAELAAPLYALTKPSTPFTWQTEHQLAFEALKKALLSAPALGLPDTSKPFTLFLDERQGIAKGVLTQKLGPWKRPVAYLSKKLDPVAAGWPPCLRIMAATAMLVKDSAKLTLGQPLTVITPHTLEAIVRQPPDRWITNARLTHYQALLLDTDRVQFGPPVTLNPATLLPVPENQPSPHDCRQVLAETHGTREDLKDQELPDADHTWYTDGSSYLDSGTRRAGAAVVDGHNTIWAQSLPPGTSAQKAELIALTKALELSKGKKANIYTDSRYAFATAHTHGSIYERRGWLTSEGKEIKNKAEIIALLKALFLPQEVAIIHCPGHQKGQDPVAVGNRQADRVARQAAMAEVLTLATEPDNTSHITAGKRTADGSEFEKRTADGSEFESPKKKAKVE

SEQ ID NO: 2041 - protein, 2102 aa, synthetic construct
MPAAKRVKLDGGDKKYSIGLDIGTNSVGWAVITDEYKVPSKKFKVLGNTDRHSIKKNLIGALLFDSGETAEATRLKRTARRRYTRRKNRICYLQEIFSNEMAKVDDSFFHRLEESFLVEEDKKHERHPIFGNIVDEVAYHEKYPTIYHLRKKLVDSTDKADLRLIYLALAHMIKFRGHFLIEGDLNPDNSDVDKLFIQLVQTYNQLFEENPINASGVDAKAILSARLSKSRRLENLIAQLPGEKKNGLFGNLIALSLGLTPNFKSNFDLAEDAKLQLSKDTYDDDLDNLLAQIGDQYADLFLAAKNLSDAILLSDILRVNTEITKAPLSASMIKRYDEHHQDLTLLKALVRQQLPEKYKEIFFDQSKNGYAGYIDGGASQEEFYKFIKPILEKMDGTEELLVKLNREDLLRKQRTFDNGSIPHQIHLGELHAILRRQEDFYPFLKDNREKIEKILTFRIPYYVGPLARGNSRFAWMTRKSEETITPWNFEEVVDKGASAQSFIERMTNFDKNLPNEKVLPKHSLLYEYFTVYNELTKVKYVTEGMRKPAFLSGEQKKAIVDLLFKTNRKVTVKQLKEDYFKKIECFDSVEISGVEDRFNASLGTYHDLLKIIKDKDFLDNEENEDILEDIVLTLTLFEDREMIEERLKTYAHLFDDKVMKQLKRRRYTGWGRLSRKLINGIRDKQSGKTILDFLKSDGFANRNFMQLIHDDSLTFKEDIQKAQVSGQGDSLHEHIANLAGSPAIKKGILQTVKVVDELVKVMGRHKPENIVIEMARENQTTQKGQKNSRERMKRIEEGIKELGSQILKEHPVENTQLQNEKLYLYYLQNGRDMYVDQELDINRLSDYDVDHIVPQSFLKDDSIDNKVLTRSDKARGKSDNVPSEEVVKKMKNYWRQLLNAKLITQRKFDNLTKAERGGLSELDKAGFIKRQLVETRQITKHVAQILDSRMNTKYDENDKLIREVKVITLKSKLVSDFRKDFQFYKVREINNYHHAHDAYLNAVVGTALIKKYPKLESEFVYGDYKVYDVRKMIAKSEQEIGKATAKYFFYSNIMNFFKTEITLANGEIRKRPLIETNGETGEIVWDKGRDFATVRKVLSMPQVNIVKKTEVQTGGFSKESILPKRNSDKLIARKKDWDPKKYGGFDSPTVAYSVLVVAKVEKGKSKKLKSVKELLGITIMERSSFEKNPIDFLEAKGYKEVKKDLIIKLPKYSLFELENGRKRMLASAGELQKGNELALPSKYVNFLYLASHYEKLKGSPEDNEQKQLFVEQHKHYLDEIIEQISEFSKRVILADANLDKVLSAYNKHRDKPIREQAENIIHLFTLTNLGAPAAFKYFDTTIDRKRYTSTKEVLDATLIHQSITGLYETRIDLSQLGGDGGEAAAKGGGPAPGGTVSLQDEHRLFDIPVTTSLPDVWLQDFPQAWAETGGLGRAKCQAPIIIDLKPTAVPVSIKQYPMSLEAHMGIRQHIIKFLELGVLRPCRSPWNTPLLPVKKPGTQDYRPVQDLREINKRTVDIHPTVPNPYNLLSTLKPDYSWYTVLDLKDAFFCLPLAPQSQELFAFEWKDPERGISGQLTWTRLPQGFKNSPTLFNEALHRDLTDFRTQHPEVTLLQYVDDLLLAAPTKKACTQGTRHLLQELGEKGYRASAKKAQICQTKVTYLGYILSEGKRWLTPGRIETVARIPPPRNPREVREFLGKAGFCRLFIPGFAELAAPLYALTKPSTPFTWQTEHQLAFEALKKALLSAPALGLPDTSKPFTLFLDERQGIAKGVLTQKLGPWKRPVAYLSKKLDPVAAGWPPCLRIMAATAMLVKDSAKLTLGQPLTVITPHTLEAIVRQPPDRWITNARLTHYQALLLDTDRVQFGPPVTLNPATLLPVPENQPSPHDCRQVLAETHGTREDLKDQELPDADHTWYTDGSSYLDSGTRRAGAAVVDGHNTIWAQSLPPGTSAQKAELIALTKALELSKGKKANIYTDSRYAFATAHTHGSIYERRGWLTSEGKEIKNKAEIIALLKALFLPQEVAIIHCPGHQKGQDPVAVGNRQADRVARQAAMAEVLTLATEPDNTSHITAGKRTADGSEFEKRTADGSEFESPKKKAKVE

SEQ ID NO: 2042 - protein, 2100 aa, synthetic construct
MPAAKRVKLDGGDKKYSIGLDIGTNSVGWAVITDEYKVPSKKFKVLGNTDRHSIKKNLIGALLFDSGETAEATRLKRTARRRYTRRKNRICYLQEIFSNEMAKVDDSFFHRLEESFLVEEDKKHERHPIFGNIVDEVAYHEKYPTIYHLRKKLVDSTDKADLRLIYLALAHMIKFRGHFLIEGDLNPDNSDVDKLFIQLVQTYNQLFEENPINASGVDAKAILSARLSKSRRLENLIAQLPGEKKNGLFGNLIALSLGLTPNFKSNFDLAEDAKLQLSKDTYDDDLDNLLAQIGDQYADLFLAAKNLSDAILLSDILRVNTEITKAPLSASMIKRYDEHHQDLTLLKALVRQQLPEKYKEIFFDQSKNGYAGYIDGGASQEEFYKFIKPILEKMDGTEELLVKLNREDLLRKQRTFDNGSIPHQIHLGELHAILRRQEDFYPFLKDNREKIEKILTFRIPYYVGPLARGNSRFAWMTRKSEETITPWNFEEVVDKGASAQSFIERMTNFDKNLPNEKVLPKHSLLYEYFTVYNELTKVKYVTEGMRKPAFLSGEQKKAIVDLLFKTNRKVTVKQLKEDYFKKIECFDSVEISGVEDRFNASLGTYHDLLKIIKDKDFLDNEENEDILEDIVLTLTLFEDREMIEERLKTYAHLFDDKVMKQLKRRRYTGWGRLSRKLINGIRDKQSGKTILDFLKSDGFANRNFMQLIHDDSLTFKEDIQKAQVSGQGDSLHEHIANLAGSPAIKKGILQTVKVVDELVKVMGRHKPENIVIEMARENQTTQKGQKNSRERMKRIEEGIKELGSQILKEHPVENTQLQNEKLYLYYLQNGRDMYVDQELDINRLSDYDVDHIVPQSFLKDDSIDNKVLTRSDKARGKSDNVPSEEVVKKMKNYWRQLLNAKLITQRKFDNLTKAERGGLSELDKAGFIKRQLVETRQITKHVAQILDSRMNTKYDENDKLIREVKVITLKSKLVSDFRKDFQFYKVREINNYHHAHDAYLNAVVGTALIKKYPKLESEFVYGDYKVYDVRKMIAKSEQEIGKATAKYFFYSNIMNFFKTEITLANGEIRKRPLIETNGETGEIVWDKGRDFATVRKVLSMPQVNIVKKTEVQTGGFSKESILPKRNSDKLIARKKDWDPKKYGGFDSPTVAYSVLVVAKVEKGKSKKLKSVKELLGITIMERSSFEKNPIDFLEAKGYKEVKKDLIIKLPKYSLFELENGRKRMLASAGELQKGNELALPSKYVNFLYLASHYEKLKGSPEDNEQKQLFVEQHKHYLDEIIEQISEFSKRVILADANLDKVLSAYNKHRDKPIREQAENIIHLFTLTNLGAPAAFKYFDTTIDRKRYTSTKEVLDATLIHQSITGLYETRIDLSQLGGDGGGSSGSSGSSGGTVSLQDEHRLFDIPVTTSLPDVWLQDFPQAWAETGGLGRAKCQAPIIIDLKPTAVPVSIKQYPMSLEAHMGIRQHIIKFLELGVLRPCRSPWNTPLLPVKKPGTQDYRPVQDLREINKRTVDIHPTVPNPYNLLSTLKPDYSWYTVLDLKDAFFCLPLAPQSQELFAFEWKDPERGISGQLTWTRLPQGFKNSPTLFNEALHRDLTDFRTQHPEVTLLQYVDDLLLAAPTKKACTQGTRHLLQELGEKGYRASAKKAQICQTKVTYLGYILSEGKRWLTPGRIETVARIPPPRNPREVREFLGKAGFCRLFIPGFAELAAPLYALTKPSTPFTWQTEHQLAFEALKKALLSAPALGLPDTSKPFTLFLDERQGIAKGVLTQKLGPWKRPVAYLSKKLDPVAAGWPPCLRIMAATAMLVKDSAKLTLGQPLTVITPHTLEAIVRQPPDRWITNARLTHYQALLLDTDRVQFGPPVTLNPATLLPVPENQPSPHDCRQVLAETHGTREDLKDQELPDADHTWYTDGSSYLDSGTRRAGAAVVDGHNTIWAQSLPPGTSAQKAELIALTKALELSKGKKANIYTDSRYAFATAHTHGSIYERRGWLTSEGKEIKNKAEIIALLKALFLPQEVAIIHCPGHQKGQDPVAVGNRQADRVARQAAMAEVLTLATEPDNTSHITAGKRTADGSEFEKRTADGSEFESPKKKAKVE

SEQ ID NO: 2043 - protein, 2106 aa, synthetic construct
MPAAKRVKLDGGDKKYSIGLDIGTNSVGWAVITDEYKVPSKKFKVLGNTDRHSIKKNLIGALLFDSGETAEATRLKRTARRRYTRRKNRICYLQEIFSNEMAKVDDSFFHRLEESFLVEEDKKHERHPIFGNIVDEVAYHEKYPTIYHLRKKLVDSTDKADLRLIYLALAHMIKFRGHFLIEGDLNPDNSDVDKLFIQLVQTYNQLFEENPINASGVDAKAILSARLSKSRRLENLIAQLPGEKKNGLFGNLIALSLGLTPNFKSNFDLAEDAKLQLSKDTYDDDLDNLLAQIGDQYADLFLAAKNLSDAILLSDILRVNTEITKAPLSASMIKRYDEHHQDLTLLKALVRQQLPEKYKEIFFDQSKNGYAGYIDGGASQEEFYKFIKPILEKMDGTEELLVKLNREDLLRKQRTFDNGSIPHQIHLGELHAILRRQEDFYPFLKDNREKIEKILTFRIPYYVGPLARGNSRFAWMTRKSEETITPWNFEEVVDKGASAQSFIERMTNFDKNLPNEKVLPKHSLLYEYFTVYNELTKVKYVTEGMRKPAFLSGEQKKAIVDLLFKTNRKVTVKQLKEDYFKKIECFDSVEISGVEDRFNASLGTYHDLLKIIKDKDFLDNEENEDILEDIVLTLTLFEDREMIEERLKTYAHLFDDKVMKQLKRRRYTGWGRLSRKLINGIRDKQSGKTILDFLKSDGFANRNFMQLIHDDSLTFKEDIQKAQVSGQGDSLHEHIANLAGSPAIKKGILQTVKVVDELVKVMGRHKPENIVIEMARENQTTQKGQKNSRERMKRIEEGIKELGSQILKEHPVENTQLQNEKLYLYYLQNGRDMYVDQELDINRLSDYDVDHIVPQSFLKDDSIDNKVLTRSDKARGKSDNVPSEEVVKKMKNYWRQLLNAKLITQRKFDNLTKAERGGLSELDKAGFIKRQLVETRQITKHVAQILDSRMNTKYDENDKLIREVKVITLKSKLVSDFRKDFQFYKVREINNYHHAHDAYLNAVVGTALIKKYPKLESEFVYGDYKVYDVRKMIAKSEQEIGKATAKYFFYSNIMNFFKTEITLANGEIRKRPLIETNGETGEIVWDKGRDFATVRKVLSMPQVNIVKKTEVQTGGFSKESILPKRNSDKLIARKKDWDPKKYGGFDSPTVAYSVLVVAKVEKGKSKKLKSVKELLGITIMERSSFEKNPIDFLEAKGYKEVKKDLIIKLPKYSLFELENGRKRMLASAGELQKGNELALPSKYVNFLYLASHYEKLKGSPEDNEQKQLFVEQHKHYLDEIIEQISEFSKRVILADANLDKVLSAYNKHRDKPIREQAENIIHLFTLTNLGAPAAFKYFDTTIDRKRYTSTKEVLDATLIHQSITGLYETRIDLSQLGGDGGEAAAKEAAAKEAAAKGGTVSLQDEHRLFDIPVTTSLPDVWLQDFPQAWAETGGLGRAKCQAPIIIDLKPTAVPVSIKQYPMSLEAHMGIRQHIIKFLELGVLRPCRSPWNTPLLPVKKPGTQDYRPVQDLREINKRTVDIHPTVPNPYNLLSTLKPDYSWYTVLDLKDAFFCLPLAPQSQELFAFEWKDPERGISGQLTWTRLPQGFKNSPTLFNEALHRDLTDFRTQHPEVTLLQYVDDLLLAAPTKKACTQGTRHLLQELGEKGYRASAKKAQICQTKVTYLGYILSEGKRWLTPGRIETVARIPPPRNPREVREFLGKAGFCRLFIPGFAELAAPLYALTKPSTPFTWQTEHQLAFEALKKALLSAPALGLPDTSKPFTLFLDERQGIAKGVLTQKLGPWKRPVAYLSKKLDPVAAGWPPCLRIMAATAMLVKDSAKLTLGQPLTVITPHTLEAIVRQPPDRWITNARLTHYQALLLDTDRVQFGPPVTLNPATLLPVPENQPSPHDCRQVLAETHGTREDLKDQELPDADHTWYTDGSSYLDSGTRRAGAAVVDGHNTIWAQSLPPGTSAQKAELIALTKALELSKGKKANIYTDSRYAFATAHTHGSIYERRGWLTSEGKEIKNKAEIIALLKALFLPQEVAIIHCPGHQKGQDPVAVGNRQADRVARQAAMAEVLTLATEPDNTSHITAGKRTADGSEFEKRTADGSEFESPKKKAKVE

SEQ ID NO: 2044 - protein, 2102 aa, synthetic construct
MPAAKRVKLDGGDKKYSIGLDIGTNSVGWAVITDEYKVPSKKFKVLGNTDRHSIKKNLIGALLFDSGETAEATRLKRTARRRYTRRKNRICYLQEIFSNEMAKVDDSFFHRLEESFLVEEDKKHERHPIFGNIVDEVAYHEKYPTIYHLRKKLVDSTDKADLRLIYLALAHMIKFRGHFLIEGDLNPDNSDVDKLFIQLVQTYNQLFEENPINASGVDAKAILSARLSKSRRLENLIAQLPGEKKNGLFGNLIALSLGLTPNFKSNFDLAEDAKLQLSKDTYDDDLDNLLAQIGDQYADLFLAAKNLSDAILLSDILRVNTEITKAPLSASMIKRYDEHHQDLTLLKALVRQQLPEKYKEIFFDQSKNGYAGYIDGGASQEEFYKFIKPILEKMDGTEELLVKLNREDLLRKQRTFDNGSIPHQIHLGELHAILRRQEDFYPFLKDNREKIEKILTFRIPYYVGPLARGNSRFAWMTRKSEETITPWNFEEVVDKGASAQSFIERMTNFDKNLPNEKVLPKHSLLYEYFTVYNELTKVKYVTEGMRKPAFLSGEQKKAIVDLLFKTNRKVTVKQLKEDYFKKIECFDSVEISGVEDRFNASLGTYHDLLKIIKDKDFLDNEENEDILEDIVLTLTLFEDREMIEERLKTYAHLFDDKVMKQLKRRRYTGWGRLSRKLINGIRDKQSGKTILDFLKSDGFANRNFMQLIHDDSLTFKEDIQKAQVSGQGDSLHEHIANLAGSPAIKKGILQTVKVVDELVKVMGRHKPENIVIEMARENQTTQKGQKNSRERMKRIEEGIKELGSQILKEHPVENTQLQNEKLYLYYLQNGRDMYVDQELDINRLSDYDVDHIVPQSFLKDDSIDNKVLTRSDKARGKSDNVPSEEVVKKMKNYWRQLLNAKLITQRKFDNLTKAERGGLSELDKAGFIKRQLVETRQITKHVAQILDSRMNTKYDENDKLIREVKVITLKSKLVSDFRKDFQFYKVREINNYHHAHDAYLNAVVGTALIKKYPKLESEFVYGDYKVYDVRKMIAKSEQEIGKATAKYFFYSNIMNFFKTEITLANGEIRKRPLIETNGETGEIVWDKGRDFATVRKVLSMPQVNIVKKTEVQTGGFSKESILPKRNSDKLIARKKDWDPKKYGGFDSPTVAYSVLVVAKVEKGKSKKLKSVKELLGITIMERSSFEKNPIDFLEAKGYKEVKKDLIIKLPKYSLFELENGRKRMLASAGELQKGNELALPSKYVNFLYLASHYEKLKGSPEDNEQKQLFVEQHKHYLDEIIEQISEFSKRVILADANLDKVLSAYNKHRDKPIREQAENIIHLFTLTNLGAPAAFKYFDTTIDRKRYTSTKEVLDATLIHQSITGLYETRIDLSQLGGDGGPAPEAAAKGGSGGTVSLQDEHRLFDIPVTTSLPDVWLQDFPQAWAETGGLGRAKCQAPIIIDLKPTAVPVSIKQYPMSLEAHMGIRQHIIKFLELGVLRPCRSPWNTPLLPVKKPGTQDYRPVQDLREINKRTVDIHPTVPNPYNLLSTLKPDYSWYTVLDLKDAFFCLPLAPQSQELFAFEWKDPERGISGQLTWTRLPQGFKNSPTLFNEALHRDLTDFRTQHPEVTLLQYVDDLLLAAPTKKACTQGTRHLLQELGEKGYRASAKKAQICQTKVTYLGYILSEGKRWLTPGRIETVARIPPPRNPREVREFLGKAGFCRLFIPGFAELAAPLYALTKPSTPFTWQTEHQLAFEALKKALLSAPALGLPDTSKPFTLFLDERQGIAKGVLTQKLGPWKRPVAYLSKKLDPVAAGWPPCLRIMAATAMLVKDSAKLTLGQPLTVITPHTLEAIVRQPPDRWITNARLTHYQALLLDTDRVQFGPPVTLNPATLLPVPENQPSPHDCRQVLAETHGTREDLKDQELPDADHTWYTDGSSYLDSGTRRAGAAVVDGHNTIWAQSLPPGTSAQKAELIALTKALELSKGKKANIYTDSRYAFATAHTHGSIYERRGWLTSEGKEIKNKAEIIALLKALFLPQEVAIIHCPGHQKGQDPVAVGNRQADRVARQAAMAEVLTLATEPDNTSHITAGKRTADGSEFEKRTADGSEFESPKKKAKVE

SEQ ID NO: 2045 - protein, 2124 aa, synthetic construct
MPAAKRVKLDGGDKKYSIGLDIGTNSVGWAVITDEYKVPSKKFKVLGNTDRHSIKKNLIGALLFDSGETAEATRLKRTARRRYTRRKNRICYLQEIFSNEMAKVDDSFFHRLEESFLVEEDKKHERHPIFGNIVDEVAYHEKYPTIYHLRKKLVDSTDKADLRLIYLALAHMIKFRGHFLIEGDLNPDNSDVDKLFIQLVQTYNQLFEENPINASGVDAKAILSARLSKSRRLENLIAQLPGEKKNGLFGNLIALSLGLTPNFKSNFDLAEDAKLQLSKDTYDDDLDNLLAQIGDQYADLFLAAKNLSDAILLSDILRVNTEITKAPLSASMIKRYDEHHQDLTLLKALVRQQLPEKYKEIFFDQSKNGYAGYIDGGASQEEFYKFIKPILEKMDGTEELLVKLNREDLLRKQRTFDNGSIPHQIHLGELHAILRRQEDFYPFLKDNREKIEKILTFRIPYYVGPLARGNSRFAWMTRKSEETITPWNFEEVVDKGASAQSFIERMTNFDKNLPNEKVLPKHSLLYEYFTVYNELTKVKYVTEGMRKPAFLSGEQKKAIVDLLFKTNRKVTVKQLKEDYFKKIECFDSVEISGVEDRFNASLGTYHDLLKIIKDKDFLDNEENEDILEDIVLTLTLFEDREMIEERLKTYAHLFDDKVMKQLKRRRYTGWGRLSRKLINGIRDKQSGKTILDFLKSDGFANRNFMQLIHDDSLTFKEDIQKAQVSGQGDSLHEHIANLAGSPAIKKGILQTVKVVDELVKVMGRHKPENIVIEMARENQTTQKGQKNSRERMKRIEEGIKELGSQILKEHPVENTQLQNEKLYLYYLQNGRDMYVDQELDINRLSDYDVDHIVPQSFLKDDSIDNKVLTRSDKARGKSDNVPSEEVVKKMKNYWRQLLNAKLITQRKFDNLTKAERGGLSELDKAGFIKRQLVETRQITKHVAQILDSRMNTKYDENDKLIREVKVITLKSKLVSDFRKDFQFYKVREINNYHHAHDAYLNAVVGTALIKKYPKLESEFVYGDYKVYDVRKMIAKSEQEIGKATAKYFFYSNIMNFFKTEITLANGEIRKRPLIETNGETGEIVWDKGRDFATVRKVLSMPQVNIVKKTEVQTGGFSKESILPKRNSDKLIARKKDWDPKKYGGFDSPTVAYSVLVVAKVEKGKSKKLKSVKELLGITIMERSSFEKNPIDFLEAKGYKEVKKDLIIKLPKYSLFELENGRKRMLASAGELQKGNELALPSKYVNFLYLASHYEKLKGSPEDNEQKQLFVEQHKHYLDEIIEQISEFSKRVILADANLDKVLSAYNKHRDKPIREQAENIIHLFTLTNLGAPAAFKYFDTTIDRKRYTSTKEVLDATLIHQSITGLYETRIDLSQLGGDGGSGGSSGGSSGSETPGTSESATPESSGGSSGGSSGGTVSLQDEHRLFDIPVTTSLPDVWLQDFPQAWAETGGLGRAKCQAPIIIDLKPTAVPVSIKQYPMSLEAHMGIRQHIIKFLELGVLRPCRSPWNTPLLPVKKPGTQDYRPVQDLREINKRTVDIHPTVPNPYNLLSTLKPDYSWYTVLDLKDAFFCLPLAPQSQELFAFEWKDPERGISGQLTWTRLPQGFKNSPTLFNEALHRDLTDFRTQHPEVTLLQYVDDLLLAAPTKKACTQGTRHLLQELGEKGYRASAKKAQICQTKVTYLGYILSEGKRWLTPGRIETVARIPPPRNPREVREFLGKAGFCRLFIPGFAELAAPLYALTKPSTPFTWQTEHQLAFEALKKALLSAPALGLPDTSKPFTLFLDERQGIAKGVLTQKLGPWKRPVAYLSKKLDPVAAGWPPCLRIMAATAMLVKDSAKLTLGQPLTVITPHTLEAIVRQPPDRWITNARLTHYQALLLDTDRVQFGPPVTLNPATLLPVPENQPSPHDCRQVLAETHGTREDLKDQELPDADHTWYTDGSSYLDSGTRRAGAAVVDGHNTIWAQSLPPGTSAQKAELIALTKALELSKGKKANIYTDSRYAFATAHTHGSIYERRGWLTSEGKEIKNKAEIIALLKALFLPQEVAIIHCPGHQKGQDPVAVGNRQADRVARQAAMAEVLTLATEPDNTSHITAGKRTADGSEFEKRTADGSEFESPKKKAKVE

SEQ ID NO: 2046 - protein, 2102 aa, synthetic construct
MPAAKRVKLDGGDKKYSIGLDIGTNSVGWAVITDEYKVPSKKFKVLGNTDRHSIKKNLIGALLFDSGETAEATRLKRTARRRYTRRKNRICYLQEIFSNEMAKVDDSFFHRLEESFLVEEDKKHERHPIFGNIVDEVAYHEKYPTIYHLRKKLVDSTDKADLRLIYLALAHMIKFRGHFLIEGDLNPDNSDVDKLFIQLVQTYNQLFEENPINASGVDAKAILSARLSKSRRLENLIAQLPGEKKNGLFGNLIALSLGLTPNFKSNFDLAEDAKLQLSKDTYDDDLDNLLAQIGDQYADLFLAAKNLSDAILLSDILRVNTEITKAPLSASMIKRYDEHHQDLTLLKALVRQQLPEKYKEIFFDQSKNGYAGYIDGGASQEEFYKFIKPILEKMDGTEELLVKLNREDLLRKQRTFDNGSIPHQIHLGELHAILRRQEDFYPFLKDNREKIEKILTFRIPYYVGPLARGNSRFAWMTRKSEETITPWNFEEVVDKGASAQSFIERMTNFDKNLPNEKVLPKHSLLYEYFTVYNELTKVKYVTEGMRKPAFLSGEQKKAIVDLLFKTNRKVTVKQLKEDYFKKIECFDSVEISGVEDRFNASLGTYHDLLKIIKDKDFLDNEENEDILEDIVLTLTLFEDREMIEERLKTYAHLFDDKVMKQLKRRRYTGWGRLSRKLINGIRDKQSGKTILDFLKSDGFANRNFMQLIHDDSLTFKEDIQKAQVSGQGDSLHEHIANLAGSPAIKKGILQTVKVVDELVKVMGRHKPENIVIEMARENQTTQKGQKNSRERMKRIEEGIKELGSQILKEHPVENTQLQNEKLYLYYLQNGRDMYVDQELDINRLSDYDVDHIVPQSFLKDDSIDNKVLTRSDKARGKSDNVPSEEVVKKMKNYWRQLLNAKLITQRKFDNLTKAERGGLSELDKAGFIKRQLVETRQITKHVAQILDSRMNTKYDENDKLIREVKVITLKSKLVSDFRKDFQFYKVREINNYHHAHDAYLNAVVGTALIKKYPKLESEFVYGDYKVYDVRKMIAKSEQEIGKATAKYFFYSNIMNFFKTEITLANGEIRKRPLIETNGETGEIVWDKGRDFATVRKVLSMPQVNIVKKTEVQTGGFSKESILPKRNSDKLIARKKDWDPKKYGGFDSPTVAYSVLVVAKVEKGKSKKLKSVKELLGITIMERSSFEKNPIDFLEAKGYKEVKKDLIIKLPKYSLFELENGRKRMLASAGELQKGNELALPSKYVNFLYLASHYEKLKGSPEDNEQKQLFVEQHKHYLDEIIEQISEFSKRVILADANLDKVLSAYNKHRDKPIREQAENIIHLFTLTNLGAPAAFKYFDTTIDRKRYTSTKEVLDATLIHQSITGLYETRIDLSQLGGDGGGGSEAAAKGSSGGTVSLQDEHRLFDIPVTTSLPDVWLQDFPQAWAETGGLGRAKCQAPIIIDLKPTAVPVSIKQYPMSLEAHMGIRQHIIKFLELGVLRPCRSPWNTPLLPVKKPGTQDYRPVQDLREINKRTVDIHPTVPNPYNLLSTLKPDYSWYTVLDLKDAFFCLPLAPQSQELFAFEWKDPERGISGQLTWTRLPQGFKNSPTLFNEALHRDLTDFRTQHPEVTLLQYVDDLLLAAPTKKACTQGTRHLLQELGEKGYRASAKKAQICQTKVTYLGYILSEGKRWLTPGRIETVARIPPPRNPREVREFLGKAGFCRLFIPGFAELAAPLYALTKPSTPFTWQTEHQLAFEALKKALLSAPALGLPDTSKPFTLFLDERQGIAKGVLTQKLGPWKRPVAYLSKKLDPVAAGWPPCLRIMAATAMLVKDSAKLTLGQPLTVITPHTLEAIVRQPPDRWITNARLTHYQALLLDTDRVQFGPPVTLNPATLLPVPENQPSPHDCRQVLAETHGTREDLKDQELPDADHTWYTDGSSYLDSGTRRAGAAVVDGHNTIWAQSLPPGTSAQKAELIALTKALELSKGKKANIYTDSRYAFATAHTHGSIYERRGWLTSEGKEIKNKAEIIALLKALFLPQEVAIIHCPGHQKGQDPVAVGNRQADRVARQAAMAEVLTLATEPDNTSHITAGKRTADGSEFEKRTADGSEFESPKKKAKVE

SEQ ID NO: 2047 - protein, 2097 aa, synthetic construct
MPAAKRVKLDGGDKKYSIGLDIGTNSVGWAVITDEYKVPSKKFKVLGNTDRHSIKKNLIGALLFDSGETAEATRLKRTARRRYTRRKNRICYLQEIFSNEMAKVDDSFFHRLEESFLVEEDKKHERHPIFGNIVDEVAYHEKYPTIYHLRKKLVDSTDKADLRLIYLALAHMIKFRGHFLIEGDLNPDNSDVDKLFIQLVQTYNQLFEENPINASGVDAKAILSARLSKSRRLENLIAQLPGEKKNGLFGNLIALSLGLTPNFKSNFDLAEDAKLQLSKDTYDDDLDNLLAQIGDQYADLFLAAKNLSDAILLSDILRVNTEITKAPLSASMIKRYDEHHQDLTLLKALVRQQLPEKYKEIFFDQSKNGYAGYIDGGASQEEFYKFIKPILEKMDGTEELLVKLNREDLLRKQRTFDNGSIPHQIHLGELHAILRRQEDFYPFLKDNREKIEKILTFRIPYYVGPLARGNSRFAWMTRKSEETITPWNFEEVVDKGASAQSFIERMTNFDKNLPNEKVLPKHSLLYEYFTVYNELTKVKYVTEGMRKPAFLSGEQKKAIVDLLFKTNRKVTVKQLKEDYFKKIECFDSVEISGVEDRFNASLGTYHDLLKIIKDKDFLDNEENEDILEDIVLTLTLFEDREMIEERLKTYAHLFDDKVMKQLKRRRYTGWGRLSRKLINGIRDKQSGKTILDFLKSDGFANRNFMQLIHDDSLTFKEDIQKAQVSGQGDSLHEHIANLAGSPAIKKGILQTVKVVDELVKVMGRHKPENIVIEMARENQTTQKGQKNSRERMKRIEEGIKELGSQILKEHPVENTQLQNEKLYLYYLQNGRDMYVDQELDINRLSDYDVDHIVPQSFLKDDSIDNKVLTRSDKARGKSDNVPSEEVVKKMKNYWRQLLNAKLITQRKFDNLTKAERGGLSELDKAGFIKRQLVETRQITKHVAQILDSRMNTKYDENDKLIREVKVITLKSKLVSDFRKDFQFYKVREINNYHHAHDAYLNAVVGTALIKKYPKLESEFVYGDYKVYDVRKMIAKSEQEIGKATAKYFFYSNIMNFFKTEITLANGEIRKRPLIETNGETGEIVWDKGRDFATVRKVLSMPQVNIVKKTEVQTGGFSKESILPKRNSDKLIARKKDWDPKKYGGFDSPTVAYSVLVVAKVEKGKSKKLKSVKELLGITIMERSSFEKNPIDFLEAKGYKEVKKDLIIKLPKYSLFELENGRKRMLASAGELQKGNELALPSKYVNFLYLASHYEKLKGSPEDNEQKQLFVEQHKHYLDEIIEQISEFSKRVILADANLDKVLSAYNKHRDKPIREQAENIIHLFTLTNLGAPAAFKYFDTTIDRKRYTSTKEVLDATLIHQSITGLYETRIDLSQLGGDGGGSSGGSGGTVSLQDEHRLFDIPVTTSLPDVWLQDFPQAWAETGGLGRAKCQAPIIIDLKPTAVPVSIKQYPMSLEAHMGIRQHIIKFLELGVLRPCRSPWNTPLLPVKKPGTQDYRPVQDLREINKRTVDIHPTVPNPYNLLSTLKPDYSWYTVLDLKDAFFCLPLAPQSQELFAFEWKDPERGISGQLTWTRLPQGFKNSPTLFNEALHRDLTDFRTQHPEVTLLQYVDDLLLAAPTKKACTQGTRHLLQELGEKGYRASAKKAQICQTKVTYLGYILSEGKRWLTPGRIETVARIPPPRNPREVREFLGKAGFCRLFIPGFAELAAPLYALTKPSTPFTWQTEHQLAFEALKKALLSAPALGLPDTSKPFTLFLDERQGIAKGVLTQKLGPWKRPVAYLSKKLDPVAAGWPPCLRIMAATAMLVKDSAKLTLGQPLTVITPHTLEAIVRQPPDRWITNARLTHYQALLLDTDRVQFGPPVTLNPATLLPVPENQPSPHDCRQVLAETHGTREDLKDQELPDADHTWYTDGSSYLDSGTRRAGAAVVDGHNTIWAQSLPPGTSAQKAELIALTKALELSKGKKANIYTDSRYAFATAHTHGSIYERRGWLTSEGKEIKNKAEIIALLKALFLPQEVAIIHCPGHQKGQDPVAVGNRQADRVARQAAMAEVLTLATEPDNTSHITAGKRTADGSEFEKRTADGSEFESPKKKAKVE
